United States Patent Application Publication US 2006/0040262 A1 - sequence listing, part 5

SEQ ID NO: 380 - DNA, 42353 bp, Homo sapiens
gactgtacaactcattcagtttcttaaaacaatgcagaattgtgcacttgagatgggtgaattttataatatgtaaattatacttcaatagagtcattaagaaaaagaaaacccaataatatgattaacaaaaagtagcttgttaaaaggagaggaaaaaactgaacactttgtggtcatctgtccccagtgaccaaggctgggatccagggaaacataaattatattccacacttgccaggtcacctagggccaaagaaaaggaatggtgagcaggagacagttaagagtctcacgcttttcttctcctggcatgaatatcatgcaatataagattttgtaattaatagaaaaattaatagtaattttaaaagtaatttctatcttttattttctgcttggagataggatactttgagcaagaaagataatgatgttatggaatatccagatttctttacaggaaattttgatattagaccactaaaacttctaagtgacagcaattagctaagtattacgaaatacaaaaatgaaaataaaacaggttttaaaaattagataaaaatatggattggatcatttaaaaattaatatttttcagaaatattacataatgtttcagtttattacctctacagtggctacacaaattgttcctttaattatatcccttaaactttctaagggatatttgcaagcatagtacaatgaatacctatacatccttcacccatattcaccaaatgttagcattttccatgtttgccctctctctctcttttgcgagtaagatgcatatctcatgaaactttacccctatatgaattggtgtatgtttcttgagaaaaaagacactttctcacataacagaatctactcaaaaattacatagcgcatttaatcaccatgtcttcttagtctccttttatctatttaggaaatggtcattccgtttattttattttattttactttttgagacaaggtctcactctgttgcttgtgctggagtgcagtggcgtgaacacagctcactgcagccttgaccttggctcaagtgatcctcctgcctcagccctccaagtagctgggactattggcaggcaccaccacaccaggctaagttttgtattttttgtggagatgaggcttcctagtctctctctcttttttgtaatccttcatgacattgatatttttgaagtctttggacaaattgtttcataaaatgtctctcaattctaatttcctgattgtgtcttcatgcttggaaccaggttatacctgagcatgaaaactacagaagtgacactgtatctttttcagaacatcacaaaaggtggcacatgatgtcggtttgtgccattattcgtgatattaaatttggtgatctgattaaggttgtgtccaccagacttctcaaatgtaaaactaacccttttatttttgtgattgataaataacttgtgggaatttataggtatcatgttccccaacaatgcatcacccaacgtttctcagtatctattcttgagaatcaatgattaccacagagactgtgaaatgattttctaattctgccatttcttctatacttattaattggtattcttttataaagaagagctttccatccccatcctgaacctcactctctttagtatcaggatgagcttatggccttttaaaaatggacatacactccctatattctttattttgaagctcaaattgtcccatattggccaacggaagtgccttcaagctggctcctatgtacttttgatatgtcattattattttttgagtacttccttactttcagtactgttttcaccctgtttctgaattctgccatttcttcaaagagccctccttcctcttaggcagaatggtatttagaaatcaagccctgggcaccaggagtgttttttgctacgggggtgtcactgtagacacttcagaggagagagagaggaaatataattctttctaaaaaatcatgagttcacactcatactgatatatttctatttccaaaccaacaccataggattctttccaccctttccctataccacatatgtaaccccctcccactgatactttaagcctaaaaattttaaacatgagaaaacacaaaataaaatgcttgctacaaggtaaaattcatactactgttgtgactatccattctaaacaattgaggaaagtctaaggatattcatttccaatatttaaaaatcccatgctacagcatgaatcatcattttctacttttaggaactggaggaacaatgtttatgtttatgttctcgggaatgctctcctaccttctaaattggaagtagatttcagagctagaataagcttatgatagtaacaaggcatgaaattacagaagtgcaaagtccaagtcatgctcttctgaccaaatgttggcctccttgtcccaagagggtaaggttgagaggagaaattttccacatggaaaaacactgccatagggcgtgcattaatggctgatgggcagtttggtgaactctcagaggtgtgctttttttttttttaattaaagataaaagttgtatttttaggtagaaaataagttgagctattatgtaatgactcataataggtcgcgagcttttattctacatgtccaaaagtattgaagaatctggggtacaaaaggaccatggcagctcgtaaaatggtaaaaagcattataagcaccagttagtgtatggaaaacatcttcagtgtgaatgaagcctgggaggcagagggcagataggcagccttgtatacttctggttaaaatgcatattgctctgatttttatggaaggcaacttggtcatgccctttgaccctgcaatcacatttctaagaagtttacctcaaagaaacagagtagtacacaaaatattatctctgaagatatcatcataacattatttgttatatataaaacactgaaatagaacctatgtacaagagttatagataggatacttccataaaaaaaaaaaaactagggttattggttatgtgtcaatttcatagttagggaaaaagggacagatccgggcacagtagatgcaataggatctgaattttaactaaagaaagatgcactgtcaatacatagcagatgaatgataatacagagatccatagctaaatagataagattgctataccaaatatggtttgtgctttcctggagttatccatttttctaaaataaacatatatttccttcttaatgtaaaaaggttgccaaaataaatttcccagcctagtgggaaagtcatgggcattggagacacacagcctaggcttgagttcaagctctactagctgtgttgactcaagagctgctcagtcttcccgaaactcagtgcttcctatttgttaagtgaggataacaacatttaccttatggggttgttgaggggtaaacaatgagataaaaatggttgatgcattagagaaacttaataaataatagcctttatggttatcattggtaatattattgttattcatgttatcagatctcctaagaaataaaagattatttggctgaaaaatttagagccaagattctaaagacgaaaaatattctggagtagctcagttttcttaatcaacagtgtaacatcacttactgttattgtataccagggccttaacaactatgaaatgaagtcacagtaatttataatattttttcttttatcaggacatatatattacatatatattacatatgtatatatgaaatacatatttttgataatataaataacaaaaatgttataagtatacatgacatataatatgtaagatatataacaataaaagatatatgtatcttttattgaaagatatacatatggaaagtatataaaaccatacactatttaataaataattataaaagcaatactcataaagccaccaccaggtcaagaatccccaaattcaaaaatcccatccttttgtccttcccaagctaaccactaatctaaatcttttcaataatttccttgattttccttgcaattttaccatttacatgtgcactctaaatatatagcttcgttttggcagttttagtttgtttgaatgtattcatactgtttgtattattttcttagtttttttcccagttaaaactgtctgtaacccatcatattgttgtatatagtgtgtatagatgtctttagttttcattattatataatattttgttgtatgaatattacaaaatgtatgtgtttattcactgatggagacatttggctgttttccatttagggctgctatgaacaccaatgtgcacacatgaagtacacacacttaaatgtatacacaagtttacactcccaccagcactataagaattctcctgttgctctatagctttaaaaacacttagtttttgctaatctattgggtgtgcaatagcatatcatttataaatttaaatttcatttctcttactaaagagttgaagggtttctcttttgttgttatttttagagacaggtcttactctgtcacccaggctggagtgctgtggcacaattatagctcactgtggccttgaattcctggcctcaagtgatcctctcgagtagtgaggaccactggtgcacaataccacgccaagctaattgtttaaaaaatttttgtagagatggaggtctcacttttttgcccaggttggtcttgaactcctgggttcaagtgatcctcctgccttggcctcgcaaactgctgggattacagacatgaaccactgtgcccagctaagatgttctcaaatacatatttggtcacttggtctctgtttttcatgaagtacatatttatgttctttactcacttttaattacattttctcctattttcttatcattatgtaggacttattctacatcctacacactgtgcttgacagtaatgtgtgtttaagatgtcttctccctttctgttccttgtattttcactcttgtagtatcttctgctaaataaatagatgttcattttcatgtagtaagatgtattaatcttttccttttacggttagtgcattattttttaaaaaataaacctttcccctcatcaatgatgtttttaccattcaacatgataatggtgctggtttgagggcaaaaacaaaaatcatcatgttaagaagataactttctctattttactagagatttttaaaaatcaatgattgaagtagacttttgtcaaatgtcctttcacattccactttataagatacagagaactgatctttccaataatttgacaatacagttggccctccatttccacatgttctgcacctactcatccaaccaacagtggatcaaaaatttgggaaaaaataagaaacagcagtacaattaataaaaaataggacaaataaaaaaccaatacagtataatagctatttatatagcatttacattgtattaggtatcacaagtaatctagagatgatttaaaatatatgagcatatgtgcataggttacaaaaaataatacaaataaaaaagcaatacagtataataactacttatatagcatttacattgtattaggtatcataagtaatctagagatgacttaaaatatatgggagtatgtgcatagttttataagttttattataaaggagacacatgggtgaggggcaggagggtcccagacatggagcttccaagccctctccttgtagaatccaggcacaccaccctcccagcacatcatcatgttcacaaccaggaagctccactgagtttctatgtccagagtttttattgaggtttcattgtgtaggcatgattgattaaattgttggccaagcaatcaaattcaatttctagcccctgagattgagctggtcccaagttccaaccttagggagccactaggagttgcttcattagcattatataggcactcctagcactcaggaaatcccacgggattctgaagatctctgccaggagccagggagaaaggctgtatatactcctttttatactatgaatatcaatggaaaatcacctaaaactaataagagttcacaaaaaggccaagtatgaaataaattaacaaaaaatcaatgcatttctttcataccaataaagggcagtaagaaaatagagtaaataaaaggttctacttacaatagtaaggaaatatataaaatgtgttagaataaacaatacgaaatgtggcatagattccagaagatgtagtggaaagtcaagaagagagaggaacatgagtttgggttagggggcagtaatcagagtaggaagaatagataaccatacgactaacttttaagatgctgactaaagatggcagggatgtgagtcatgtgggattaactggactcaactgtccagcataccttaggtatgaacatgaaggtgcgcaagatcatgcccaaaggttcactagtagtagatggcttataaaatacctgctcataggcactgcagccaggctgactctacttgtcgttactgacaggtctatttgagtcaccaccgaatctatcctccccattctgactgtggggaaggaagacagagaagatagttacacacttaaaagtaaaccaccgaggccagctgcagacaattaaacagtgaggtattaaaggagaaaatggaagcctaggtttctgctttacattgatttcatttcctgggaccttatactatacgagtttaaatttatttgtatttatgctgatctgaaaagaaagtttaaatttgattggcaaagcaatctaagaggaggggtgatttttgaagtacgtttttttcatttatttttctaccatcaccacctagtggagaaaaccttgaacttcagacagaggggactagggttcaggaaaaaatattactacaggacctactgggtgccaggcactttactaaatactttcacattgacaagttcacttaattctcatgacagaccgtgaggtaggcattcttattcctcctttagatttggaaactgagtgtgagaagttatgtagcttgcccaaggtcacactatggacagctcaaaacccaggttcttgaagtcaaggtctagagtcattttcacctcataggtcatccaaatagctcaacttcatccatgtatgtagctgtgggagacatgcacacacacacacaatctttgctttgtatttttcctttttattatttacataatataggatagaaaagcacaagtagaaaaaggaaatggcattatactatatacattaggttttgtttttattttttgagacggattctcgctctgtcgccaggctggaatgcagtgttgtgatttcggctcactgcaacctccacctcctagattcaagtaattctcctgcctcagccttgcaagtagctgggactacaggcgcgcaccgccacacccagctaatgtttgtatttttagtagacagggtttcaccatgttggccacgatggtccccaactcctgtccttttgtgattcgcccgcctcagcctcccaaactgctgggattaccggagtttatattaattctatctctcttaatttttactcccatagtacacaagtttcccatgacaatacttttgaaaaccctattaacaataaagttggacgtaaaattatgtctatatgcaactctactgtctaatcttgaaacatgtcctaagagacttaaggtaccaaaatactaacaatgattacaagtagacttgtagattttccacagcattattttctgaaaaaagaaattttaggccttatattaagagattcaagaaatttgtttccattttaaaattttttggatgggttaattgatcatgtggccacgttatctctataaatgtttaaaatcagtgtactgtatttccacatttagtaacacttttcttgaaaaccttgctttgagatcagccctaaaacttgttttgcaagtattcacttctgtgatgctcctgcaataatccttatgtgctcgcagtcaatgagtttttactctcattaacttgatgaataaacgcatagaccctcacggaaactgttaacagttcttaaacacagtgcagagtttcttctttctggtagcttcctgatctcgccggctcagaaatcaactggcagaccttcccggagaccgttagaggtcttaggtcagcatctcttaagttagccgttcctgccagtgggttcagtgggtttgtggtctgactgccttcagaaataaagctacaagtctccacagtgagtattaccactcattaagacaattcagacccaaacaccagctaatgcaaaaaataaaagaacaaaacacccacacaagcaaaagaaagccaagcgggtctccatcgccagctctagcagcctgcttttattctctcatctggccccacccacaacctgctgattggtccattttacagagagcccattggtctgttttacggagagctgattggtctgatttgacagggtgctgattggtgtgtttacaaaccttgagctagatacagagtgccgattggtgtatttacaatcccttagctagacataaaggttctccaagtccccaccagactcagaaacccagttggcttctcccattaatttctgaactggggctgcagcatagagttgcttgctagtcccacgtaatgagcctgcattgctcagctctggggtggtgaacggccctgggtgccgtgaggcagtaagcagcgcttctcagggaggcttgggccgcgcaggagtccccagttggggggaggctcaggcatggcaggcctgagccttgcgctgcgtggaggcaactacggcctggcgagaagtgctgtcccaagtgctaagctcctcaccgtcctgggccggtggtgcaggccgctccgagcgcgaggcttatctgagcctactcccacccggaactcgcgctggcccgcaagcaccgcgcgcagccccggttcccgcccgcgcctctcccaccatacttccccacaagctgagggagccagctccggccttggcccgcccaggaaagagctcccatagtacagcggcaggctgaagggtttcgcaaccacggccggagtggacgccaaggcagaggaggcgctgagagcgagcgaggactgagagggctgccagaatgctgtcacctctcactgctgagggacaaatgaaaaaaaaaagctcacggtcgggcgcagtggctcatgcctgtaatcccagcactttgggagaccgaggtgggcggatcacctgaggtcgggagttcgaggaagaaaccccgtctgtactaaaaatccaaaaaaattacctgggtgtggtggcggacgcccgtaattccagctactcgagaggctgagacagcagaatcactggaacccgggaggcggaggttgccgtgagctgagattgcgccattgcactccagcctggacaagagtgaaactgcgtctcaaaaaaataatgaaagctcacgatcctcttttggtagtttcacgttacatgatgattaaagtttaacttgtttctctagcgtttctattaatcttatttttgagcctaacttttttagttagaaacaactcttaaccagccagccaggcgtggtggctcagcctgtaaccccaggacgactccaaaggctaaggcggaagggtcccgggcgcccaggagttcaaggctgtgagctctggtcgcggccctgcactccagcctgggcgacagaacgagtgagaccctcaatgtgctcttgcccagatgaaataaaaattcaagttttggccaaatttcggaaaagtcttcattctccctcaattcatttacctcttctagttaccaaaaatgcctgttttgagatacatgttttaaaacgggagacttagacaaaagcaaaaaataacaacatggtaattcattcaaagatgcagaataccacacttgttttaatctgatattctttccatttctatccgtctaggacgtaattgcacacgggcgcctcccatcatttggttgctaaggagacagaaggctggtgtttccgatttgccactattacacagcggcccgcgagaagcatctcttggctcgaagcgcgctgtaggtgaaccgcccttgacttaaacgccaacacatctaaaagggggcgagggacgctttattttcatttccctgaccactactgaggtgagcatttctttcactcgcgtacttgtttgtattttttctgctgttcacgtccaatagaacactggttttctattggaggcttttgggttttttcccccatttccctttcgttacaaacgacccgctgcggccgcctcctgcttgtccccacaggcccattcaacagcccagcacggaaggccgggaaagcggcgctcgccgctccaacaacctcgcgcagtccgtggctcctccctgccctcgcgcgactcgcaggcctgggcggagggctgcgtccgccaccgcgcaacctcgcgcacgcgcaccacgctcgcctcgcaacccccccccccgcccctcccccgcccccgcaaaggctgttctcagagtcggaaatggacgcacggcagctggggcgaatggccgcggactacacttcccgaagtgccgcgcgaggtattctcggcggtgattggggcaaacggccacggactacacttacttacatgccgcgcgaggcgcctccgccgccggggcaaacggccacgaactacacttcccgacacgccgcgtgaggcgctgccagcggccggccgagggcgggcggacgcgggagctgcggacgtgaggcatgagcggcgccctcctccggcccgcgagcgtcctgctggttccccgagcgagggtctcgcggcgcggggcctagcggagggcatcgaaggcctccgcgtgcgcacgggttgctgcggccgcgccgggcgccggggagggcggcggccgccatggaggtgagcgggccggaagacgaccccttcctttcgcagctgcaccaggtgcagtgccccgtgtgccagcagatgatgcccgccgcgcacatcaactcgcacctggaccgctgtctgctgctccacccggcggggcacgcggagcccgcggccgggtcgcaccgcgccggggagcgggccaaggggccctcgccgcccggcgccaagaggcggcggctgtcggagagctcggcgctgaagcagccagccaccccgacggcagccgagagcagcgagggcgagggtgaggagggcgacgacggcggcgagaccgagagccgcgagagctacgacgcgccgcccacacccagcggcgcccgccttatccccgacttcccggtggcccgctccagcagccccgggaggaaggggtcggggaagaggccggcggccgccgccgcggcggggagcgcgtctccgcgcagctgggacgaggcggaggcgcaggaggaggaggaggccgtgggcgacggcgatggcgacggggacgcggacgcggacggcgaggacgacccggggcactgggacgcggacgctgccgaagccgccaccgccttcggggccagtggcgggggccgcccgcacccccgggcgctggctgccgaggagatccgacagatgctacagggcaagccgctggccgacacgatgcgtcctgacacgctgcaggattacttcgggcagagcaaggccgtgggccaggataccctgctgcgctcgctcctggagaccaacgaaatcccctcgcttatcctgtgggggccgccgggctgcggcaaggtgagtgcggccttggccgttgggcttccgtagttatctcggcggtggatgcagctgatggtcggagagccgggtgtgctgccctcgaaagaagccgcctgcctctcctggataagggggtgcagacttgggctgggctggggcagtgcctggtccacaggtggagtctgtgatgggtgtgaaaagggcacacacccccagattggtaaggcaggcttgccgggtttgcaaaaggacgatgtctgtgaatccatagttttacaagatgtggactcttagatttgatctgcctttatcttccatcggtctccccgccccctccccagactttgatttagtaaccgaattcgcaaggaatcagcatgtttaaattgtaaagaaacatttgtatattccgtttgtacataataacggattcagctttgaaaaaaatcaaattaattctgttgtgcttccttccttttccactagttgttggtttaacagactggtatttattcttaagaataagtttatttaacattcttatattcttgagaatatattgattttactaaatatactcatgtatttacaaaactaacataaaaactttttcatctgcaagtcattttcatccggtatttccgtaacttttctcataatgccttgtactctagagaagaaacatccgtgcattttggtgtccagttctgtgtcccttcgtgaggcgttagcgttccagatgagggcagttaggatattgtgagtctagaaagcatgtcattggaaaaacacttgagaaaaaaatggaggaggtgagccagaaaacagagaaagctaagaagtgcttaaatacaggatgcttttatccataataagggagaagaaccagcatcaggaagggaaagggagaattcagggatcaaactgtaaagagttcttgtagctttgagattcagactcgtttgcacacaaggcttttatgatttttctcctatttttctttctagctttatctcccacaacttaagcacaccccctttaactccagttcctggaatgaattgccctttttgtgccttcttgtttgcactcatgccttccctttggccaggaataaaccacatctatcccaaataacatcttatgatgatggtggtcgagttgttgacgtctgtccccatggatttagttgttaaccccatttaagggattgagcagtatcattcttagtaattgtgaagtctttacataagatcatgagaatggataatcagctgttggtggccccagacagcaagaaggtccttagggagacgagtgggtgagctcatcccacctaccaaatgccaggcaagaggtttgggtggtccaggctgctcagtgagatgggcgttggtcatttgcaagcctaggcatctgtgacttgcgagcctgattccaaaaggcaggcaggcggggatttctgaaagaagcagccacagaatgggtgctctacaacttttagaaaagaaagtaccacctttccatttaggtgcagatttgtcacagtcattaaacagtcttcagtttttcttctcatcctttagtactaataacaacattcatattaataacagcatatacatatttgttgaggacccaagaagtgctttacctgggtctccttggttttctagtaattgctaatgtgaccacagtgctgcccttcatctcctaccagagtgaacatgcagaagtggcctacagtcatctcaaatgctaggtggatgtcattggtctcaaggcaaatgctccctcactctccttttctcagctgtcctgagcttccagttcgggctgtggttctgcgatgagttctgcacctagatccttccgtgctgtctcggctagaggagggagaattttctctttggtgagaggtcacagctgtcactctgctaaatcaagacagccgttctttactgggattccaaagatcttaaagagtcacccaaaaaggaatcaaaggtggttagggacagaggagaaaaggtcaggattagcctaaggtttagctactttcctgttttatttataatatttttgttgttgttgtttttaaatgtcctgtggtatttttgattgtttctgtgctgctcagcattcttccgaggtcaagttgcttttggtaaatagtgatgctgcgtgtggtggttcccatgggtgctggtctctctgtgtcttaccagcttttcaaactccatgtatgtcatcttttctagaccactctggctcacatcatagccagcaacagcaagaaacatagcataaggtttgtgacattatctgcaacaaatgccaagacaaatgatgtgcgagatgtcataaaacaagctcaaaatgaaaagagctttttcaaaaggaaaaccatcctttttattgatgagattcatcggttcaataaatctcagcaggtatattaacttccttctaccttttggtcgttgtgaacatcaaacaatataaagtgtgtgagatcactatacaaacgctagagacttatgagctttgtttacaaagaagcgtaggcttgtgaacccatctccttcaagcctatttctccatacatttcttagtgttttttgataacaagaaaatgctttctctatctgataaatgaaatggttggcatatccctgagctatacgtatcagaaaagcacctttgaatcaaatttccagttttaggaatttttaatctaaatactaggagtcattgtgaacagtaaaataatgattttaaggtcattattttaatgggtttttaaaaattactttaacagtatttttattttgaaaattaaacaatcggtattttctgtaactccaggctctgtcttcaaggtgaatgttggaagagctaatgattactgtttatttaaatgggtttctgaaataaaaggacacaagctatttttataaacaaagccacttagagatttaaaaaaaaataaacattaaaattttattgggctgagatctgagagctatactctaaataaaaaaaaattaaatttttaggcataactttaaaaaatttttttttgtaactttttaatcatacatagaatatttcacaaaactctactgagccttttttgaacctttttgaataaaaagacccttttaaagttctgacgaggcgttagcattctaggtttcatattggaccactgactcatcttagtattttttccccataaaacagcataataggaataataataatatgattgagtgcttgctgtggaagaagattctggaagtgttaatgtttttgtgtgttcttgtctataaataaatagctgttacatataagctatgtgccagttcagcctttggtagaagatggttttctgagtaaagaaatcatttatgttgaaactaagctagaattctacttaaagctattagtctaccagcaagagatcaggcttggacgggcattccagaagatgtgtttcagacttaaaagcaagagttgtactcccccaaatattgcatctatattcagtgaatataaggctgctgctattcctgaactcgaaagataaaaatgaggaaaaggaaggaagggatagccaacttacataggattctgcaggtggctgttgactggaatcacttttttctgttttcctcccatgattaggacactttccttcctcacgtggaatgtgggacgatcactctgattggggcaaccactgaaaacccttccttccaggtcaacgctgctcttctgagccgctgtcgagtgattgttcttgagaagcttccagtagaggcaatggtgactattttaatgcgagcgatcaactccctgggaatccacgtcctagactctagccgtcccactgaccctctgagccacagcagcaacagcagctcagagtaagttgacagtgtgcagcgtcctgggggcacacacctcccagagagtctcctggcagggggccagaaagggccgggcgtcagtgaggagagggtggggacagagaagaaatgttgatccgcccgtaatgaaaataaaagaggagggaaatgttcgattatacctaacaaagttatccctgcacacttgaagatgcattttccagcctctaatatgtgtttctataattcttcaagctttaactttgctttgttgttttggttcttgggtgtttgcttttgtgcttaggcttctatgggaagccttattgatgatttgaaaggctttatgtccctcattgaatagaacaaatagatagataaatactttctagacttaccatacaactcttttgagcattgtactcatgtttcaatttctttttaacctgcagtttagcattttgttaaaaaaaaaaaatcaagtaaaaattaacttgtaaccttaaaattatgtaatcctttttgtgtagttgaaactcagtttcatgaaagtaaaggaatgttaactgaatatgacattataggctgtccctatccttttagtgacctatttctgcatcatgagtaccacatgagctcgttaatgcaccaagtgtatatcatagataatttgatttcttgggtcaggggttttccttttttttaatattagaacatattcttcagatggtatttgttcatacgttggctgaaatactgccatggaacataatctggtctgatgagaggctattgcccacctcctcctgctgtggactctgcagctgctcgtgcctgccctgaggccaagttctggagccacttttctgtgaggattaaagtacaaggcatagtttaggctcagggtttaggtttcaccaggctctccctatgtgtctggccccatttgctcctgtctgagatggagggagaattctgctgtgtctaatgaaagcattgaaacatttggcccgtggaccactgggtaggacagagtggccttgttttggaataccgttgtgatggggatagccattacatctgtggccacaagcagtgtgtggaacctgtggtatcagccacatggactcatactcagaagtgctttatgtggtgggcatttgtcagagcctaagggggctgccagctcctcatatgtagtacaggttgagtatcccaaatctgaaatccaaaatgctcccaaatctaaagctttttgagcaccttcatgatgctgtgaaaggaaatgcttattggagcacttcagatttctggattttgggtgctcatctggtaagtatataatgcaaatattctaaaatcaaaaaaataggaaattcagaccacttctggtcccaggcacttcagatgtgggatactcatgtgtaggtttcccgtaacagaattctcattacagacgcatagaaccacatggtaaagacaaattgaaagaaaaggggggaaatcctaacatgtttcatgtttctgtgtgttctttgctctgtgtactggttatcgtaatgtatctgcaacttaatattctgcatgtgtacttgtctggggtgatttttattgatttcatgtcatcagttcatgaaatagaacatgaaatcaataattaatattgatgacatgaagtcaataataatcagttgttactcagataccctcaggttttttcacctctccccagtcactgccatgcaggaatttaaaggaaatgagaaaggcggcagccaaggagctcatccttgtgagaagaatttctatattttattattaaaaatcctcaggtgatttgcaggcacattaaagtttgagaagatcaagtgaaataattaagatttagttattgaaactgatataacaatgagctagagattgtttatctgctaaaattgcttttcagagaaaacttcccatatccagtaaatgatttactatttccactaccgcttgcttagacttgatcccaattatatttgctatcttgtgtcccccgctttcctgggaagactgtgaggacaggagcttgtccctgttcatatccccagcacagtgcctggcacacattatgtgctttgtgaatggtttggaaatgaataaatcctagctttcgatatgagaaaagtagtttaatatgttttgcattatccagcataagggataattacccaggtatcaagagcctttttctttaatactattgcccttttcatcagcagcaagcagagtaaaatgaaagaatgttaagcttaaaaccattaattggtcaacttgttagcaattctaacaagaagttaagttaggagatatcataggccacagaaagaactcttacaagtgatttccgaatacaagtacctgccaccccaactgtcagggataattaagagtggattgggatgtcttttagttgttttaggtaaaattttgctttccaatccctgttgacagctatatatacatccttgtgcatataaatcagatttggtgacactaatctagttgaaagaaaagacttccaaccccatatacttactttctctctccaggaagctattggtgtgcatttgtattcttgtgtcatgttttggtgccctagatagcaactagaacatttacagagaagtcccaggctgttgaactgcacgtgagaggaggtgagcagggcactggatttggaaactaatcaagctgccgcttagccgttcttgattgcacttgaggaattgtgagttgtcacacagtatactcatgtaagtgataaattcccattaaagtgaaataagtgttctttttttaaaaaaaaattccctcctgtagttattattcagtcaaaattgaagctcctgcatatgctaggcattggctgagggttgaaaagcttgttcctgtgccttcagagggagcgcagtatgatgaaggctaggggagcaggtccacttccagtgccacgcttatacgccaagtgcagtgggcgtagagaagcagcattcagaatatgtgaaatccagtatttcacctcctagatgaggggatgcggagttgagttttgaaggataagcagaatttaactgagtgaaatagaaagctcattgtctacgccatagttgctttggtttgtatggctaagcagtagtgttcaggtattttgctctcccaaaaatatttggatcacatgatacaaacagtgaagattctgtctgctctgggttaattttggaggccaggaaaaaaatgtccatgattcatgatacgaagaatgagcttgtgctgctgaaaatgaaaaagtaagctagcatttcgtcatcctgcactacttgctgctttgaaggaatatagattcctaggtcatagaatatatacatagtcaaaaacactcctaaagaatcaattatttgtgaaccagatagagtatacaagtctttggagctcaagagagtgaaatgagaagccataactgccctctgcctagctaggctgagttccgagaggtggttggaagacagaaagtggcgtctgtccctgggtaagggctgtggcgtaactgggtgtggggcttttctctaatcatctggagaggagagcccctgacaagctggcccccaaacaaggtggctatggattcttctttttataaaagtttaaagtgtcttaaataaccttttgtgccattgaatagaaagaaaggtagtggaactccagaatacaagggattggccagaataaatggttggtatagagtagatgtcaatctttttatttaaaaattttttaagtacattaatacagtacattaacatagctgttttaatacaagggtgcattaaaataatgccataaaagcaccagcagccagaaccacagatctcatggtccttggatgcacttcctgtggctgctgtaacaattgccacaaactgggtggctcagaacacagagctttatcctcacagttctgaaagccagaagaccagaatcaaggtatcaacaaggcgatgctctcatccagcatctgatggcccttggcattccttggcttatgactatgtcactccagtctctacatccatcttcacatggtggccttcttctctgtgtccttacgtcttctctttttctgtgttttgtaaggacatttgtcattggatttaaggtacactctaaatccaggatgatttcatcttgagacccttagttacatctacaaagaccctatttccaaataaagtcacagtcacaggttccagggattaggacttacatcttttggggtcactattcaacccactacagacccctaccaagtataatgtaatttggaaagacatgtgcctccatgggattaaacagaaagacgtcgtcatctgaaatgtaccttctctctttgtggagaaagtcagttttgttttgctttgctttcactctgatgttatggaagcggcagcatctggggctctcccttggatatgtgcagttctggagagtatgctgttgcacagtctgatgagggtgattctcctcgctgttgataccaaagcagtatttgtcgagtctcatgacatggcaggcactgctctaagcattccacatgtcttaatctcattcagtcctcaatacagctctgcaaagtagatctcattacctcctatttactagatgaggaaactgaggcacaaaaaggttaagtaacatgcccaagaccaaccagcttcaatgtgatggagccagtgtttaaggcatgtctctgtcttctcagtgacttcaagtgctacaaggggtggaggtgccaagtttacagaggatggacccactgctcggtttttctgttctgacttttctctcttggcacttctttgtgtaagagcagcaggagagccttttaaccagatctgcacatcacacttccctgggatacattttagaaacatgccttgcccagggtctgcccctggagatttgagctcagtctatggtaggtaaggtacatgtggctgtatttgtgtctaacttgatgcatatccctggttgaaacttctacacagcagttatcaccctgaccatgaaatgttccttttccttagtggaagagatttgtggggtttggtttgtaatttagagagggagagtttaaccaagccatgcatattctttcattctgccttgaaataacaggtacatttttacttactgcactccttctccaacttacatatccagctgtctaagtagtatcctccaaattccagtattacccaatgtgtagaaagcttcaggatttaggcacctggaagaggaaagaagagagcttcctatattcttctgttaaaattaaagcccttctcatcagttggagaagccaagctctcttaagtctgtttctatctctaggttttgttaactagaaatagaatcttttccaatgcatttattttaaccaattttcccttattatgaatagtgttttattataacaacataatttacttcctattgtttatttccatgtaggatgttatgacattttgggcagtctatccccagaatagattttacctctttttattgtattctacctttggaaggttatttttaagtgcaaaacactttataaatatatgcttaattttaatatatgcttaaatttaaaaataattgtaaattctctagactgggaacactccttcaaaatagtttgtgccgcagtttgctgagggattttgccaatatcaatacaactatcccttcatcattcttggcatgagttctctcatgggcttcccattctaagatctcagggtattttagtatatcttacttcgttcttcagaacttagtaaatgggagttcaagatatattgggtgtttaagtggaacctttccctgctcagtcgtcttcacagtgaatctccattttgtaattttcttgtgtgatcattgtgagtgctgtcagcaggtcctgtattacttggacagagttgccgacagattgatctgggcctcgaaatactttcttcttttggacggggtgaaatttaaaatgtggattatacccaaggggaggaagaagaagggagtggcgcgagctcaggtagctttcgttgtggcagcacctccattccccatgactccaaaccagaagtgtggaaccacttgtactttggtcaggagtttaaaagccaaaggaagaccttattttccaaccacataaaatacataatcattgctaaagacttattcacagcatactgttgataaatcaatggagtagacggctagctggcttctgtcctaattaataaggcctgcctccctgtctgtatatgaggactaatggaaatgaggcagtttatactagtaaataccatggtatataaggctgcccatctcgtcactgtccaaagagcatgccatgcccctaaatacatacaaaagacaaattcatggagaagggatacataccaaaatactaacgtcaaggtagtctagcagaaggtgaattttctccctttgtctatttttaaaatttaatgtaaatttttttaaagtaaatgttgacaggtctgagtagcttgtttttcaaacaattatttaatggttaaggatgtaaaactatgtaaaatatggtcccagtttttgttttaggttagctgtaaggttgatggttgcatgggtgagtggatcgtaaagtcagcacttggcacagtagctttcattctgctggaaatatcaagtacatttttatctctcagtgctggaaatatggattctttttgttttctctatactttccatataatttataagaagtaaaggtttcactctgagattatgataaaactgaagttagtccattcattttgcaaatattggatgcctatcatctaccaggtctgggaatacaaagaataaaatattcctctccttgaggtgctccgcatagtagggatgatgaatgtaatgtaatcaacacacaatccaacccatggtgcaggatataggctagttcagtccgttaggatccaatggggctcctgctttgactcctttttcttccctcaattgtcctgaaggctttttgttgctaggcagctttccaaggagagagaatccattgtttttactagttctgaggcagaaatgagatgcccaagcagtttctgttctccctacctgtcttcccacacaggttgagtgcagtaaggggctgagagtgcacccttccctctcaggcatgtcacgtactgctacacccctgtgatgctggtccttccccatacattttctttagtatatgttctgtccatcattatcttctaaatcatcttccagaagacttgctaactaatttctggttgagaagtgatccccaggctttatagagtgccagtgacatggcctcggtgtttgtttttttgttgttctggtgaggtctgctgagagaatgctaccatcaggagagaggaagatgggtctccaggctgcaccactggctctggggcccaggcagttggcatgagtgaggagagagtcatttgttgtaaagctggggctggccagttgtcttaggtgtggtgagagacccacaaggaataactggaaatcaactttggtaaatatgggggtgagatgaggcatctttaaggcattgggaacaaatccttccgtgaatgaaatgcagattggtgttatttgggttactcagtgagcagagtagtgtcagtgagtgggtgtatgctgaggagttctgcattgatccagcaggcaagctgggtccccttcggaaactgccacccctccccggcccagccccgttggtgcctgtacattgttttccaggtagctgattcggacagtcctaatgggcttattatttactgtagatgttctcagctgaatgttgatgacatgggtgaactgtaactgaaaaattttatttttttgcttcacaaatgtgcagctagcagctcagccaggaataagaccccactaagttatgaaatgtgttagatgtcttgtttaactcaactagggatagaaaattttactgagtcagccttctgatcatagttagatcttatttatgagggtccaaatttagaaatgtgactgtaagttttagtcctgatgttcagagagaggttaggtggcttacccagggtctcatggctatgtaccagcagtcttctcgtcgcttcccaggctaatgacctctctgctaccctgtgcggattttgcatgattagtgtccactatgagatgacctactgcagcatcccaagattccccaggccaagagaatcctgagacctgcttctaggacctgctgtgctcagagtaactagggacccaatttgttgtttttaaaatgaaggaattgaactgcatgatctggagcccttcagagctaatattcagatataatgctgactctcccctgtgtggaaagtggtctaagcacatctgtctcatcggatgtaggctgcatttggaacatgttttccatacacggtaatgaggtgctagcatttctaataaagttttcactgttgtgcagggtagaaccagagagaccacctgtcaacagtgactttccaggccagtcagtgtctgtttcacacagacttagatgtatgaacctatgcagtgagataccctcgacactcataagatacagggcgataacctggtgacttaggagccccagtcagttcgtagtcttgatgatgcttaagcacattgacaaaggtgagaataagaggcaaaggccttgaactcttcagtgtccttgctgagaagtatgagtttctaagacatgtgcagaacaagaagtatgcagcctgagtgtgaccgtaactaaccctgcttgtgtttcaggcccgccatgttcatagaggataaagcagtagacaccctggcttacctcagtgacggtgacgcccgagctgggttgaacggactgcagctggcggtgctggctaggttaagctctaggaagatgttctgtaagaagagtgggcaatcctattctcccagtagagttctgatcacagagaatgacgtgaaggagggcctacagcgatcccacattttatatgaccgggcaggtaagtaattcacctgtggaaagagtgaaaccatacggaaagaagtgtgtgcacacattctcatttccggaagcctgactgggttccggaagcattccagctgggtccagagcattccagtgattctcaggtggatctgcatgttggtattaagccttctacacagggctgacctttccgaagagaggcatgaagcagaagctgccctgttgagaatctagaggagttttggggttggaaatggcaggctgcacattcaccttagaaggtagttggctattccccaccttgcagaatacaatcacctttgaaagcctgtgcattcacttgacaatgaatatgttttgtgatcatttacaacggcagtaaataaaaagaggacttttgtcataatgacttattagttttaattgagaattaaaatgctttatttctagagtctatactaaaaaatagtcatggatcttgaagtttttattttatgtagtagctttttcaaaaatttaattttgctgtgtgcacttatctgtttttgtagaactgcatttacagatagcagatttgataccagctcttattaaatctgtgacttagcaatattaaatgtcattagcacagcacatttgcatctttttataaaagaagtgggagatgaatataacatactgtagattagcaaacttctgctgcttgagcatttgtgggactttggatggaatcatgttgcagtaactgtggaatataatttccacacttttcaaagctctgccagaaaaggaggctgataattgaatgttcctgatctcacgtaggctgtgccacgtgacaatggagagtccttactggttagagaaggggtggaggggcttaagaatgactttggttccaagcgctgcctcttcgtgggtgagcacactcgctgcatgacctaggggggctgaccaaagctttttggctttagcgtgcctcagctgatggtagctcaggggtgttcattagtgctaaggacacactggcaagttgaataaataatcctgtctacattgtgacgtgaatgtgcctcagcggggcctgctcagatggctggctctccctagtgctctggagcatgacgtgaatgcttgcaaagtctgaaaagcaacacattctaggtgtgtagagccctgcttgacttttggtcaaatagaaaaaatgtagatatgaacaagaaaaaagattttaagacattaaaaaaatctcaccatgccgggatcgccattgtttctgaagtgcagcagcagcggtctctctctctcttcttgtaggtgtcccaaaggatttgccttgttttgattggaacgactaggactgttctttgacattttatcagactgtcacttgagatccatataacatggcattcactaacactcagccattgagtattttataggtgtattcattttttaaattctcaaaattgctttatggagatagctattaatattacccccattttaagataacaaagcaagtggtgaaactgacccgtaaatccaggtcttactggttcccaagactgtccttccccccgtccgcatttgcctccacaccagccttgccatgctgttactgatctcacccattacatcatgctcctgagaggggtcacccgtccatgcacatacagagcggatcttggaggggttcagtcctaggaatcccacttcctgagctccacgttgcagagctctgcacagtggggatcaccttgtctatagcttggagctggggggtggtggaggctgcctagtgccgctgcctagtgccagcgccttaagaaccccacatcctatacatcttcccagtatgagtgtgtttacacaccccaccccagtgcaacatgtctgccccacagtggatccgcagacacataaatatcattcagatcttggagaaagctgcttttacaggctttgctctataaatagggatagtggaagcattgccctggaaacctgttagcttatactcttgggcctttttataactccagtgagacaaagacccacccccagagttgtgattatttttgtatatgccacctagttcatagttacccactagtaggatccagtgatgtttctgcatcagagtgaaggaatttctaaatgagagcaaactctctgccatgcattgacatcggggttctatagaagtcgtcaaatttcaggttataaagcagtgtgtaataaaagcaaacatggaaggtagcatagaataatactagtatctatcactgatgcaaaagaatctttttacagtgcctgctctgtgccaggcgtgtgttatttaatacagccctgtgaggtaagtggtctcgtttttcccattttacagatgagaaacctgaggcacagtgaggatcaggaacttgcccatggcccatgagcttgggggtccagcccaggctgtttggtcccagagcctgtgctcttgtccattatactggtggtattgcccctggcattgacaaagtgggaaaagatgactaacctgtgtagggggagtttaaatttgacataaagtggtgtgggtagtttcttccagcccccatgcccgtgagtttagccaggcctgttacctgctaccctcttccccgccttcctccaccctgcagaggagcagagcgtagcctgagtgcctgggccagcagggtgagggagtgggccagaaccatgcagatgtcatccaggacaccctctcggccagtgtccatagcactctgacttcaccaggggagccctgcacaggagacactcagtttgttctcagaaatccagtagctgggctgacccatccatctgccctggctctcagaaaccagaatcactcaggctgagccgtgggtcctgcaggtctttcccctgtgggaggccagcatcttcgcttgctctcttctccacctgaagaccaactgtcatcttaccagcgagctcagctgccagggtttgtggctggcgccagtcgtattgtggacatgggcttatgctgagcacagaccaggtgctcctctgggaggagtgagactcacgggaacaccatcctccgctttctcgtgaggagggtgccccctccttgaacttacctaagggacgatggccagagaatagtgaaatgtatgcaggtgccactgcttagttcctgagaactgtttagctgtcatttttttgcccttaaatatgcctttttttaaagcacatttcactgatttcatgtgaatctagggtaaaaatggagtagtaagaccaggcggtgagagagtgggcttccgtccacttcagggcggaagctggttagtccacgtgtcggtccttctgggaccctgccacacaggtgtccccacaccaaggctggcagaaggaggtttaaatgaccacaggcttcggatatcagaaaggcagctggaaatgacactgaggaacagatgggctataacagctgcccttgccacttggctctacatcctcctggctccgagcaggcccaccgttgcttttcctccagtagatggtgggccacgggatagagccagaacagaagactcgtcccccctccactcttgtctctggcaaatccaccagctgggaggaccacctttcctccctcctgcctctgtgcgtgtgcgtgcactccatgtcgacagccacaggtttctgctgcagcagcctcttcccctgaataggactgggattaagccccagcagctggtgcaccccactcagagcacggttaaggcagctgcccaaacctctcctcggctttctcagggcctttattcgttcaggctttctggaagtcagctggcggaggtgaagatggcttgggcgcccctcctgtgagctctgtgtgagtggtgctctttgtgatgtcaggtgaggagcattacaactgcatctccgccctgcacaagtccatgcggggctcagaccagaacgcctccctctactggctggctcgcatgctcgagggaggagaggacccactctacgtggcacggaggcttgtcaggtttgccagcgaggacataggtgagtgtgatgggagggtcccggagtcctatgtccatgagggtggggaaatggctaacagttacatcgtggctttttttttttttttttttttgcagggcggggtgggcgggggtagcaggaagaatgtctcagggctatgtgagactggcaggagaagataagactttatgcctgagctcagtcgtttatttcctggtgtatgtgcttttgaatgtttatgttcataaagtcaccattttctgtttcctcttcgggaatgtttttactaacatgagtggctattcagagtattgcaatagatgagctgcttttaaatttgctttaagtcaggtgttcaaggttttctttggacagctcccaaggtagaaatggaagactctagacactatatgaagaaaaagatcaggaaagctctcctcttctttggtcttaggggatgttttgtttttagtgtttccatcctggtgaatgtctccatagccttcacttcttatgtttgttatacagagactcatgtttttctagatgcagagtttttatccacaaggaaacagttcttaacaccacacagtaaccactctcaatatttcttgcataagttcatgggatcagagactagagctaagtcaggctgttttgctacatgggattgttttggtcaccaagtgtacaagcagtggtggtctgtggtcgcctgcacataggccaggaggacagtgtgtgtcatgactgaaactctcctttgtctctgtgtgtggcaggtctggcagacccgtctgcgttaacacaagcggttgctgcctaccaaggctgtcattttataggcatgcctgaatgtgaggtaaagtaatcagctcatttcttgcaaatcacttcttttctctctcgtgctctgtccctttgtagatttgaataaatgtccctccttcaccattggtgtattggacccactgagtatgctgcttggctttggaattccaattgtagactcttagactcctagagagggaaaccttctgtgtcaacgaggtcatgtttcaaactgttctcgggattccggggttcagagcacatgctccatatgttccagggagcagaaaggttaaaggagctgaacagcaaagcctctgcaagttcgcccccagagcagcttcatattcatctcttttatatattgggggcttaagaaaaatttaatgtagtaaaaagtccttcagttaaaaaaaaaaatgaaaaccactcacctggtttgcctctcgtttcacctcatgagaatttcttctgtctgtcgtaggtggttatccagactgtaggcgcaaaagggggataataaaagcatgtggggatcttctcagaattacctagagctgtgtatcagaaggggctctgcagaacagaagcttggcatcttgctagtaaaatgtgtcctctgtgtcattggtaggtgcttctggcccagtgtgtggtctactttgccagagccccaaagtccattgaggtgtacagcgcctacaacaacgtcaaagcctgcctgaggaaccaccaggggccactgccccccgtgcccctgcacctgaggaacgcgcccactaggctgatgaaggatttgggctatggcaaaggctacaagtacaaccccatgtacagcgagcctgtggatcaggagtacctgcctgaagagttgaggggggtagatttcttcaagcagaggaggtgctgactcctcagggcacgacagcagaaggatgttgcttttttaagggagggccagaaagaaagttagtggattgcaaagttggttgcctggtggaagttagaacagaccaacattttgtgccagaaatttaagagttccataggtggaggcgcagttctttcgaataaatgtgtaactttgaaattgtgttcatttgcactcggtgcagcggttatgcttatgaaaatacctggcagctttgtgcaatgaattaatgttataaggaattatctattttgtcatagtatttaagtcataatgtcatttcagaattcagttctgtaggattttcttttctttaaaaaatgtatattctgggtagttttaattggtaaaaaaatgtaattgtgatttaatactgcatagtgttttgggtattttttttatatgcaaaggtcttacgagccaataaaactatttcaaagtactcttcgattctgtcatggttttcctgcctggatgctaggtaccagcgttgtcaccattgcatttggtgggtggatactgggaaggagaaatcaccccagatgggaagagtggggagcttaagttaagaagtcagtgttatcttgttgaaagttaactctgatctctttaaaggaatacataaaggaattctttaaatggcttgtggaagactccagtagtcccatgcccattttttcccacttgtcctggtttcttcttgcagctccatatttctaaacagtcgtttttcttttactttatgtgtgtcctgaacacaaaatacgccactccttctgctcagttaagagttatttgtccctactgctacttcctctccctctccttagttgcatgtcgtgcatatgcccacaaggatggccccttcaggtagtcggttctcctcctgccgttgcgtgatccctcctggggtcctcctgccatgtctggaaggctgccggctgttggcctgggacgtcctctgcctttattctgagtgagatgcccattttctggatgctccatcccgccttactggtttattccgctatttcagtgcaacccatcctctagtagttttatcaggctggagggactgtatgttgcagaggcttggcccgactggcctccctccttctgtctggagtggttgcactgcagtgtgcagttgccatccccagaatctcccttcatcatcaccctggagctttcctctgcttctccctgcaccccatctgatgacaggactgactgctttctggcacaggtggcatgtaccctctagtagctttatggagcaggggtgtgtggaggaaaagtatttttagacctcaggagactcaaaatgcttttattgtaccttcagacgtgtctgagggtttggctagtaataaattgtaggtaagaaattacttgtgcattgttttacactttcccacattgttgtcaagtttgaaggcatcctgatgtgtgtggtcttttgtttgtaacctctatcaacttgtagactcttctgtctttgctccccgtgttttaaaagtctgcactgggtacttgttgggcctttcaatctggaaactcctttcagttctagggaagtttctttttttattcaataaatttatttatttatgagaccaactcttgctctttttcccaggctggagggcaatgatgcgatctcggctcactgcaacctccacctcccaggttcaagcgattctcctgcctcagcctcccaagtagttgggattacaggcgcacaccaccacacaaggctaatttttgtatttttagtagagacgggggtttcaccatgttggtcaggctggtctcgaactcctgacctcgggtgatccacccacctcagcctcccaaagtgctgggatgacaggcgtgagccaccgcgcccggcctcaataaatattgagtgcctgttttatgctgagcattcttgttgatgttaaaacacatcagtgagcagaagagaccaaaaattctgtgttcttaaagcctatggtatgaaaaataatatgttaatatgccaaatagtgataagtgctatgctaaggagaaaatgaatgaaagattgaatatggaaaggggaggtatgggtgcagttttagtagagtagccaaggtggatctcaccaagaaagtgtttgagtcaagacttcaaggaagtgaatgtgcctttcagacacccgggaaaggatcatcccaggcagagggaaaagcaagtgcaaaggcgccgagggaggatggaaggctgggtgggttcagcatccagtaaggagaccagtctagccggaggggaggaaagagtggtagaagtcgaggccgaggatcatggagcttcagataaggtgggaccttttaggtcatgggaaggactttggcttttactcaaggtttccctcaaagagtgtcatgatgagactttgatgttatagggatcccttgccgcagtgttgggactagacggtaggtagggtcaggctcatcttttcagtcaagtaggtcaaggcatggctccctgcgttctcagcgccaggtggggaaagaggaaagtcgtcatacatcactcagtatgtgcctaccactttgatcttctgactgaaatggtacccaagcccctggctctatctgggcccctctggttcagagatcttcccctggcctggagtaggagagggtgtctggagacccatcttcctcttccttacctgctgccacctcccaagcctctgagacgtctgccacgttgatgccttggcattccccactcgacttgccaggtcagttaccatttgcccgccatgtttccacctccagcatcatgttgccattatctcacttgttctcctcactttcaaggattgatggattttaaggattcctttactgtatttttggtggaggcttaggaggaaataaaatcacatgtgggtccaatccattatctttactagtatttcattaagaaatgtatagcccagttttttcttgatttttttttttttttttttggagacggaggcttgtgctcttttgcccaggctggagtgcaatgacgcgatctcggctcactgcaacctccacctcctgggttcaagcacttctcctgcctcagcctcctgagtagctgggactacaggcacacaccaccacgcctggctaatttttttgtattttagtaaagacaaggttttactgtcttgcccaggctggtctcgaactcctgagctcaggcaatccgcctgcctcagcctcccaaaatgctaggattacaggcatgagccactgtgcctggccaattttgattctttaaaaataacatttttacaggccaggcgtggtggctcacacctgtaatcccagcactttgggaggccaaggcaggtggatcacgaggtcaggagatcgagaccatcctggctaacaaggtgaaaccccgtctctactaaaaatacaaaaaattagccgggcgcggtggcgggcgcctgtagtcccagctactcgggaggctaaggcaggagaatggcgtgaacccgggaagcggagcttgcagtgagccgagattgcgccactgcagtccgcagtccagcctgggcgacagagcgagactccgtctcaaaaaaaaaaaaaaaaaaaaaatttttgttgggggatggagttacttccaaataagaagtgtgcttgtgatgtaaccggaggtgacattaactcctcaacaagcttttccgtcatgactcactcctgccagtttcccaagggacggatcccagtggtggtcaaggcacaggtgtgaatttatgccaggacgatatgtgagcatcgtaactcaagccaacagataagtgatgagggctttttgagatccatcatcctattagacatgcggccctgaacacagtgtgtaacgcggacacggggcctgtgctggagcacgcggtgctggggagagcctgcagcacactttctgctgtatccagcagcggggcactgagcagccaactttctgtaactgtaaaatcaagcttgaaagtttgcaaatgcttgttttttggtttcaaagaatcttattttgtgaaagcagatttttaaagtttttaaagcagatattcactgcctgaatgaatacctctcacataccacagtgagcatgactgaaagtttacaccattagctaaaccctgggaaaaactaatgcagtgagtcagagtttctggtgagggaggcacatctcttgcctgtttacagtagtattcaacaattgggggcagcccttccatatgatgccatttaaataccacaagttatgggccaggtgcggtggcacacacctgtaatcccagcactttgggaggctgaggcgggcaggtcacttgagatcaggagtttgagaccagcctgggcaacatggtgaaacgtcgtttctattaagtatataaaaattggctgggtgtggtggcgcacacctgtaatctcagctactcaggagcctgaggcaggagaatcgcttgaacctgggaggtggaggttgcagtgagccgagatcgcgccactgcactccaggctaggtgacagagtgagactccatcttaaaaaataataataaataagtaaataaataaatatcacaagttatgtactgattctgaaaaagcaacataaccaccaaacacaatttattccttatgttccaagtgtatttggtagttttgttcaccctcataacagccaaacctgagtttaagaacagtaagaatagtgacttgcagagatttgttccaattgttacaacaagaatggatgttaactcatcttttccagatacaagtcatcaaacctggacaatgttatcaattaattccaaatgagagaaccggccttttgatactgatgttatattagaaaggatgattttcctatactttcatataaatgccatggatctcttactttttgatgaattaacctttgtgtagcgactacagtttgaaagcactactacacattcatagatgcagttccaggcagtttgagcccacaaaggcatttataacttaagcagaaaccaaacagaagtaaatatttttaatagagttaacaaatcttcataaaaaccaatcatttaaaactaaatgttttgaagctctaaagccagtcaggctccggggaggatgcagatgatcccctcaggccactgagaaacttttaatcagggatcacaagtattagagaggtataggggaggttcaggggaccaacacaaggtgagaagcaattccctggcaaggcctgagaggcaaggggtgggagcaggcagggagccctgggagagcaggaggtggccggcagccttcagacaggaactgcggccctgagtggaggcaaagaactcagcagctgctgcacctcttgagtagggaacctgggggtaggagaaggaaatgcatggtctgaatcctctctctcttgccctcatctcctgccagtccctcccactagcaggaccaaccagaagtttccctggttaaaaagccaggcgagaagggtggagaatacccagtgtgcacagatctctgaaatgagaactactactgctctattttaggagaaacaaaattctttctgtgtgattgtataccttgagagccaagaagaagagtccgaacagctaacagtccagtaaagtggccacatggaaacaacccatgaaaatccatagcttccgggccactactgtaatcagaaaagacaccaagaagaatattccattctcagtagcaacctggaaagaaactgaattgtaactgaggagtaggacttacatgaagaaaactaccacactataccctactattgaaacacaagaaaatgcgaacgaaagtagagagaagccgttttcctcaaagacgtcatctcaaatttatttttacattcccatcatgcttggcatgtagaatgtgatcagtacatatttgttgaatgacaaaatgaggggataaataaactttccctaagatgtgtatgtagacgtttgaaaatagaagtctgtcgctgatgtttctgtccaccaggagtcaggcttcagccaggaaagagtgagccagtgtctgagctgtctctcaccaggccttccaccagctccaggtcaccaggttcaggccaagactgagtttcagtatttgtcgttaacctggtagataaataaacagttttaaagtagagcttatgtatttgtctgattgcaaaagtaatacatgatcattgcacataggtacaggagcagatgcaaaaaaaaaaaaaagcagataaaagatagtaaaaatcaactttaacatttaatattttttctcagtgataaccactgtaaacattttagtgtatgtcctttgggaattttttccaatgagtgtgtgtgtgtgtgtgtgtgtgtgtgtgtgtgtgtatgactacaccatctgtttatagcttgctgtttctcaccccctcacatgatttcttacatgcagaattagtctcttagcgtatgacttttcatggttgagttggagccaccaccagggagctgcacccttccggtggtgcaccccaccagccgtgccatccacagagggtaggacacaccagacacctagtagctggatttatttattatattttattttatttttgagatggagtctcactctgtcgcccaggctagagtgcagtggtgcaatctcggctcactgcaacctctgcctcccagattcaagcagttctcctgcctcagcctcccgagtaactggaattacaggcacctgccaccatgcccagctcatttttgtatttttagtagagacagggtttcaccatgttggtcaggctggtctcgaactcctgacctcaggtgattcacccacctcagcctcccaaagtgctgggattacaggcatgagccaccgtgcccggcctagaactggatttaataagagaaacagagagcctcacaccactctcccctccttcagcaccctgcctccagggttctttcggctcgctagccaaccacacttggtgaggcgcgtgggtccaggagtctgtctgctcgggttcaaatcctatctgagccacctcaccccgtgaccttggtcaaggttattttcttttccctcatctttaaaatgggtatcaaaatattacttaatcacaatggagattacatgattcaaatctggcattgctcaaagtcatgtccggcacacagtccatacatgctgggtattgccatgactcattctccccaccccagttcaagcatcgctttcctctcaaagcctgcgctgagccctcaggctaagcttcccagcccagcgctgtgcagccccaggtgctattgctcacctgggctctgagccattgtggtgttccagggccttaggtggttatggaccgggcactgctctctccctctgggctctccctggacgccagcctgcatctctttcattttcttcgctcaggggacaggctgaacttggggactgcggaggcctgcagtcttccaagcacacttgctgcttcattttggctggcagcagtaattgcaaacatgtattccctgcctgccatatgctgggcaccatgcaaaatgttttccatatgtgatctcaatttccaaaaagactatataagccggtgctgttagtacgtctattttacatggagaaaaggcgcacacaacttaagatggcaaagtgacttcctgagagtcagcaggatggaaacccccagagccggccctgcccggccaccttgccagtggctccaggttcttacatgcatcagaatcacctggaggactcgctaaaaatcccagaatttctaattcagtccatcttcaatggggcctaagaatttgtgtttccaactataagttctcaggtggtgctaacggggctggtccacacggaccacactttgagaacaacttcaccgtgctatgtgacctgccatcaatagcctagaaataagtttttggtggcaaacaggctcttttcagactcatctcctgcctctctacctgtagctgtcatttatcttttcttccttgctctaaacacattcagtgacttatgaggccttaaggaggtcctgagtctccatgccacctgggcttgcctcctttgtccccctcccctgtcattccttctgacaccagctgctgcttctctccaggtgtttgtcatccacacttgaaattgctgcatgggtggggaacatggctgctgtgtggctgtgtgggcagggcaaggcccagggggcctggctgagggccgacagtgagcaggcagaaatccagaggagaggatgtctttttctgtctcacaaaggcacacgtgggctagctgggctctgaggaaagagagaggcttttgagcaagtccgtttatgcttcttgcctattttgctttagcttgtggcttccggtgaaaacacgccttcttactcatttggctccttactgaggaataaaatatacgaattccactccgtagcctgcaaattctctacctgtctcatcgcctcctcactgttgcaggtagttgagacaagtacagtggaacagaaagtctgttgggccaagaatagactttctggtatgagattccccaagtgtggggaatggtgaatgtcagaagcttgagtagcaagtgcacacatggggcgggtctcttgtcacttgtactggttgtgctctagtcacagtaggctctgaggaagccagggtccatgtggccatctgcttgagcaacctgcaaagtcctgggtgtggtatttctttactctgcatgaagttactcaactgccatctgtatgactagccaactttgaagcagaaactatctgaattagaattccatatttcttccattctctaatttttttgaaattctgcccccatgatctataaaaaaaatgtgaagtcttcacctaaccatccacttcattaagtctctccttcctctgctcacatcacactgcataggttctgtctttttggctgtgggttataagccttctgagggcaagcatagtcatagtcatgttcattccacaatgtttggctcctagtagcttttcagcaagtaattgcttaactgactttccccgctacagaagacgatgcttttcaagaatagacaattccatgtcacagatagtgtaggtgtgaacgtccccaggctcagggcagtggattagtcatgagccgagatcatttttcatgctctggtttgcacagtggaatgactggagtagcttaggatgtggtatgaatttcctactagtgcactaaaaacaggattcacatcccttctgccttatgattgtttatgcaataacctcattgcaaatgtcgtgttgctgtaccttcccatgatgttttaatgaagtagaattttaaaatataattaacgtgcttaaggtcataaatcataaaacagatttggacaacttctggatcatagtatttcagcctctctaagcctcagtttccttatctcttaaaggaggatagattacaataatctctacaaactcatgcagtttaaaaatacattgttgttgctgaggcgggtggatcgtgaggtcaggagttcgagaccaacctgaccaacatggtgaaaccctgtctctactaaaaatacgaaaattagccagccatggtggcgtgcacctgtaatcccagctactcaggaggttgaggcaggagaattgcttgaacctgggaggcggagcttgcagtgagccaagattgtgccattgcaccccagcctgggcgacagagtgagactccatctcaaaaaagtaagtaaataaataaataaataaataaaccaacaacaacaaaacatagttgttatctgtatcataagaactacttaaaggaaaatctccattttgctaatgagtcattaaatacatattttacatccttccaacaagcttccatgttgagaaaactggcttttgagacaaggccattgttcaatctctggtaagtcacttcactcattcaggcctcgattttctcagcttggaagtgggtataacaatgacttctaggttcacttttattttttggcagggccacttttacactggaagtttcttatgaaaatcaagtaagatatgcagataaaaatatactatcaactgtcaagtgctatttaaattaaggcacgattattttgactgtttacatgggaaagcattaagaaatattagcggttttcagaagccagatgctatggaagtcagaattgtttcattagctcacatgatattcaaatgggcatggaatgaactccagtgggaaagtgagcagtgtgccctgtgccttcctctccccctgtctccttttcttcctctttggagaaaccttggctccttcctccttgggagagagcagacctggatggccacagattttgatggacgtgctgccttttgtaagcaggagttgtcttggcccctttggtagatttagaagggtctgttactgcctgtcttcccactccatctgcccattccagtaaccagaaacaggcttgattgagaagctaaatttagagaactcaggatcatcaaagaatactgctgaacccggtgatggtgcggaaatcgtgaaatagcagaggagaggagccctcaggacagttcataccagaaacctcttttctagtttcctctgacctgtgggttgtcaccgtgacacagaactggaaagagaacagacggggtgtcacaacagcgaggcttatgaaatctttgcaaaactttccgcaagtcaggcttgaactaggagtacgagctgccctccaggtgggtgacacatctacgaccccgcaggaccaccagccccacgctttcagccagtgctgcccagagtgcggtgcccggaccagcagccagcaacctgagcccatgagaaatgcagaacgcgacgcccaggctcggccaactcagctggaattgctaaggaatctgtgtgaacaaaagctcaagagatttttttgtgcctccttcattttaagaaacaatattggccgggcgccgtggctcacgcctgtaatcccagcactgtgggaggccgaggcgggtggatcacgaggtcaggagatcgagaccatcctggctaatatggtgaaaccccctctctcctaaaaatacaaaaaaattagtcgggcgtggtggcgggtgcctgtagtcccagctactcgggaggctgaggcaggagaatggtgtgaacccaggaggcagagcttgcagtgagccaagactgcaccactgcactccagcctgggcgacagagcaagactccgtctaaaaaaaaaaaaaaacgaaacaatattgtaagttatgctcaaagacttttgtgtcagaatgtcagggaaatggatcacatggttcagtaactgtcagataatttcaaaacagcacatcaccttccccaggctcttctctttctcctcaagtgcctcactgggactctccttctcttttatctggaagcagaggccttgcaagggctggctgatcatcccacagttccagcgtttgcagggcagcactgggcattttgaagggca

SEQ ID NO: 381 - DNA, 3220 bp, Homo sapiens
gaggccggcggccgccgccgcggcggggagcgcgtctccgcgcagctgggacgaggcggaggcgcaggaggaggaggaggccgtgggcgacggcgatggcgacggggacgcggacgcggacggcgaggacgacccggggcactgggacgcggacgctgccgaagccgccaccgccttcggggccagtggcgggggccgcccgcacccccgggcgctggctgccgaggagatccgacagatgctacagggcaagccgctggccgacacgatgcgtcctgacacgctgcaggattacttcgggcagagcaaggccgtgggccaggataccctgctgcgctcgctcctggagaccaacgaaatcccctcgcttatcctgtgggggccgccgggctgcggcaagaccactctggctcacatcatagccagcaacagcaagaaacatagcataaggtttgtgacattatctgcaacaaatgccaagacaaatgatgtgcgagatgtcataaaacaagctcaaaatgaaaagagctttttcaaaaggaaaaccatcctttttattgatgagattcatcggttcaataaatctcagcaggacactttccttcctcacgtggaatgtgggacgatcactctgattggggcaaccactgaaaacccttccttccaggtcaacgctgctcttctgagccgctgtcgagtgattgttcttgagaagcttccagtagaggcaatggtgactattttaatgcgagcgatcaactccctgggaatccacgtcctagactctagccgtcccactgaccctctgagccacagcagcaacagcagctcagagcccgccatgttcatagaggataaagcagtagacaccctggcttacctcagtgacggtgacgcccgagctgggttgaacggactgcagctggcggtgctggctaggttaagctctaggaagatgttctgtaagaagagtgggcaatcctattctcccagtagagttctgatcacagagaatgacgtgaaggagggcctacagcgatcccacattttatatgaccgggcaggtgaggagcattacaactgcatctccgccctgcacaagtccatgcggggctcagaccagaacgcctccctctactggctggctcgcatgctcgagggaggagaggacccactctacgtggcacggaggcttgtcaggtttgccagcgaggacataggtctggcagacccgtctgcgttaacacaagcggttgctgcctaccaaggctgtcattttataggcatgcctgaatgtgaggtgcttctggcccagtgtgtggtctactttgccagagccccaaagtccattgaggtgtacagcgcctacaacaacgtcaaagcctgcctgaggaaccaccaggggccactgccccccgtgcccctgcacctgaggaacgcgcccactaggctgatgaaggatttgggctatggcaaaggctacaagtacaaccccatgtacagcgagcctgtggatcaggagtacctgcctgaagagttgaggggggtagatttcttcaagcagaggaggtgctgactcctcagggcacgacagcagaaggatgttgcttttttaagggagggccagaaagaaagttagtggattgcaaagttggttgcctggtggaagttagaacagaccaacattttgtgccagaaatttaagagttccataggtggaggcgcagttctttcgaataaatgtgtaactttgaaattgtgttcatttgcactcggtgcagcggttatgcttatgaaaatacctggcagctttgtgcaatgaattaatgttataaggaattatctattttgtcatagtatttaagtcataatgtcatttcagaattcagttctgtaggattttcttttctttaaaaaatgtatattctgggtagttttaattggtaaaaaaatgtaattgtgatttaatactgcatagtgttttgggtattttttttatatgcaaaggtcttacgagccaataaaactatttcaaagtactcttcgattctgtcatggttttcctgcctggatgctaggtaccagcgttgtcaccattgcatttggtgggtggatactgggaaggagaaatcaccccagatgggaagagtggggagcttaagttaagaagtcagtgttatcttgttgaaagttaactctgatctctttaaaggaatacataaaggaattctttaaatggcttgtggaagactccagtagtcccatgcccattttttcccacttgtcctggtttcttcttgcagctccatatttctaaacagtcgtttttcttttactttatgtgtgtcctgaacacaaaatacgccactccttctgctcagttaagagttatttgtccctactgctacttcctctccctctccttagttgcatgtcgtgcatatgcccacaaggatggccccttcaggtagtcggttctcctcctgccgttgcgtgatccctcctggggtcctcctgccatgtctggaaggctgccggctgttggcctgggacgtcctctgcctttattctgagtgagatgcccattttctggatgctccatcccgccttactggtttattccgctatttcagtgcaacccatcctctagtagttttatcaggctggagggactgtatgttgcagaggcttggcccgactggcctccctccttctgtctggagtggttgcactgcagtgtgcagttgccatccccagaatctcccttcatcatcaccctggagctttcctctgcttctccctgcaccccatctgatgacaggactgactgctttctggcacaggtggcatgtaccctctagtagctttatggagcaggggtgtgtggaggaaaagtatttttagacctcaggagactcaaaatgcttttattgtaccttcagacgtgtctgagggtttggctagtaataaattgtaggtaagaaattacttgtgcattgttttacactttcccacattgttgtcaagtttgaaggcatcctgatgtgtgtggtcttttgtttgtaacctctatcaacttgtagactcttctgtctttgctccccgtgttttaaaagtctgcactgggtacttgttgggcctttcaatctggaaactcctttcagttctagggaagtttctttttttattcaataaatttatttatttatgagaccaactc

SEQ ID NO: 382 - protein, 441 aa, Homo sapiens
MLQGKPLADTMRPDTLQDYFGQSKAVGQDTLLRSLLETNEIPSLILWGPPGCGKTTLAHIINSKKHSIRFVTLSATNAKTNDVRDVIKQAQNEKSFFKRKTILFIDEIHRFNKSQQDTFLPHVECGTITLIGATTENPSFQVNAALLSRCRVIVLEKLPVEAMVTILMRAINSLGIHVLDSSRPTDPLSHSSNSSSEPAMFIEDKAVDTLAYLSDGDARAQGLQLAVLARLSSRKMFCKKSGQSYSPSRVLITENDVKEGLQRSHILYDRAGEEHYNCISALHKSMRGSDQNASLYWLARMLEGGEDPLYVARRLVRFASEDIGLADPSALTQAVAAYQGCHFIGMPECEVLLAQCVVYFARAPKSIEVYSAYNNVKACLRNHQGPLPPVPLHLRNAPTRLMKDLGYGKGYKYNPMYSEPVDQEYLPEELRGVDFFKQRRC

SEQ ID NO: 383 - DNA, 3102 bp, Homo sapiens
tggtaattcattcaaagatgcagaataccacacttgttttaatctgatattctttccatttctatccgtctaggacgtaattgcacacgggcgcctcccatcatttggttgctaaggagacagaaggctggtgtttccgatttgccactattacacagcggcccgcgagaagcatctcttggctcgaagcgcgctgtaggtgaaccgcccttgacttaaacgccaacacatctaaaagggggcgagggacgctttattttcatttccctgaccactactgagaccactctggctcacatcatagccagcaacagcaagaaacatagcataaggtttgtgacattatctgcaacaaatgccaagacaaatgatgtgcgagatgtcataaaacaagctcaaaatgaaaagagctttttcaaaaggaaaaccatcctttttattgatgagattcatcggttcaataaatctcagcaggacactttccttcctcacgtggaatgtgggacgatcactctgattggggcaaccactgaaaacccttccttccaggtcaacgctgctcttctgagccgctgtcgagtgattgttcttgagaagcttccagtagaggcaatggtgactattttaatgcgagcgatcaactccctgggaatccacgtcctagactctagccgtcccactgaccctctgagccacagcagcaacagcagctcagagcccgccatgttcatagaggataaagcagtagacaccctggcttacctcagtgacggtgacgcccgagctgggttgaacggactgcagctggcggtgctggctaggttaagctctaggaagatgttctgtaagaagagtgggcaatcctattctcccagtagagttctgatcacagagaatgacgtgaaggagggcctacagcgatcccacattttatatgaccgggcaggtgaggagcattacaactgcatctccgccctgcacaagtccatgcggggctcagaccagaacgcctccctctactggctggctcgcatgctcgagggaggagaggacccactctacgtggcacggaggcttgtcaggtttgccagcgaggacataggtctggcagacccgtctgcgttaacacaagcggttgctgcctaccaaggctgtcattttataggcatgcctgaatgtgaggtgcttctggcccagtgtgtggtctactttgccagagccccaaagtccattgaggtgtacagcgcctacaacaacgtcaaagcctgcctgaggaaccaccaggggccactgccccccgtgcccctgcacctgaggaacgcgcccactaggctgatgaaggatttgggctatggcaaaggctacaagtacaaccccatgtacagcgagcctgtggatcaggagtacctgcctgaagagttgaggggggtagatttcttcaagcagaggaggtgctgactcctcagggcacgacagcagaaggatgttgcttttttaagggagggccagaaagaaagttagtggattgcaaagttggttgcctggtggaagttagaacagaccaacattttgtgccagaaatttaagagttccataggtggaggcgcagttctttcgaataaatgtgtaactttgaaattgtgttcatttgcactcggtgcagcggttatgcttatgaaaatacctggcagctttgtgcaatgaattaatgttataaggaattatctattttgtcatagtatttaagtcataatgtcatttcagaattcagttctgtaggattttcttttctttaaaaaatgtatattctgggtagttttaattggtaaaaaaatgtaattgtgatttaatactgcatagtgttttgggtattttttttatatgcaaaggtcttacgagccaataaaactatttcaaagtactcttcgattctgtcatggttttcctgcctggatgctaggtaccagcgttgtcaccattgcatttggtgggtggatactgggaaggagaaatcaccccagatgggaagagtggggagcttaagttaagaagtcagtgttatcttgttgaaagttaactctgatctctttaaaggaatacataaaggaattctttaaatggcttgtggaagactccagtagtcccatgcccattttttcccacttgtcctggtttcttcttgcagctccatatttctaaacagtcgtttttcttttactttatgtgtgtcctgaacacaaaatacgccactccttctgctcagttaagagttatttgtccctactgctacttcctctccctctccttagttgcatgtcgtgcatatgcccacaaggatggccccttcaggtagtcggttctcctcctgccgttgcgtgatccctcctggggtcctcctgccatgtctggaaggctgccggctgttggcctgggacgtcctctgcctttattctgagtgagatgcccattttctggatgctccatcccgccttactggtttattccgctatttcagtgcaacccatcctctagtagttttatcaggctggagggactgtatgttgcagaggcttggcccgactggcctccctccttctgtctggagtggttgcactgcagtgtgcagttgccatccccagaatctcccttcatcatcaccctggagctttcctctgcttctccctgcaccccatctgatgacaggactgactgctttctggcacaggtggcatgtaccctctagtagctttatggagcaggggtgtgtggaggaaaagtatttttagacctcaggagactcaaaatgcttttattgtaccttcagacgtgtctgagggtttggctagtaataaattgtaggtaagaaattacttgtgcattgttttacactttcccacattgttgtcaagtttgaaggcatcctgatgtgtgtggtcttttgtttgtaacctctatcaacttgtagactcttctgtctttgctccccgtgttttaaaagtctgcactgggtacttgttgggcctttcaatctggaaactcctttcagttctagggaagtttctttttttattcaataaatttatttatttatgagaccaactc

SEQ ID NO: 384 - protein, 279 aa, Homo sapiens
MVTILMRAINSLGIHVLDSSRPTDPLSHSSNSSSEPAMFIEDKAVDTLAYLSDGDARAQGLQLAVLARLSSRKMFCKKSGQSYSPSRVLITENDVKEGLQRSHILYDRAGEEHYNCISALHKSMRGSDQNASLYWLARMLEGGEDPLYVARRLVRFASEDIGLADPSALTQAVAAYQGCHFIGMPECEVLLAQCVVYFARAPKSIEVYSAYNNVKACLRNHQGPLPPVPLHLRNAPTRLMKDLGYGKGYKYNPMYSEPVDQEYLPEELRGVDFFKQRRC

SEQ ID NO: 385 - DNA, 2786 bp, Homo sapiens
gaggccggcggccgccgccgcggcggggagcgcgtctccgcgcagctgggacgaggcggaggcgcaggaggaggaggaggccgtgggcgacggcgatggcgacggggacgcggacgcggacggcgaggacgacccggggcactgggacgcggacgctgccgaagccgccaccgccttcggggccagtggcgggggccgcccgcacccccgggcgctggctgccgaggagatccgacagatgctacagggcaagccgctggccgacacgatgcgtcctgacacgctgcaggattacttcgggcagagcaaggccgtgggccaggataccctgctgcgctcgctcctggagaccaacgaaatcccctcgcttatcctgtgggggccgccgggctgcggcaaggcccgccatgttcatagaggataaagcagtagacaccctggcttacctcagtgacggtgacgcccgagctgggttgaacggactgcagctggcggtgctggctaggttaagctctaggaagatgttctgtaagaagagtgggcaatcctattctcccagtagagttctgatcacagagaatgacgtgaaggagggcctacagcgatcccacattttatatgaccgggcaggtgaggagcattacaactgcatctccgccctgcacaagtccatgcggggctcagaccagaacgcctccctctactggctggctcgcatgctcgagggaggagaggacccactctacgtggcacggaggcttgtcaggtttgccagcgaggacataggtctggcagacccgtctgcgttaacacaagcggttgctgcctaccaaggctgtcattttataggcatgcctgaatgtgaggtgcttctggcccagtgtgtggtctactttgccagagccccaaagtccattgaggtgtacagcgcctacaacaacgtcaaagcctgcctgaggaaccaccaggggccactgccccccgtgcccctgcacctgaggaacgcgcccactaggctgatgaaggatttgggctatggcaaaggctacaagtacaaccccatgtacagcgagcctgtggatcaggagtacctgcctgaagagttgaggggggtagatttcttcaagcagaggaggtgctgactcctcagggcacgacagcagaaggatgttgcttttttaagggagggccagaaagaaagttagtggattgcaaagttggttgcctggtggaagttagaacagaccaacattttgtgccagaaatttaagagttccataggtggaggcgcagttctttcgaataaatgtgtaactttgaaattgtgttcatttgcactcggtgcagcggttatgcttatgaaaatacctggcagctttgtgcaatgaattaatgttataaggaattatctattttgtcatagtatttaagtcataatgtcatttcagaattcagttctgtaggattttcttttctttaaaaaatgtatattctgggtagttttaattggtaaaaaaatgtaattgtgatttaatactgcatagtgttttgggtattttttttatatgcaaaggtcttacgagccaataaaactatttcaaagtactcttcgattctgtcatggttttcctgcctggatgctaggtaccagcgttgtcaccattgcatttggtgggtggatactgggaaggagaaatcaccccagatgggaagagtggggagcttaagttaagaagtcagtgttatcttgttgaaagttaactctgatctctttaaaggaatacataaaggaattctttaaatggcttgtggaagactccagtagtcccatgcccattttttcccacttgtcctggtttcttcttgcagctccatatttctaaacagtcgtttttcttttactttatgtgtgtcctgaacacaaaatacgccactccttctgctcagttaagagttatttgtccctactgctacttcctctccctctccttagttgcatgtcgtgcatatgcccacaaggatggccccttcaggtagtcggttctcctcctgccgttgcgtgatccctcctggggtcctcctgccatgtctggaaggctgccggctgttggcctgggacgtcctctgcctttattctgagtgagatgcccattttctggatgctccatcccgccttactggtttattccgctatttcagtgcaacccatcctctagtagttttatcaggctggagggactgtatgttgcagaggcttggcccgactggcctccctccttctgtctggagtggttgcactgcagtgtgcagttgccatccccagaatctcccttcatcatcaccctggagctttcctctgcttctccctgcaccccatctgatgacaggactgactgctttctggcacaggtggcatgtaccctctagtagctttatggagcaggggtgtgtggaggaaaagtatttttagacctcaggagactcaaaatgcttttattgtaccttcagacgtgtctgagggtttggctagtaataaattgtaggtaagaaattacttgtgcattgttttacactttcccacattgttgtcaagtttgaaggcatcctgatgtgtgtggtcttttgtttgtaacctctatcaacttgtagactcttctgtctttgctccccgtgttttaaaagtctgcactgggtacttgttgggcctttcaatctggaaactcctttcagttctagggaagtttctttttttattcaataaatttatttatttatgagaccaactc

SEQ ID NO: 386 - protein, 346 aa, Homo sapiens
MATGTRTRTARTTRGTGTRTLPKPPPPSGPVAGAARTPGRWLPRRSDRCYRASRWPTRCVLTRCRITSGRARPWARIPCCARSWRPTKSPRLSCGGRRAAARPAMFIEDKAVDTLAYLSDGDARAQGLQLAVLARLSSRKMFCKKSGQSYSPSRVLITENDVKEGLQRSHILYDRAGEEHYNCISALHKSMRGSDQNASLYWLARMLEGGEDPLYVARRLVRFASEDIGLADPSALTQAVAAYQGCHFIGMPECEVLLAQCVVYFARAPKSIEVYSAYNNVKACLRNHQGPLPPVPLHLRNAPTRLMKDLGYGKGYKYNPMYSEPVDQEYLPEELRGVDFFKQRRC

SEQ ID NO: 387 - DNA, 146733 bp, Mus musculus
  misc_feature (1)...(146733): n = A,T,C or G
cacctctgccaactactttctgctacttgtctgaaacccattaaggtagtagcattgctcggggaaaatttgaaactacaaatgacatctctccgcttgtcctgtcttctgctacccttgttattcctaggcaaactattcttccgaccacttcctcagtgcctttacccctttctgactcattaccaccctcctccaggttggtcccagctctgtacactttgccacatatatctgcttagcgtacgtaaatccctgcttccaggaaaggcttcatccaccaatgccatggaacccttcgctcagaaatcagttcctagccttcccctctcttcattaccctgttaaaagaaatttggcttgtctttagagatagtatttcctccaaaaccttccctcatgaccggctctcccaggtcacagagtgtgtgtgtttcccttctgtcccttgcacatagagactcaccagtctctttgagtctcctcttccttgcccttcccactgctgctaacacagcgctatgtcctcacatttcttcaggttacaagtctgagatcaggatgttggcagggttgatgatgtttcacacggtctctgtctttgctttctgtttctgtagctgagtaccataaccgaggtcattattgcctctcttcctcctccttctcctcctcctcttcctccttcgtcttcattttcctcttccttgtcctcctcctcctttgagatagagtttattgtaacccaggctagctttgaacccaacatagagctgagaataacattggtttcttaccctcctgcctccatctccaaaatgttgggattacacttgtgccaccttccctgggtctcaaattggacaattaataaagaatcgtttatctagctcatggttctagaaatccaagaacatagtacaggcattggctcagcatttggtgaggcccctcttgcagcatcataacacactgagcagatggggtaggcagtctcccaaaggacagaggcaacagactggctgattcactccctcaaactcacggatagacaggacgacctggaacttctgactctcctgcttctaaatcctgagtgcagggattacaggttacaccgaccccacgcttcctgcatcctaggcaagcattctaccaatggagctacatcccatggccccttttcctctctcctcccactttttaaaaatttttaaggaaaggcataatccagccaggcgtagggtgctcctctgttattccagcacaaaagaatctgagacaggagcattgcaagtcagaggccagcctgggctgcatagctgagactcaattgcagaaaaacaaaacaaaacaaaacaaacaaatacccactaattccatcccggccttcatgacttcttttagtcctatttatccccaaagaccccatttccaaaatctaccaatatttgactttggaggttaagatttagcataaatttgggaggggacaaatgactagatcatagtgtcctttctccatggcttgaaggagtctgctatcttatcttcttcctgtatcattaatatctgccccccctcgcaaaatgacatcagacagattgaatcaggacccacccctaatctcttaaaagatctgatgcagtgacattctgaggcctttggatttaaggcttacaagtgtattttgggagagacacagttgaggccaccatacttcctatgagatttatatatttttcttctcatctctgagtgctaaaacacagtgtcccataacagcctaagcaactattttgcatggttcctctcaaccccaccccttccacactttctgtggtagttccatccccacaattgacctacatttgattcttttattttttttattttatgtttgttttattttatgtgtagggatattttgcctacatgtatgtatgtacacatttgtgcctcatactatcagaggtcagaacttgccatcaagtcccttagaagttacagattgtcgtgagttatcatgttgatgctaggactcaacctgggtcctctgaaagaacattatatataacacagtgctttttttgttgttgttgttgtttttgtttgtttgctttttgtttgtttgtttgtttgttttgttttttcgagatagggtgtctcaattcactctgtagaccaaactggcctcgaactcagaaatccacctgcctctgcctccggagtgctggtactaaaggcgtgtaccaccaatgccctgctagcacagtgctcttaaccgctgagttatctctggtccccatctctctgatgttgcccagttcctcaacccagacttctccatctcaccagtatccttgaattctcctccccagggagccccatgcctttctcccaccatcagctcccgcctgaccccatcctgcctgctttcctgagtcacccagctctcaccacctcagcctcacccctaccctgctagtcacctttccctgttggtctggccacgcccacaccagcatttcatcccctgtagagatacggaggtcttcagactcgatcaatcacacttggtctgccttgctcatttacagtcccagctctgcttcctctgcttctactcccttggctgatctgttttagagcaaagagagaggccctcttgtcgctctgcccccttggggcatgaaggcacaagagggacactcaagaagtgttatgaccatgacccgatatggtcagcccgcgcctctttcttgctggtctagtaggtactgctgttttacacactcagggccatcagttactaacactgcttgcccttttcctgccccacccccatcagtattttctctatgtccctacaattcttccttcctttcctttgttagagaaagggttattgtggggctagagagatagctcagcggttaagagcacttgttgctcttgtggaggacccacatttaagtcccagaacccacatggtagatcccaaacatctgtaactgcaggttcagtggatctgatgttctcttctgtaggcaccgggcacaaagtcattacttctcagcctcagggccggatcccaaggctgatctctccactatgtggagactcaggtatttgcctccctccctccctccctccctcnnnnnnnnnnnnnnnnnnnntggtccctccctccctccttccctccctccctgcctcccccctctctttccctctatctctcttcctctctctctctcctctctctcctctatctcctctctctctctctctctctctctctctctctctctccctccctctcttccttccttcctttctgttgctccttccttccaaagctgctgctttctgcttcagatatctgtatttccttcctccctgggtctaaatttctttcctttttgacctcagttgtccgagtggtttatgcacgccatagctctttcacactgatcctctcggagataattttgtgagtgtctctgatctgaactccgccaccatggcgccatcaacacctggggccacagaattcttccctgcggagcttgttctgtgcaaggtgatgtattatgcagcatccctgacctgtatttatcaggggcctggagtacctttcctccaacttgtgacaagccagaatgtggagactttggtaaatatccctgtagaagagaactgcctggttaaaaaccgcttggggtagatgtttaggaatgtaggttctgtgctggtgttggcagatgcctttaatctcagcacttgggggcagaggcaggtggatctcttagtttgaagccagcctggtctacagaatgagtttcaggtcagccagggctatgcagagaaaccctgtctcaaaaacaaaacaaaattaaaacgaaagataaaaggaatgtgggttctgtcaagtggttgttgctagtctctgtgcaggggtattgaagtccacagttgtccaactaagacttcattcagcattgctgtgagcatacagaatacaatagttacagaacagaaaacgctctgtaccttatgattatataaggaaagaacaattataaacaaaaattcccaagactacaaaacgtgcagtcgcttatctttctgattaaattcttttttaaaaagagggtctcattgtgtagctctggctgtcctgaaactcgctatatagaccaggctaccctctaattcacagagatctgcctgcctctgccttaagtgctggaattaaaaatgtctgcaccttgtctgccttccccaaccccaataaaattcttgtttaaacaactgcacacaagttaacaacccttatgcaaaactccagtcaacagtattttattgagattatacaagacgatcagatggctttttaaaaaaaaatagtaatctatgtagctctcagttggctaacaaaagcaatcgtaatgaatatagggtcccttgggtctgatgtctggtttgcatctcagttctcccatcagttatatgcgattgagcagtggaacaatgccactgcttaacctgtaaaataggcacagtgatagtacctatctgaccagggcgcagaggggatgaagcaagatcttagctagaagctcacccttggaccagcgtctggcacagactgagtgtccagtaagaggtagctgctgtcttgagggttgcccttttcctttctcttccttctcagcagagcttcgggccttcacttccgtctcttccttaaccccttactccctagtccttgctaagatgatgccctagtcagtcttgtttttcagcgcttgccctttcccagttactagcctcaatggctctctggtttagggctgaccactgcttcccttagaggaaagggggagggccttcttgtgggccccactcccttctcctgatttcaggcatatggccccctactcccttcagtctgttggccttctactgtctctctagacccgtgtgctgaacccagccccccatcctttcccatgcataccttgcccaaaattcatggccctagtgagctgactccgagtctccattagtcacaatcaagggaccaaagctaccagattctgcctgctcccctcctgtctttgtattgtttctgcatagacacaggtgaccttaacatggctgaagtgacctcccttctttaacatcacacttcttggtcactgctttacaatttctttcaccttcttctctcccatattcaactggccgggttctcttcattctatggcctattttttttcttttttcttgagagagggtctcactatatatccctcccttgtactcaacaaccctcatgctgtgacctcagagggttccaagaatgtaccagtcagtcaccatgcccagctagtggcctaatgtcttggatcagttttctcccctctacctcagcaacagtggctgagttttttactctcttgcagttgaactcttcgactagctcttaatgagtgttcctgtctcatcttgtcatcttccagaccattctccacagtaccatgagggaagctggctgccctcctcagtatgctctttcttggatgaagtccaagtttgcttagtggtttgcagggccccctggctgctgctcctgccccatctctttcagcctccccctcccgcctcccccctcccaagctgctgtcactgagggaggtatttgaagttcaggagactaaccttgtgttgtggctccatgcccttgtgctggctgctcccagacttctctgtctggtgtgccgggctcctcctctctgcctgggagacacctacagggctcttaagagtccggagatcattgacacctcatccaggcagccttcccaatgccacatcctttccttcattatccaactcagaaggaaggaaatatcccattcatttccacctcaggtctcagggtcgcctactctgttaccttctgtctcaaataggttcccacctctcctcattttttctctcttatttacctcaggcacatgcctggtcctgatttctctatctccattttctccatttccccaagtctatcagatctttttctgacagtttttttttttctctctaagagattccctttgctcctcaacttgggtactgatactgaaaaattctatgttgtaatctcacttaactatgccccatcaccttcaattcctgtcccatgttttaatccattcatcctagaacctttactattttatatatatatatatatatatatatatatatatatatatatatatgtatatatcaaccagttgctttttttgttggtttttgatgtgtatgtgtgtctatatgtatgttttatgctggtacctcagaagccacaagaggacatcagagctcctggtgcctggtgctagagttataaacagttgtgtgtgagctacctgatgtgggtgctgggaactgaaatctggtcctctggaagaacagctgatgctcttaaacactaagccatctctcagtccttctatttttgcttgtttgcttttgttttgagataggcctatatagatagttctagctgtctttgaacttgtaataattctgcctctgcttttgagcactgggattaaaagggtgttccatcatggctggctaagttccacttgttttgtgtgtgtgtgtattcacatatgtgcgggcatggctgcatgtactttggtgcccaggtagaggccagaggataattttgtgtagtgctttctctccctccactgtgggggtttggatccatctcaacaaccttcatattcttatttaccgtttaaactatgatgactaatgccaaaatagatatttgtgtacaaatttggctgaacatatattttcatattttactatatgacttagtaaaactgctgggtcctatggtcaccacatattgaagaactgccacaatagttttcaacatggctgtaccctttcccattcttcaatttccttgccaacatttattcattggctgactttttggctagtgccattttagtggctgtgcaatagcatctctccatggtttgataacctcattcttccttgtttttaattaggtatctggtaaatatttgctgtataaaagatatcaacatttgaacaaacctttgaacaggagctttgactttcaagtttattaattagctaggtatgaacaatcaatagaatctaatattttttttagtagcttattgtgttttattgtggtttgggataggtttttacacaatagcccaggatgtcctggaactcactgggattgcaggcatgagctactaagccccattagaataaaataaaataaaataaaataaaccctaaaggtgactttttttgttgccagaattatctaccgtataaaaatggtgatgatttgccgggcagtggtggcacatgcctttaatcccagcacttgggaggcagagacaggcagatttctgagttctaggccagcctggtctacatagttagttccaggacagccaaggctacacagagaaaccctgtcggggggggggggggggaatggtggtgatttaccgtgagaatccatggaactttggacatttgaaagtattttacagaacaaactaaactgcaagtaaaactccaacttggatatagatgctgcttgtggtctagcttggaaacccaagtttataatctgagcacttgggaactgaagacagaaggatggggaataagaggctagcctggtctacaagagagagtgtcaagcaaagtaccatgaaacaaacaccaagagacaagtaaacaggtagtggtttttggagtgcccatcccgaccctcctcgttcagacagcttataaattggaagcccaagagtaagaatttctgtgatgaccttgtaaacttttgttttaaactagtccatcaccttctcagcagacaagtcctcaaaacaatgtttgatagcacttgggagacaggatggatgtggcaggaggcatagacagtgagtggtgcacacacctttaatcccaacacttgggaggcagaagtaggtagatctctgtgtattctaggccagcctggtctacatagtgagttctaggacagccagagctacagtgtgagaccctgtctcaaaaaaacaaaaccaaaaagaaaagaaaaaaaaaaaaagaaaaagaaaaagaaagaaaggtggagttgctaaggctattagtgcctagcacgaagcccatgctagcatgtcacaaatggggcacaatgatactagggtcataagttcaaggtcatcctcagctaataagttcaaggccagcctggggactttgtggggagaaaggaaaaaaaaaatgtcactgctaaaagtttcaccagatagagttttgctcagtaaacagtagaccctgggaaatgtaacaggttctgaaaacttatttttgatgactggaagtcaaacagttccctcgcagtctgtggtttagcctacttatctcaagtcaggggtaatggtccaactgtttttctttagttctagagaattctatcttggccaggcttcatttgttcattctatcctcagatagatacttctgttgtcagttgccacctctcccccacccctcaaacttgagttcattcgaaggaagacttcaaattaaagcccataataagctttacaactgtagggtgttcaggcattccaagaggagcccatggggtggagctagggcaaaggtcatagcaaagagcatgtagcaagctttctgcatgtataacatcaaccaagtagtcccaagtgcataactctatagccctattttctgtgcttttatcttcagaattggtgtgagtgtgtgtgaaggtaactattctgaagatgtatccaaaaccgagaacacgtcccttttggaacctaagtagaaactggttggaggttggaaacatgtcagctgctttatggaggaagcacagctgaggcctggtttccctgggctctgtgataacttgggccaaggcagtgtggtggcttcaggagccccggggatggagagaaattcgcaggaggacccatgcttttcacagttgaaacaggagccctctgagagaaagagatatttcaacgtggcttccctgacgccttgaagggagctgtggatgacacagcaccagtcattccgtcgcggggtggggacaaggtggcggtagacgccatccttaggcccctcgcaggcaggcagcctccgctgaagcatcgtgtatagagagggagagaaggcaaaatgataaaaatccagggcccttgcgtttgttagagaagagaagcactctcctaagtagctgcgctggtgggaaggaccaacctgggagagaaactgcaagaggttgggggcggggtgaagcgcctgctctttaatctccggccccatcctctaactcgccccacctggatgcagggcgaggaccgcgtacagaaggaactgtgcggctgggacatcactttcagattcagggggagcagcgctggatctggggtccaccgtcaccacactaccctctctcgggcctcctaggcgtccccccaagctcctctctgcatctctacctctgttaaaatagtgaaacaaaccctgttgtaaagtgatggaaagcctcgggctgagagccactggcagtgaggggttggaggggagggggcacggtggctggagctagtggccaccagtgagcgctgggtgggtcggaattgcgctcagctgtagcggccgagacccttcccctccggctgccgggcccgcccctggccccgggcgcctagggagggcgtggggcaaacttggggctgctgtagggggtgaggtgggaactccacctccactcatcccgggatagtggcaactgcggttgcctagctaaaactggggcgggggtgacgacagggacagccgggtaccgcggtcctcccgactcccccagctcgttcagccgcggctgctgcggcagctctgtaacacgtccccaggagactcgcaggagcaacacgtgatgtgtctacttatcagggtgagagggggagagcgagtctccgagtgtgcgggtgaggaagcggggcggggggccgaggcgggggccgggaagacggctagggcaacggggtcgccagctcctcgcccacctccctccctatgggagaagaggaggaggggaagtgactgcggagttgatgaactttgcacatccagaaacgccattttgattccttttccggaacaagtttgcatctctcctcgttctctccccgaagcccaccggtcctcaccgcatcatgcctgggagcccagcaccctgccgggccgtaagtacgcgtcccgggtcccccgcttgcggcactccggtggttgcgagatgcccggggcattgccggagcgaccttttaaagaactttttggggatggggagggtgaagtgtgcagagcgcggtgtacttctgaaactcggcgtttggcagaaaggacccgcgcaccctggcagcatgcgctcggttggggctgtggggtaggggagccgggatgagctgggcagccctctcccctcgggctgcgcgcccggccgctcctcctcctcctcctccccttcctccgctcctttccccttcccgagctgccggctctgccaaccagctcccagcgcgagccgccgcagcgccccgccagcaggacctgatgcgcatccatattagccgtccgagcgcaggaatccggcccgacccgcgccgccgagtttatttttaaccagccctgccgggactcggatggtgcgcgcaccgcgggccagaaacatcttcccagcgctgctctccatcttccgccctctctcccccgacatcctcccccccatgtgggaggggaaacttttctcctacatactttctagtccctctcgggtcgggaagcacggagatgacggagccagcccgccgccgcaaggtatccgggggtgcccacccggggtgcaggcgcgggggccgtgcgttcggggctgctcggtgggagcatccgccgcgccctgctctgcggactttgatcctcccgggcggacggcgccgaccgggaggggcggcaggcagccccgagccctctgcgagttcccggctggcggcggggctgtgagcgaccaccgtcgctgggaaggaggggaggcggcgacccgggccgcgccgacgcgtattgttggtgactccgaggctggctgggtacgagctttgggggagcccccgacgtggggcgagcctgcatcgcggagggggggctcgcgcccggcgccgtcacgagcacaggaaggaggccgggagcatccgaggcggggccggcgcccgccccaccgcccagctgtggagcgcgctcggaaacttttgtccgccacccgctggaccaatttttctggagttctgaggcttcgctttttcctcacaccccggcctgcccagccgaaagagggggttgggggaagccggtgtcccccggggagggggcaccgacgacttcgagaggcacgggcccccccatcaggcccagctccccgcgccccctccccgttcgcggtctcttaggaaactgcgaccttaatggttgctaaggagcaggggaggtccttcccgtcgccggccccctccctgggaggcggtgtgttttctgtacagggctagggtcgcatcgaggatgtgacccgctctctggcccggggtgagtgcggggcgcggctacggtgcctgcgggcagccggccgaggtctaggggcgtggggaccccactgggctcgggctcgaccgcttgacaggcgccgcgtgttgctagctgccctcgtccgcggtgcatccgtgatgggttataaaagaggaggaaagttatttttccttgctcagcagatttgccctccctcgttccttactggttaagagatagaacgtgagcccagatccggacgagcagttcacattccattacgaaattctacacggcttcagagccagcagcagcactcattcggggcatttcggaggagattttcttctttgggggatgctggtagtggtggtggtggcggagaccgatacagggtgaataaaaagcaacttttgtcggggtgtcgaaaaccttaccctcaggtttccattgttagactgctcaacactgggtctcgttttcgagttagagctaagcatatccttgtgaaagcctatgggaagaaagttggttaaataaagatgttgggagttggcaaagtattcttgcaaatgattctgcaaaggctcacttgttgcttgtgcatcccttggttgtgagattcctttttcagataatatggtggtctgtgtctgcgtgcgagttgttgtgcaatagataattggagtggaaggtggagaaatgagaacagccatgaaaagaatgtgttgatggcttttaacatcctctaggtttgatgctttcatgagcaggcaggtatagtttgtaatttaacccggaagtctgagttggaggctaaggtcttggttaaaactcttaagaaaattctgtacgtaagccctaaaagaatccatagtttcttcggaaagagttcagtatactcttaaaacacgtgcaagggtggactcgttttagaggtttagagttgctgtttgtttgtttttacctctgcccattggggtacctactgatgggtcttcctttgatgtatttggttacagtgaattaaacatttgaatggctctaatcaagttttaaatgtgtgaaaaaaaaaccctccccaatttttacaaaagaaagggagagaggggtactttgatttaattattttcccgttctccatttatttttgggttaagttgcactgtctccatcttacaacatacttttacggtaagatggctggctgtcttttcagcatgttttgttttttaagaaatgctttactcacttaagaaatgctgttgatgctcagtggtacatggaatattattctcggccgtttccctggataccgcattattcctcatcagaaactcagacagcataacccttgccgtggacgtgatggggaacgtttgcctgactcagctggttacaggtggtgcattcattcctaaccatttacatcatcaagcaagtgaccttttgatggaaggggcctttattttagatttcttcagacagaaccatctgagagagattatttgcatccagtacaggtaggaaggggaggggaatgcagtgtgttagtcctcatctgatcaacagctgtttattgcttttctgcccctaagtcaggcactaggtagcagctgttagcaaacagcttctgggttgctttttgtttgtttgtttgtttgtttgtttcacttttctgttttaacctgctgctgtattggttcacttcctaggtcagtttggaagtctgtctttctattgtgtgcccactctaacatctcttaacagcttcagctaagtaaatttcctggttaatgaagttgaaaaaaaaattctatcctcttagggttttgcgtgacatagttaatataaacttttacagaaattggttaaacaggctctctagaagcagctagaagtgggttcttttgatgtttttattcattatccttctgaaaagtaggtggtgcttagaaggtcataggataagggttgctaagcagctaaacagaaggatgctaaaattaactgaagcttttttgaaagggagtccttccctgttttacattacctactaggtttaattaatttctgaatcttccatgttctttgatctaggaaggtagtatgttaaagttggtctttgtttttgttattatattcaaataatcttccttttgtaagtgtctttaattgaagttcagtattctctcagtattctcttgactccttgctgtggtgtcaaatggcagcttgtctggggtgactttcttgtctgtgaagaggtagaacttcccttttgttattcacgtataacttcacctgcttttgcattaataaaggatttttatgtttattttggaaattctacataatccacaaagtgatgttttgccattgtatttttattaaacgtttgcattcaaaagatagaagtgcaatatagtatcaatagtaactacaatatagtccctcctgatgagaggacaatggctttctttcctcctagattagattgtggatgtggctgttcctggtccatgttaccctacttccctggctctgtctgttcaacccagctcatagataatcttttttttaagtactctaggtttagaatatatttggaaggactgaacagatgttagaaggcaaaagtattatgacttgtgtattgtcttagtgtttcaaggtttttgaagtttttcatgatgaaagatgcaagctggtggctggaaaccctcccttctgttgggtggcaggcccgctgcaaagccagcagcttccctgcctcaaggttatgcgtgttttcctgacctatcaagcaggcctccttgagtcatatttttatattcaagtgtaattaaaagattgataggttttctctctcttccccccaccccctcaatttttttagatttagattgtgcttctagggtgggagcaatcaagtacctctttgaaatgcatgcaggggtcagagagtggtttccatgcccaggggtgaggggtagggggtgggggtagatccgaggtaaaaggtgtaccgtctgaacccggagggaagtataagatgtgctttctgaaatgcatcatttacttttaacttcccccactcccacatggcaagcggaccaaggaagggaaacctggctgctggtgttttctttactgcagaggtagaagaatgaggaagatggggaggagccttccctagttagcagttagtctccttgggctgtgtcatcagcccagcttttctcaaggtctctcttgtcacgtcccttgggtgcccaacaaggtctgaagggcagctgagcatgcctggagatttcaccctgcttgttggcagctgaagaagagggggagggaggaggggagggaggagggtccagggagctgtgagctagcatccctggttcgaggagcctgcaggctgcaggctacccagtctgtctgcccatcagtaaaggtgactgcttgtgaataggtgcctcagacaaagcagtgggagggcggagactgtttgttctgtgtgaatcaggccactagtgctgagagcatttgaaaacctctgtgaaggccagggcctagggactggctgcttctgtggcgagtcacctgcaggctccttgaggagagggactcaccagctcacctggagagggagaatgaaatcccccactggttttgtcagacagccagactgaaagagaaaaagtctccgtgggggtaattagataaagcttttaaatgctctatttgtttttcccctgagcttgcttggtatttcatccttttaccccccgccccctttttcaagactggggaaggattgttacaaaagcagttgataggtagttgagttgcttttacaccctctccccccccccacccccttagctttttaggctaagtgtcagcctctgattgtgaagactgttagcaaaacttctaaagtttacattcagaacaacagggatttacagcgaggtccatcctgacccctgattcctaacttcaggccagcactgaaagctgatgctggttggaggaagtttggctttgaggacttagcatttaatatttaccgtgggtgtctctttctgtggtggtgctttaaaataaggtcaggcccttttggaagtaattctccgcttgaatttggaggcaggagggaagtaaacaagcacaaagcccattggctgcgctgctgccgctgctgctaccgatggggattcggttatccacgcacgcctctcctacctcccattgtagggaagcattgtagggaaggataaaatgaatgttccagaaagtcaaaaacctataaatggaagagagtggtatattttgagttcaggaagccttgcgggtatccactccagatttcctttccagaacttggttcctttacctttagctgaatttacctacaagtttctctctcagtgggggtggggtggggactgcaccttttgcttccagtgtggggagcagacaggcaggacaagcagatccctcttaatggggttcacttggggatgggcttgaggaggaagacaggagccaagctcagggtttacttttcaaagggatggtcgttatagcctttaagcaagagggacaagagatgccattacacttcctatagtggtcagggcagcctcctccacccccatgcaatggagacttgattatccattcagtctcagaaatccaggagccaaggtagaaaaaaaaatctacttttcaatagtaggatttaggacccagctctgccctgagtatgtccagagccctcaaacagatcacgagtaccaccaagaggggatggggtagggggttacactccatatcgcatgtattctgtgtggagaaattccatacagcagcaggtaagctctttattacatgcccgtaagggagctctgttggcaggttcaaagtatcacagacagtttgagggtggagcaatggttgcctgccggactgttaagtagatttgaaaaaccctgttactaagacagtcccaggagtcgtctgcttctaaaacaaccttggttcactgacaggaagctgcccctgtagatggctcaactctgccatcatgttttcagccacccttctgtcaggttccctcattttgtaagttatgtggagtacataacttttttttttaagtgtttgaactagcccctacttgcttgatgcttttgggcactcacagtctttctccgttttgtttctcagatttttgtacaattcttacataatcatctatcttttattcaagggcagctttcctgagcctttggctcagatgcctctagagagaaaggtgggttatcccatggcaagacaggatggggagggaacgaggagggggcccagggatggaggggagagaggaagtgcttgtttgtatgggaccccagctggaaatgtctagaagtgtcgggggacacaagtaccacttgcttccagccttaccctggtttttctcttccactgctcagtgtgtctcgctcagaccggagacaaggccccgagtcctggggggagagtaagggagccagtgttccagaacagggaggactgtgatgctctgagcttccagttgttgtgttgtgtgcctctggaccttttatctctcacaccagtggaccagctgtgctaaggggactcagtgccacggccgagcagacaccttgctcggggatgggtcctgttgcatccagcacttgggtgttttcctgccctcaacctatgaactggcaactcccagctttctacttttacaacttttgccagtgctgggcccttcaggcacctcgccctgcaggtacttgtaaaaaatgaaagccaatctagaaaggggccagaaagatctggtgtcctcaggcagccaggccaggcaccccactgtcttccgtggctggccccacattgggcagaaccccttaagggtgttgcaaatgcctctttagttaatttcctgtgcccagttcctcctttctgctgttcgccctgccctgttgtccacagagtggcgtgcattgtcttgcgtgcctcaaaacagtccttggctccttgtgtctacaggaagagatccaagtgtctccacatggcccacaagggccttcctccatcagctgcttctacgtctacgtatgttctgtagcctctccccgctttaaaccactgcccttctgagtaatgtctctctttcacctgggttgttcttcctgctgtgtctccagctaaaatcctttcttaattttttttttctcaaaaccttgtcttttggggactgttaggtcctccttacagcctcccctctccccctagtgttttcccacctcaggaacatcaccccccccccccacccacacacacacccctgtccctagcacctaccctgattgttggtgcttagttggtgctcatgccttagcgtgtgctgagttatgatacaaaccccaagtttttggagaagagccatatgtaatttggaactgaggcctaaacagagatgcagattcagtgaaggaaacagacaggcgttttgtttctttttctgcacgcccctcataccacagttcggttctaggtgcacattggtggggggaagacttggatgttcaaaaatcctaaaataaaagttgtctcagtagagagagagagagagagactttgaatgcttggttgctctaaaaaacggtcacaccaggggctttactaattatagtacttttcatggctcttggtttaaagtttacattaaataggagagatgagcatgcagatcaaagaccacatcatttcagagctccaaggagtgggcccattttctctgcttagttagagttttgcttcattagtggtatgagttaatagtgttggtctgtgtataactcaacttctccccacccccccccccactacttcttggacctaaaacaaaacaccaaaccagaaacccagaggatatggctggcccttcattccttctttatttgcttgtgtatgcatacacatgctccgtagctattagttctaggccatagtaatgacccgtcatggtttcaggggactgtccttgatgctgaagggaactgctacgaaacaagatgcgtttgaatatgaaaatcatctcaaaattgtctttaaaagatgagtactcgggctggtgagatggctcagcaggtaagagcacccgactgctcttccgaaggtccggagttcaaatcccagcaaccacatggtggctcacaaccatccgcaacaagatctgactccctcttctggagtgtctgaagacagctacagtgtacttacatataataaataataaatctttaaaaaaaaaaaaagatgagtactctccaggtatggtggcacacgcctttaatcccagcactcgggaggcagaggcaggtggatttctgagttcaagtccagcctggtctacagagtgagttccaagacagccagggctacacagagaaatcctgtcttgaaaaaaaaacagaaagaaagaaagaaagaaagaaagagagagagagagagagagagagagagaaggaaagaaagaaagaaagaaagaaagaaagaaagaaagaaagaaagaagaaagaaagagaaagaaagaggggcactctgtttagcaatggatgttctggaattaggggggggggtatcaaaaccagcatgagggatcagtttgtagagcatttgcttagcttccatccagaagccctgaatggcatactcagaactcagaaactggagccgggaggatcaaaagttcaaggtcaccctcagctccatagctagtttgtggcaagcttggagtgtgagagcctgtttcaaaaaaacaaaacaaaacccaaaccacaatacacagagaaagagagagagagagagagagagagagagagagagaaaaaacacatcaccaaaaagccaaacatttacagcatcctttatgaggatgaagtctgaagtcttgattgcctcaggcatggtagcttacttatctcagtcatcctagattttgggagatagaagaaggatcaggaattcaaggttatcctctgtaggacgttcagggtcagcctgggttacatgagacttgtaaactcagcatcctttctttttttctttctttctttttttttttttttttttggtttttcgagacagggtttctctgtgcagtcctggctgtcctggaactcacgttgtagaccaggctggcctccaactcagaaatccgcctgcctctgcctccggagtgcggggggggattaaaggcgtgtgacaccacgcccatcgtgcatcctttctttaaatcctacttggaattcaggtgtggtactccatatctgagatcccagcacttagaattaagcaggagaagctcccagccaggactatacattaaaatcctgaagaaacaaccaaaaattattgtcatactgccaaatgtgtgcgaggacatggctctgtcctcctgtcatgtacataagtcatgaagccgtagttcaaacagatctgctagatgcagtcagaaagtaaacgttttgttttttgggacagggtttcccttctgcagctcggactgttctggactgttctggacttacctgtttttttaaaaaattattaattcttatttagtatacattggtgtttttgtctgcatgagggtgtcagatcccctggaactggagctacaggcagttgcgagccaccatgtgggtgctaggagttgaacctggatcctctggaagagcagccagggctctacctgccaagccgtctctccagtaatgagagtaaaatttttgaagagccattttctcttttataagacatttagttgtttggagaatggtttttatagaagtgtttggtgaacatctccaaatgggccccatagagtggttaattaaatctgtgtatttggctaagcacttgaagtttgaaatctagtataacttacctttgtagtgctgggtaatgaatttcaggcgctgcacatgccagggaagtaccctctgcctctgagttacagccttaccctgaaacgtgagtgcatgcatgcattccatacttatatgcatgttactatgtaattctattttttgaggcacaaagcaggattttactgtatagtcctggctgggagcttctcctgcttaattctgagtgctagaatctcagatatggagtaccacccctgaattccaagtaggatttaaagaaaggatgctaagtttacacttgggagggagaaacaggaggatctctgagtatgaggccagcctggtgtacacagagatctgtcttaaggacaacaaaaccaaatactgtatcaggggtacagtatccattcagtcaggtcactcttcatcaacttattacaaatcccatggtatttgtttaccatgttacaagacagggcttagtcctccaggctttattgtgggggagaaagacacctactctagcttatagccttgaagcggctatacagcatactgcatacaggcaggcatgtctggcaacacaccattgatagctgtggtagaagttaatatgacaagaggactgtgggtcagtggaggattctgggtgacaggtcaggattaaaatcctatgaaaaggtgccatttgtgcaagtacctgataagaccatagaaagagtgtactttggggaacaactttctcaaaggccctggggttggaagagggaatgtctctaaggaaggaaaaaacaaaacaaaacaagaattcaaagactgcatgataaaagagctgcaggcagggaaggctgcagcatcagcctgaggtacctaagagcaagttgtaaaagccaggccagggagtggcattttgaaattagcattttgaaggccacgcctacctaccaaagaggagatcatcacacagatgggtttcaccttgtgcctgcagagcagttagagagctagttcctgacaactcttcctgtggatgcagaaatgggcacatccgtggactcaagtgtgacaaaaggtaggaatgtcccagagacctcgagacttgggtggcttctgtcaccagcttttctaattctctgagactggaatgtggggctaagtaaaacttaggaaggaaattttcttttaaaaatcaattctcttttttttttttctttaaaaaaaaattttttttgtttacctgtaatgtttattgggttaagaagtatgtgcctggcatagatgaagcatgggaggtctcatgagcgggacttgttaagtaggatcttttcttctctcttctcttctatctcctctctaatttcctcatcttaaagggagcaggaacaatttgttgtctgagcttctgagcagtattcagaggagttaagttgcatttatttttgagtgtggccttcatgctatagcacatgtgtgaagatcagaggacagcatgggaatcattagttctctcttaacgatgtgggtccctaggatggaacccaggttgtttggcttgctggcaagtaccattacccactgagccatcttaccagccctttacgcacaaggctgaagagctggtgggtttccactcattttagtgatacttgtttcatttatgagcaaagggctcaagggatgaagatccgagctgggaccctctggattgctcaaatcagggttcctttcatgacctgattttccaacttagtacatcattagaaccacccgaaggcccttggtcacgtgatgctcttggtcacatgatacctccaccatcttagatggttgcatcaatattttccctgtcattaaacttgtgtgtcttctgtgtgtatcctaggctttcccttagatcttcagatagataccaaagacaaagatttaacagaattccacaagggagcaggagcttgttccggtgtagtggctgtctgtctggtatacactctgatggcggacgggccacccatcaaccaggcagtcttcgggttttacactgttaacctctctccctagctgacagcaatctttttggaagcagacagagtgttttccgctgagttggtacacactggaggctggcacgcaggcgtgtcccctgtgctcttgccatgaagggaagcgctgcaatctgactcccagaaagttccatggggttccagggctgagcagcaagtcgtcatcctcgggaggactcttacttcctgggggagggagtatctgcctcactcggctgcatagccacccctggtgcctgagttgggcccactcatcagatggcctctcggagatggcttactagcgctccagatttggttagtgcttgtctctgaggccactcaccccaggtcagcccacaaagccccaaggatgttgatggcttattcaccattaccagccttgattctcctggacagagtttatctgtgtagtcctagctgtccttggaattagctttatagacacccggctggccctgaattccaagatctttgcctgcctctgcctcctgagtgctgggattaaagacgtgcaccgccaccgcccagatattctcagtcttgattggtgaaacctgaacattccatgggacacccccgacacgcccaaggcagctctggtcccacattgtggggagtacacagttttccatcacttgcttgggatcctgtaagtttttacatcatcggtccataaatcccatcacagctaaaaccacttttcctcaagcctatatttgataaagaactgaacagaggatgtggagaccttttctagccaaagcctataatcctatctcacactttaaagagatggaggcaaggaaaatcaagagttctgctacataatggcaaggtcagcctgggcttcacacacccccttttctcagaataaacagtagcttagcagatgctcagcaggaatgaaaaaaaaataataaaatttgaaatttaaaactgggaaatttagatactttgtgaacaatgtttgaggggcctaggagaggcccacaccccagtatgacctagcctctgtgtggatttggcatctgagctggttgtaagtgttgttcactagatagttgccctgtgatggctatctgcgattgtcaatagttccttcaggagccaagttttggtgacaaactcatgaagccaccacttttggacagtctatgcataagcccctattttgatgtcctttaacagactcgggggcacgagcacatctgaggtacatctcctcaccctacctgttgcctagcagtaaagtggaagctttctgtggaaaagctcttgagactgatagaatattgggagggaggggaatgctttggaatcccaacaagctttgctcataagttcctcatgatacacatcctgaggctatctctgtccttctgtgagcccagagccacctttatcttgactgactgtgatcttggagtatttgctagcctggtaggcatggtggtacgcatctttaaggcaagaaaggcatgctgatctctaagttcaaggacatcctggtccattaattattggctagcctgggctacatagtgagaccttgcctttaaaaaaattatatacaacaaaaagacttctactttttcctcagaaaagtgttttgtacagtacggtgtttgttgtgtccggcagttagaagggaagacggggctgggtactctcttgcttcttggttttggaatgctgaggaatggagcggttcacaccaggcaagtcctctgctaccaagccacatctctagcccatgtgtccttaatgtccagtgagtcaaaagcagatttattttagaatatatccacaaagctcatttgaaatacacatggtcctatgtatggttcagtacgataggcccagcttcaatgttaattcagctttgatttaacaaaacataccttagtatatgcttcatggttggtttcaaacattggaaatgacatgtagtttttctctgatggctttgcatactttttttctttttttgagatagtctcactatggccttgaactcagattttcttgcctctgcctccagaacagtaattattaaaggtgtgtgccatcacacccggcagaaatttcaaatcttattttatcctctaaagacaagacatttctttaccatttccaatgaaaagttggccaaaaggtattttcggagtttcagaataagttgtaaccaagttcattatataagactgtgagttttggtctgcttcccatttagcttttagtttaagggattttctttgcagtcataaagcaaagcatcgaaaaggattagtaaataactcgaatagacaactggtacacactttttttcttttttgaagtgacgcttggtgcagctgtaggtaagggtggcatgtgcacggtgactgtcatcatgctctgcagtggaggggagatggtttgtgatcacatgaccatagcatcttatacccaagaagaggagggaatgttatatgtatgccggggaggcagagattagtactggttgtgttatgattttcaagagcagtggggagaaagatggcaggatggctcagtggttaaaggtgtgggctgagaaacgtgacagcctgggtttgagcaataggctggcaggagtggactgatctggccttcacatataacctgtggtctgtgcatacccagacatctacacatcccgccccccagccctgcatacatacaatacataagtaaaatataatttggaacagctaagattcacttggtccttgttctggaagggctgtttgtgtaggtttgtctcaggaagtcagagacagtcagctcagctgcagtgtttctggtttctcggcagaagattgaagacaggaaaaccggtctttttttttttttttgagggttgaggtgggtggggagttctctaagatagcctaggatggtctgtttctcctggtcctcctctgtgtctacttaagagttctaggataatacctgcacctccaccactgcagccaactagaaatctgttcttaaacaggagaaactaccacatggttcttcttaccataaacgagtctgtctagatgacatttggagaagtacggcaaatcgagtttgagttctgggtcacctttagcggagaacatcacccgccggcaaggtgcgcttgcctgcatgtcctttgaaacagacacagcataaatgaagaaagcccccttttctcctgttcctaccctactaaacccatggaaccctactctaccaccacagcctaaagtgattacactttgctttcacccacccttttggtggtggtagtctgttgtgtgaaaacaactctccgcacgatggtaggagcagcagtcatagctattgagaacatactaattaccaccgtcccacgttcttcacatgtgccatttcgttcatgctttacagttctgacacagtgaggtaggtacaattattatccccatgattcagatgaagaatttgagacccagagaggtagcacacagtcgattcagtgatgtgggctccagagccttggctactgctgtgcccaacctgatacctgaggtatcgttgactcaagatttgccaaataactccttgaaatttttcttcatacagatatgatggtatgatggtcagtaaggtggttgacaaacaagaacaagtaggttgtgacagggattctagcttctggaaacttctcacgccatgaaacagctcattctgctaggagtagggagttagacctactacctgcttgatttagtgaattagaccttcaggagggaggggtgactggagactctcagagtgcacaacttgcccagacagcaaagcagctgtcttctaggatgctcctagaaagggggtatagggagacagtaaaacaaaacataggggcccatgactgtgggaaagacctggggggactgggaggggtggttgggggggggggctgggcaggcctaaggaaaacctatggacaaagggaattttcaccaggtcatcactctggagaaggtaacctcaaaggataggtggtaggagggaggaagttggtcttctgtctgccagctggtaggatgctctcctgaatcactcccaagacacccatgccaagacacccatgccaatgtcattggcagctcctgagctctgctttaacttttgagcacttttgagcagagtagagactgcatgcgctccacatgagtttgtttgtatgtatgtatgtatgtatgtatgtatgtatttatttattgctttgggtttctgaaggggaaaaaaaccagcccattgtttttgttgtaaacttggtttgtttatttgttttgggtttttgagacagggattttctgtagttaatggcttacctggaactatgtagatgaattcaaggtgggtcttgaattcagagatccgtctgcctcttcctggggtctaggattaaaggctaggaccaaagtcatgggccaccaagcccagctccataaccacttgtttatttcctttaacatacggaaagagtttgctctcagctgctgttgtggcgcgaccctcagctcagtgatctgtagtgtcaagtatgacaactgaattcatctcacacttgtgtcttcatatttgcctagatcagctaagagagcttccgtttctttgttgattttcttgctctttcattttgaactctcgtccaaaggttgacctgggattcttggtcctccagccttagcctccaagtgctgggatcagaggcatgaagtaccctgtggagctgtttcatttcataaacaggagacagcgtggactggaggatagtcagagagcatcctacctccctccttgttttgggggtggggctcatcataatgctttgctctcttcaggggccctggacgagttgtagagctggacctgaattgctgtgagctttgccttttgcatctggagggtctttgaaaggggattgcttggaaactagaaacagaatctaagttttgcatgcttacgggctcaggttatcactggcccacagggtctgttattatttataatcggtgattttgctcgaatgagaagcaaatcaggttaggagagatctgtgctctttatttctcaactatggattgcatgcctgtgtcggtcactctgccttgacacctagtccaggtaccaagtgccggggaggcaaggataggcatatggttcctggtgtaagtctccacagcaactggcaaatcggcgaggccatactgcagagatgccagtgtgctgcagccgggaaagaggaagtgtggtcccagccagccgtggagggcctaccacgtggaggaagaggtggggaaggaaaagcaagatgcacttctcagctaaaacagccatgcgcccaatgaggcaggaaaatgggaagctgatttggggatagaataagacagttgtgaaggttgggtttgtgggtattctctagagtggagatgtgggaagtgttgcctggttttacaagccgccataggctttgctttcaagtagagtcatccagccagcgcttgggaggaatgcaagagagatggcatcaagtgtgtagcacacactcgaaataccgtgtcttcttttatgtaactgggctggcctgcagctcactgtatcgagctagattggaccttgtagtaaggctcccgcctctgcctcccgaatactaaggactcaggtatagaaagccatgcttagcttggtatcctcctgaatagaatagtttctttcttttgtggaagaatttccatttcagggctgtgggttatttttccaagcactgttaagtaataactaaggagtgtgggtagaatgatcgtagcactacaaaggtgcatggtttctgttgttgttgttgttgttttagtttgtttgttttttgttttgtttttgtttttgttttttgagacagggtttctctgtatagccctggctgtcctggaactcactttgtacaccaggctggcctcgaactcaggaatccgcctgcctctgcctcccgagtgctgggattaaaggcgtgtgccaccatgcctggctttgttgttgttttattttgctttgctttaaagaagaaaaggtcattgaaaggtgggagaatttgtttgcaacaaatagaatttaatcagacactgtttaaacttcctttattgtatcctgctaattggcactttaagttcattagagagctgaagtctttagtgggctagagactcatctttcctccactcaagtgttgcaaggattgggcctgggccgggcacggggctcaatattaaggtatttgtctgcacaaggttctggagttgattcccagcaaaggaggtgaatgccaggagtctagcaaggaccattttatttactgtgactcttgctttgtctgtcctcatggatccagtgcgctccagggctgagtggacagagggctagcaatttcagtctcgataacaggggtagacatcttcaggggcttagcagcttctggtggaaacaatctgttcataaaacagaatgctgtctctacagaggtgtcagctcggctcctctatgtaacagttgccctccccctaagggctccaccccttaggtgctccaggccctgctcctccttgcctgtatgtagatgggatagccagggaagggggccatgcccagggctttaaagtattttggtgggtgtgaaagcagccagatgggaggctccacagacaattagtggtttaataattattgtagacacagtgttcccttggactctgaagttttctgagttctctgtcctctggggaggaaatattaaaatattttttattggcctgcctttacatttcaaagcctatactcacagactaaaggagccggctgagaaggttgggggaaatgtacgtaggcccctgtaaaattggtgggccaaacagcacagagaccttctagtcactcacttaaaaccgatcggtgagacttcctggtttttttccacattgcttagttttgtctttaacgttggagctacaagtgtgcaagaggaagtggggtcctcctaagctgaatcaggattttttggggaaccaggatattgggaggcctctgaaagtgcagctcaaggcttcctttggtgtatgtgaccagcgggagggaggcgcctgttgtgatctgtgtgtaatgtccatcaccgtctggtaggatgtagctgtttttctcttcctttaacaaaaatattgctcttaggttgattttatgtggatgactgctttgcctccatgtgtgtttctattgtatgtgcatgtacacatgaaggtattggatattctggagacgactgtaggctgccacatgggtgactaagactgttcagctcttaactgctgagctcctgcccccctgtctttcttgtaaaggaaggaaacagaggcttggagacgtttgtttagctagcatcttacagctaatggtagttttccaggaagctcaatggctcattttccatagcattagggataatcttttgttgttgttgtttgttttatttttcctcttaccttttcttttctttttttttttttttttttttttttttttggtattttgattctgggtatggaactcggagtctcacagatgctaatcgtgcgatcttttgatgaactacacccccgccccgcgcatttggtcatttttgctgtggatgatcttcacacctgggtacctgaagctttctattccttaaactccattcttgtgccttgacaagtacctcgtgagagtgttgcatgcgatttgattgcctccaccttcagtcggtaaatggccttaattgagcagctgtattgttgagggaattgggtttaggttttggcaggtgaagcacggtggcttttgcctcgggggagtttatgttgtgaaaggaacccacaatgcctaatggtcccccaagccaagttcccatgggaaggccagggttcagagaggctcaccgcactgggtctgcacttccaggaaaaagtacaagcaggggccgaggtcccagcaggagaggacaggccggtttggaagtccagggtataatttgctgttgaagacgatgtaccaggagataacaggattgacgggttacttagagcccgggtcaggtggggcagaagttgacctttccatcttctggacatagggaccctaagatttgagcagagtagtgacagtctgtcctcccagggtcttggcagcatccttacaagggagaaggaggtttgagcattggtgctttggtgaccaccatgatccaaagcagagaacacatcccagggcacctggtacaggatgcactaagctaagtacttaggatgctaattgccccgagccactgcactgatgcacacacaaggaagtctcggtgaaaagctgagtcacaatctctggctccatagctgccgattcaggcgagccacctttgagaggtgtaaggaaggtgcggccaggtagcaggcgactgaattctcgctaggcctctacttggaaggcttgggttcatttccctttggtctgggaagctcttttagggtgctttgtgtttctaacgttggcagctgagcctgtgtatctgtaaggaagacttctgcacatgtagtgtggagacagctgccagttgggtcaggacaccaggtactgtggctctgcccggggtctcagtgttgtttcctgaggcctatctcttcttgatttcctttctccatcctggttttggggctgctggcttctgcctctatccacaaggagaaaaaggtcttccttacctggtgctcagcagggcaaggcaagtctgaatttatgactgataataacccccaaataatcattttgatcctctacagccaactggccttcctctagaaacctgcaaagcagtagtaaatccctctgttactgcactgctttgcgctcctcagccctctggtaaagctggaagtgcctgaaagagaggcagccagagccagggccagggcccacataatccacacgctctggacgtcaccccgggtgactcagattcggttgcgcttgccgtttcacaaccacctgcatctgatctccctccgggcaaactctctgcctggcgccctggactaggagcatcgtgctcttccagggatggcttctcccagtttgttttttttaaaggagcaggtatcgtgagagctgaacaagtcctgcgcgcattttaactgctgccttcctaacaatgctggcaagtgtgtatacttactgtttcagacattcgggagatctgatcgccatccctgtgacagtcacctctgcatccatcttacgagcaaagaagctgcagcttagagaggtgtgccttatttagggatactacagctagtggggcaaaattcaaacccaggccagggtcccacagtgctcttaattctagcccttctgaggttgttttttttttttttttttttttttttttttttttttttttttttaaaagatttatttatttattattggggaaaaaccccgggggtttttttaaaaacccccaaaaagggggcttaattttttttcggggggggtggaaccccccatggggggggggggttttaaattttgccccttaaaaaaaaaaagggggggtttttccccgggggcccttttaaccccccccgggggggttttttaaaaaaaaatttttttttttggggggaaaaaacccctgggacttttaaggggggtttttttaaaaattttttggggggggggccccccccccccccctttttttaaaagggaaaaaggggccttttccttttaaagggccaaaaaaaattaaacccctttattttttttcccccaaaaaaaaaaaaaaacaaggtttnnnnnnnnnnnnnnnnnnnngtatacttactgtttcagacatttgggagatttgattgccatccctgtgacagtcacctttgcatccattttacgagcaaaaaagctgcagcttaaaaaggtgtgccttatttagggatactacaggtagtggggcaaaatttaaacccaggccaggggtcccccagtggttttaattttagccccttttgagggtggttttttttttttttttttttttttttttttttttttttttttttaaagatttatttatttattatgtgtaagtacactgtagctgtcttcagaaacaccagaagagggcatcagatctcattacgggtggttgtgagccaccatgtggttgctgggatttgaactttggaccttcggaagagcagtcgggtgctcttacccgctgagccatctcaccagcccctgaggttgtttattaagtaaaattatctcctttgtggctgacatagcctctgttactttcattgggttctttttttaatttttttttgtttgtttgcaccccatccctccaattgttaaaaggcagaaagtgagctaatgcatatcaagtgtccaataaatatcaggcactattttgttttgcccctaaaaagaagtgaaatcaggtttcttcatactggagtgtaagctcataaggccttttgtccttttatctttttttttttttttttttttttttatgtatactggctcatccctaggtgctcagccaatggccgctgtagacgggtgagatggataaggcagggttactttaccagtttggcaggtgtagacagagaaccgggggcttcggattcgggtgtgcagcttccggccccatctgaaacagcctttgcttttgcttcacaccgcagggttctgctttgttttgtttttgtttataagaagcagatcctttttacacatgtaagctgagagtgatcagctatgccgtgggattacagagcatgatataaaacactataaatacccaatatccagcacggtataaacagcggataaactgagctgcgtttgtcgttgctgcgcatgcgtcttgtgttttgggcaggattacccccacaaattagtgcagctggaagcgtggtcgtcagtggaactcttggaagtatgttcaagtctaacgttcaggcctctgcttttcaggggagcgaacttagtgaaatcagctcagctgcactggggcggcgggcaagtagttagaaataccagcctttggttaatctcttttctgatcttcgtttacaaccgttgtgcttaaaaacaataccgtggtttacttattctccttacaccttaactagtgaggaaagatgaggtcctccgaggtgtccaggtgcggaccattgatcttgcatgtttgatttccgtagacatcagtatgtccctgcctacccaggagatccaacaatgtggtgggtggggccccagttgctcacattatcctgttagcaagcagtttatatcaataatctgctaccagctagtaaatcaaaatcacaccatggggctggagagatggctcagtggtgaagagcactgactgcttgctttgccagaggtcctgagttcagttcctagcaacccacatggtggctcacaaccatctgtaatggaatccgatgcaatcttctagggtgtgtctgaagacagctgcagtgtactcatataaatagaaataaataaataaatcttttaaaaaatcacaccatgactgtaaaaatgtttgtattcatggtagataatgagccatttgaagaaaaagtgacttgtcttccctttaagagtaacgaggagcctggcaccaggtgtggtggtgcagggagccttaattccagcactccagaggcagcaggagcaggtgaatctccgagtttgaggccagcatggtctacagagctagttccagccaggacagtcagggctacacagagaaaacctgactcaaaaccaaaccaaaccaacaaaaaagtgagaaaggaaatagccctaaggagttaattttttttctatgagatttaaatataacctttaaagatttattttatgtatgtgagtgttttgctcacttagatctgcaccatatgcatgcctcgtgcacaaagtggtcataagaagccattggattcgctgtaattagacttctggactgtgggtcctgggaatcgaacctaggtcctctgcaagaacaagtcttaaccgccgaaccatctctctaatcccattagattctaaaattattttcctgcaatatgatttcaccaaggaaaatgaattaaaagaataacgccagtgggaaataaagtagttttcctgcaaacctgcatgcagcatgcaggtgggtctgtgctgtcctgaagccagtgcatgccaggcaagcactctaaccactgagccacacctccagctgaacacaatataaaagcaggattcatttgtgggtaagaaactcacttatatacattcccctttaggttatactgtatctttttcaatttaagaatgtatgaccagtcttttctggtctagtcaaccttatattggcataaaaatcacattattttgatgtggcataatctgggttctcattacggggaggaggaatgtttcctcatttaaaagaagccagtcgggctggagaagtggctcagtgttgggagcactggctgctcttccaaaggtcctgagttcaaatcccagcaaccacatggtggctcacaaccatccataatgagatctaatgccctccttctggggtgcctgaagacagcttcagtgtacttacatataaaataaataaaaattaaaaaaacaaaaaagaagaagaagccagtctgggatttaaaaacaaaacaaaacaaaacaaaaaaaaacaatccacaatcagaagtcggttaaactttatgtaagaaaatactaatgacaaaagtgtttgtttttgtttagaaagtgacccgttagtctcagtatcccaaacaagctggagtcaacaatgaaaaacaaatcgagccattcgaggaggccctcaaaggggccagactctaagctggagttgtagcaaggtcctgggcttgagctttcaaagggaaaacaacaacaaaaagtttaacttagaatgaagagttgagttagggaagtaagaagagggggctgggctctttgtttagtgtctttaaaatgggggggtgtcacatgtaggagcaaaagttcttttttgtttttattctcaacatagtactggatatgacatgccatttcccagaggctatgcctctgtaggatatttcattttaatctgtcatatttgggtactctttcataatcttcaatataggctttcttattgctattattaaaacacacatacatgtacgtgtacacacacacacacacacacacacacgtacttatttgtagggctataggcttaaacctagggctatatagggatagatcctcaaacaacaaagcaagctgggagtcgtgcctttagtcctagcatttcatgaagcagtgccttgcctgcatagaaagttctaggctagaaggttacatagtgagtcttaaatcttcaagaccaagtacgcttttattcttttagactatattggaagctgtaatgacaaagaagccattaatagcattttagtggcatttatttattgtcattagttgtaggagagtctttatatacatgcagaccaatagtacttacatgtgaatatacttagctggtagataacttactgaagagataattaagtggcccccttgaaacagttccccagaggctcctgcccagagacagttcctgtgtatgaatcacgctaaggactaacgtcaggagaaatagccatgaggtcagctctgaactgtaaatgggatccctcaactcagcctaggaatggcctcggagtggtgcgcagctgagggccattctctgagaagttagggggatgggttctgttcacacaggtgggtcaggagagtgacattccctgagcaatgtccaggacagcccttagatcacagtccttcagaacaaagaattgagtcaggggagtgaattcaatctgccaggttgtccaagcatccttgcctaccttcattcctccaaaaggcccttttaattatccaccatggtctgttaacatgaaccctgggcttgtgagttaggagcccttaacccaaattcatctgccttaattatgtttagctttagtttttctcatccctgaagtggacagactatatatcttgaaccatattgttaggcaacaaaacgatgcccctcaccactcctcccccgcccccacctcaccccctgtctaacagtgcatattaatctgtgggaggagagaaatcattatcttttcacataaaggaaaagtgccagttgctttaaggtagaggaacagaaggaaggagcccgtccttaggaacctcatctccactctcctctggttgtattttcctctttttacaatgggatgccttctgtcctcaccattgagggccaagttactgcgctgatgaactcgccaaggcgcaggtagaggtgacggccatctcagggaaatgtcctttgctatctgtaggaagactatattacatgggccctattccaccatgtcctattttctaagagtctgggccggaagcaggtatgctgtttacattttaggcgggtctgtatgtgctccaaaacatttaatgtgtctctatttcaagcctttataatctttccatgttgttctcggaactttaggtggcagcttagcaaagtaaaattgacagtaagaacttatcagatgagcctgagaaagtaccgggtccagaaatggtcaaatccaggcagggataattgggggaagtggatcttgtaaaggaggtaggtagcaggtgacctgagggtctgccagacctcagttgaagaacttgtgaccgcctacacagtgcacctgtgctggtaaactcagctgtgaggaaggctcctctgcccaactagaggcctagtcactagggtgcacagtgacctcatgaaggtctcatggggaaaccctccaaacttagtttagaaattccagagcaagtttggttctggctgaggttcaagtgggagggtatctccacagcaggacctccatcgcctttgtaggtataattacagttgttttttttttaagatagaaatgggttgtgattgatatcttagggttttagtttgttttgaagtcttaaacacctaggaattcctctccccaccccctccagtagcttactttgggtctcagtgattagaaataggcacattgtttgtaagagagaagttattggagaaaggggttatggaaacacacacacacacacacacacacacacacacacacaagcttgaacaggcctactttcttgagaagaaagtggttttttttttttaggtgtaacagatcataaaataaataacattctctaaagacacgaatctataaacaaagcataaatatctttatttaaaatggattaagttctgaagcctaatggctttgttgtagtaccatgtggcttgttcaggtctgtcactaaacgtgtgttgccctcagaattacattagaaagcaggcatgcactggctcacagattcttaagtgcagtgcggtggtagtgaaacagaaactagatacagatactgaggaggctaaaaagatgaggtcgccacacacctggtcctttcccttcccttcttccctttcccttcttcccttccctttccttcccttcctcccttccctccctttcctccctggccctctccttccgttnnnnnnnnnnnnnnnnnnnnnnnnnnnnnnnnnnnnnnnnnnnnaaaaaatgccaatgcttaacatgtaaaataggcacagtccctcccctcccatcccccctatcccctccccattcccatcccatcccttcccctcccctcccctcccctccaagtctgctcttttgagatgttcttgcagaagatggaggaagctctgcccttagggtcatctttcctggatctggagatgggagtggctgggtactgagactccttccccaactgtgctcagctgaccctttgctttataggctgtctggaggtgggcagtcctgcctgtccccaggctttcccagaagggctgggaggagccggaggaacaaggagaatgttctgctcgcctagacacttcctccccaccccccggggtgccgggaggacctgggtagggagttggaatccaaggagccgggctgaagggtctgaaggctgtaactgccgctgtctgtgcggtccagaagttgcttggctcttggttctgcacggtaactcgagtagggtgcgcgtgcacgtgtgtttagatgccccaatgcataggcaagtaaaacttacgaagccaaatgccgagggtttggttggtttttttctaaggaattgaaactggcttttctggcccaacaatggagtcagctgctcaaattacttcaggtagtcctcgtcgtggtaaaaatgactgtgggaagatgcagttgtaaagtgtggttctgaagcccccccccctcttgtgcctttttttttttttctttttctttttctttgcagtgctggaagaagaggattggagaagtcacttggccctggcctgactcctcctcttcctctctctgcccagagctgaagccactgtgctcagggtgactgcctggtgctcagtgctgtggcctattttaaagtatctttaagttgtcggcatgtcagtcattacatccagggttccttttcgttttcgagggcaccctgtctaaccgtttagccaacccaccccaccccttttccttgtgcctccagtcggggagggtggtcatgttaactgatcgactggcttcagaaaaagcgttcattaattagcgttttacatcccagtcagtcagaaggcattcgcacatttgtatgaaaggatgtcgaagatccaaatctttgaggagaaatacatgggaaggaaaaaaaaaactgcatacacacaaaacctggcactctttccagtttaagcttcgtgctggtccctgttgagtgggtatttgtcccttagtctggaggtgatagaaaatgccagttactgtggtatttaactgacaccaaactgctgtccaaatacttcagttagaccgaggcttctttcttaattggtgggaaggaaaacccacccaggaaaaggaggaacctgcactttcattggacatttaaaacatttcaggctggagagtctgaagagcacacgacagtgtttcattttaattcacagctcatttgtgatttaaaaaaaaaaaagtagtcaaatctctcctaaaacttgagccagtcaaatggttcatttatgtaagggttcagcaactgaaagctctgtactctcccaaggtcaaaaaagtaattattgctatcgaaaatttttctggaactggggtattttaggtcactataggaaggtttactaatactagaaattacataagccagttaaggcacatttgaaaaacgattatgttggcatattgaagactaataagatgccttggtaggaataattagatgaaacatggttttttttttttttttcctccccttaagcaacttccttgttttctggagggtgagcctcagtaacaagatgtgctttatatttcttacaggtatctaaaacaattctaaagataatgaaaagtttttatttttgtctcttgtttttttttaaactttaaatctcagtttctgtatggtgtctaatcaaaggctcacatgatagtgagcacttgaattttagtaatgaactactttttggtgcattgaatgaatttaatatgttaatactcctgtaaggcccagaactgcctggctgccccttgccctgcctgcctggtactggctgaaaaggtaccattgtttgttctacaaacactgggtgatgttggtttccaaggtgactgattctattgctgctctttaagcaagggggatggggaagagagaaagtaacacctgagagcatcctatttgtgacagtccatgtgtgttagatgtgtgtatattgacattttatattaactgaggttatttgagaaaagggattatgtagaaatacagtgtcaattaacagcaagttcagatttaatatgatatatagtaaatatgatggatgttaagggatgctagaataaaatctacttaggctgaaataaactgttaaccttggacgattaaagagctaagtgagagatattttagaccataacttgaaatatttttcttaaccttttcagttataataacccaatttacaaaaactgttcagataaatacttagcagtatcattaaaattggttattgataaagtatacaagtcttcagaaaaatgagagtccatgaaacatacatttctggtttgagttttgttattttttttttttttttctgacaaccctgtaagatcgtggaggtgcatttctaccagaaaacttccagaggcaacaaaatggacccagagcatttattcatggctgatagataattgacataattcatcagtttggacgtttgtactttctcactgagaaatttcaggttcaaaacttacagaagaattttcttccagccaccacccccccgcacccccacccagtgcatggatgcagttaacagaactttgcctttttactccctatctggtttagtacagttcatgcgcaggtttcaataaacattaaccacttttatcagagcttgcagtgtgctgaatggttagtaaagagagtgtactgcaggagacagatgaaaatgagagtccaaggtcagaaggctggtggatttttttttttttttttttgattattgagaatttagggaaaaagcaaagtcattatgaggcctactgggaaactagctcttctgcccagcattttatgtatcgagacgaacacgatggatttgttcagatgcagtgcgaggcaagggtgttctttcatgagaaagcatccttgaaggatgcaatgttctcaaggtctccgcaaagaaatgaagtgtggcattcattaggtacttttgaaggttgcagggatttcttttattcctttcaaaaagatgtctcgtgtctgctccctgatagccatttgtatcagttagtacagtcctaccggtaaaccaaagcgctagaattcaatatcgccaaatacagcataaaacatgggagctccacatatcatgtaatattctagtagagctctggctgtcagctctgaaagtaagaacctggttctcccataatttttttttttaagcaaaaataaaatttcaaacgcggataactaagctgccctcttcctgcccctgcgacccaggggttttaaagcggcgacggcagaccgggtcgcccactcgccttgctgtttgcccagcggtcggtcgctcctgggtctgctccgaccacaggggcagtaaccttgaggttaaggttgccgaagaaacccgaagccctcagtgtacgctttaaacgagcctgggcgtcctcaggcccgggtctgtccttgtcaggacgcgccgggtgaccccagagcttccaggcctgtgaccccgcggggcatctctcccgggttgggttcggcttcccagagaagggcttgagggagactggaggtgagcagccattatagaggcacgcgtaggcggggacaggaggcgcccgagccgctaagccaggccctctaggaccggggtcggtgacctcctccggccgaggggacttgcggtgcttggccaggcgccgcgggacctgctcgacgctcctcacctccgctccagtgctgggcactccgcgagcgggccgtggagctgtcagtcacggcagcgccgccgccgattggctgaggcggcagcggggggtggggcagagcgctggcatcccccgatgggaccttgaagctctgctctctccctttcaggatctctggctggagcagcggctttaagtggcaactagaggtttccccccagagcccgtcgaggcatgaagccttagaaagaattctctcagagacggctttagaaaatgtgggtgctctgagcaggacccccatcttcctctttacgccttcctcctcctggctagctcgagggcttttcttcagctcgtgaccacgtttccagttttcggaagttttcagaggcctgtgctggcgggcttgctcgcattctgtagttttcccctcagaaccaagtccctgttcggatcttgggtttccctcgatgggtggcggcgggggctcactggagggtggtgctgggctggcccgctgcagagctggaatccccgcaggaggccccggggagcaggaagtcagggacttccatgtggggacagcagcggagtggcagcagccaggtggccgagcaagggagcgagcgagcattttagcacacacagctcagccttgcctttctgaatcccctggtcagaaggggcaacgggtctctctaaagtgactctcccctggagaacagaggcaggcctgcaactttgcatccttcatgggaagcccacacgttgcagtcactgtgatgaaagtggggcgcccttgtctcatctgagggctgtttcaaatttctcttctcagaaccagttgttagaaaaaaaagggcctgtttagctatggtgtggtttccttgcgttccgaacccggacatcacactagcaaggagagtgttgtcgctgctactgatggccaaaggtctcttgccacagagccggcctgttaggtgtgctcagtcttatgctaggacagtccacagggtcagctttgaagctccctggccagttctctagaaacctttcagaaatgtaactcagacaggactggagccagcgaccgggatgcagcctcagagaagtgaccctcccacatagtacgtgacagtcgcctggatcatttctttgtcttacagtgtgatgcctggccgactgcactttgggatttgcctccttttttgctttactgtttggtgaccagctttctcaaaacggatccatccgtcaccagggtgagaactcttccatgctacaaaaacccacccccagaagattctgattgaactagttgaggtgaggtcaagggtagaaacaggtcatttagagcatctgtgtcaaaaaattttttttgatgaggtgggcgtggtgacattcatcttcctcctaagcatctctctgagtttaagccagtcagagctacatagatccaacacacacacacacacacaaacacacacacacacacccctgatgagacaaatagatgtgtgtgtgtgtagctttcaagagccagttcttggtggattttgggaagagctacatagatccaacacacacacacacacacacacacacacacaccctgatgagacaaatagatgtgtgtgtgtgtagctttcaagagccagttcttggtggattttgggaatggaactaaggtccctagacttgtagcaggtgcctttaccctctgagtcattttcacaagcccagcaactagggaaaaaaaattttttttaaacatggatgtaaggtaagccccacattctcctagctgatatttgcttgctataaagctcagtttgctgttagatagcgcactgtggcacttgtgctaggaccatcagggccttcagcaccgacaggtgcaaatgccactaattaattttttaagaactcagagctccgagagttatgctgagtagcaggcatcaggtgcttcttttgttaaagtcgtggagaagcagtgtttcaggggatcaggctatgtttaatcgcctactctgacgttatggagcttgttgtattgagtattttctttaaggaggaagaagaggtggtacgttctggtttctagtgtgcctttcccttcacagtattatcttggaggggttgcctcgattatcattaggcccaggtcctgttagaagagggttaaatggtactcgggcctctttatctgagctgttttgccacagccgaagttgacagcctgtgcctctaactgaattcagtcctttttcactgggaacaacagtaaagtcaggggctcctcatgccgagaagactttacagcccctgaacagcctttggcttcccagttcatgaatgcaccatttgttgttttgagcacaactgttagatacaactggtcttgcggcccactctgcccgtggccagtgagcatcagtgtgtttggattcctcccccaacacttgcctttatttatttatttatttatttatttaattttctggcatggaccaagattttattcacactagaatttctttgacccaatttatattttttaaaagtgcaaatttcagaaaatcaggtttttggtgtgctaaagctggcctgagaaatttgaataagtaattttagttgattaaagaaaaatttggtgggcggtatgtggtttacttttatacacatatgctgactttaaaattgaattttaaattgaagttacaaagttattgttacatcatctcttaatcaaatattgccttcaattcagaatttaagatcctagatgctttcatagcaaaaataagcatatgaggtagtgggttaattttgtttaatttaaccattttacaatgtatacgtctatcaaaatgttgtgtatatactataagtaaatacagccccctatccctacctgctgctcagactcaacccagagtctttgctgtgctaggcagtgactactactgagatacatatccagtctgacatgttttgtcaaccacaccgtaataaaacttattaattaaaaaaataatttaagggagctgtcagttaaagtttaacacggtgttctcaagcatttctagaatattctggataacttggagcagggctgtacgcatgatagtgcttgtgctagctttttcacttctgttttcttttcctctcacatgctggtttggggccctgattggttgcagcaggtgtttacattgaagttattccttctttatagtttaaggtattctagctagagagtattagtttccctttctgctctggtttgcatgtccatactgacctttccagctattgttggtcttggatgggccaaggacacaaatttctgattactatgttttaaacatcctgtaacaatggatcctacatgcattgatatcctcgggcctctaataacggcactgttgggctgctggaaatgaagaagttctgcttgttgaatctttgatctggtttggtttggtttggtttgttcattttatttttcagaccaaggtctcactttggctggcctggagcttgctttgaactcacacagatccacctgcctctgcccaaaggcatgaaacaccacatccctagctatgtagttaaatcttaagtaaattctctccctctgtctgtctgtctgcctgtctgcctgtgtgtttggagatagtcttgctctgtagcccaggctggcctccttcaggctcctttgttctgggatgtttatctgtctttcagagaagttatggagaccctgcattatgtttgtgtttttgttaaaaattggcgtattgaaacacgtacaggaagaaggtacagtctggtgtgggatctttctcccttcactgttcttctgtgaagatgtctcctgagtggtagggagggggagggaggggaaagcaagttcatgtttaaaggtcctgggcagcagctttctcagccctgtcctcaactttatgcttggttttgatatgtgcctttaaaatgcataaagttgcatatggctcgccttctaccacagtttgtgtgtgtttaattatgtgtgccatttgaaaaggcagctaaagcaccagcaggaattatcagcaggtagaaactgcctttcctatgtcagagcagccagtgtggcttagttgatgcttctgttgctctaagcaggtaggtttctggtctggaggctacccattaaccctataagtgcctaactgcagactggaaagataaagaaaaacaacccagtgttttgtccgactgcaagacaagtgaaacagggcagtttaagcttgatatgctcatgtagaggccaaggaggagacctgggaggtgatgggatgaaggctcccatagctgatagtgaaggtctcagcaatatgatcagaattcccgtgaggaatggggttagctcttctctgtggtattttctctgtaagcctgcctttaactgcccacatagctgtgaggagaggaagaaggaagaaaggggttgctgtttgcatccatttgccagaaaggagttaacagaacataccacaaaacaggttgggcaagactgttaaagtcagtgatgaagcctgcctcctccccttctcttcttcttcctccctcctcctcctnnnnnnnnnnnnnnnnnnnnctctccttcccttaaccattttcaggacttgaaaacgtctttggactatcgcttacatccccctctctccccctgcacccccaactcactgcctggcttcccctctcctagtcagaacacttgatgtgaataaaatactttgtgcggatgaggagcttgtctgcgacaggcaggcagcctggccagctgtttctcaagcagtcgatggtgccctctgtcatgtaacataggccctattcagcagcagcattcttgagtatgcatttatgcctctgtgggactgtggagtggacagcttgggagggagggagggagggagggagggagggagaatgtggaggctggaatgaagaaggagtgtgtgcattcacacagactcggagagcaatgagctacccaaatgccactaagtcagaagacattgtttgaagcatctttagtgagctctgacttctggggtgtcctggggcctaggatgcaggagacctggtttcatcgcaggccagtttgtgtttgatataagttgtccatggtgtttgcattcattcatcccataaacataccatatatagtcacgcttgagctccctataacatcacaagggaagcactcctaatgcacagttcctttcttgctcagagaagcagactcacacgggctatttctggtgtcttgtggcctgctgtctttggggagggggagaaaaaaaaaagaggctcttgcttttcatagttacactgtttgcaatgtttctgattcttgtttgcctggcactctgaaagttaaaagaattttactgtcatgggaggaaaaacagaatcctctgagtgcatctgttttagaataaaagtctgtttttgttagtgtctttagtgtcacatacgttttgttttatgggtcctgatctcccactgttcagagagcatccttttatgtcgttagggtgacataccctggaacatgtagccgttctcggtggctacagagaggttttccttctgtttcctctcagccttgctgagctgtccagattatttaccacgtatcatattagatggtcaaggcaggacatgtagcttctgtgggactgatggcagccttcagaacctgacagagcagggttggccgagtcgaggtgacagtgagaaacaagtgcagtccctttgtcccacacctcgaatactgtatatgagcttggagtgcccatcagagcgtttgtggctcagataagagatccgtgccccctgccccaccccgcttacactcctactccccggagtgttttttccctcaggactcatgtaaataacttgagggaaaagatggttgccaagttgggacttctgttttgctttctttcattggcctcatcagagcggatctgtatctgactgtgtgacagttaattgtcccatcctctcctttccaaggctgataagacactgcttctatcaaacctcactgaggagttcttaatgcagtagaacaaagctatctttttctttctttctttctttctttctttctttctttctttctttctttctttcttttgtaatctcatccttttaacttacataatggtgtttctccaagtagtgcaagctaataagttaaaagtttcttcaaaagcatcagtaagttcatatttaaaaagtggttaacattctggagtcagatggggctctgtgagttcaaagccagactgatgtacttagggagaccctgtctcaaaaataaacaaagtccaaacagatgtctgaggagatgactcagcagtcaagaacactggctactctgccgaggactcagattctgttcccagcacctacatggcagctcagaactggctgcacctccagccccaggagatctgacgccctctcctggcttccttttgcaagcacgtggtgcactctacatttgtttctaggtaattgctaattattagtagtaattcatcagtattagatgctgcttagaaaatccagatgacctgatgccactatggagaccacagcagcctggttaacatggggttgactcacttttggggagataactcacttggcactctccagtacagactgagtgagagctagtgtggtgaatagtatatatggtggtgatttatagttttcaaaagccacgcaagtgttaagaaatcccggcagtaactccctaaccttgatttgtgtagtatgctagcaatatttttactgtttgtttgttggagacagggtttctctgtgtagctctcaaacaggcctttaatcccagcactcagaatgcagaggcaggtggagctctgaatttgaggccaacttgatctacaaatccagacagccagggccacctccacatacccaagtgacacagtgcatgtgagtcagctgacactaacacctggctttgtttatagtcttaattatagttgtgtttttttttttaaggctaagaggagctgatatctctctctctctcccccccctctctccctccctctctccttccctcccttcctccctccctctccttcctttccttctttatttattctatgtatatgagtacactgtcacagatgcacttgaagagggcatcggatcccattacagacagttgtgagccaccatgtagttgctgggaattgaactcaggacctctggaagagcagtcagtgctcttaaccactgagccatctctccatcccagtcttaattatggtcttaatgtgaattgtcttttgtgttcatagctagaatggtatgttagaaaagatttattttatgtgtatgagtgtgttgcttgaaagttcgtctatgcatcacatgtggatgtcagaagagggcatcagaccttgtgagctgttatatatgtgaccgcacatatatgagaacctgggtcctctgtaagaacacacacatgctcttaactgttgagacatcaacccagctccaggatgccattgaggttttttaaaattatatatatttttaaaactgtctctggtataaagaaaaaagatatctctataccagagaggtcataggtacctggaagatactctttatagaaaaataattttggacttgtgctgtgagtgtgtaaggtttattttattattccgtagatgtgtgtatatatgcacgtaagtgcaggtgcctgagagagtgtcagatacccccgagctgaagctacagtagttgtcagccacccagcatggatgctggcaaccaaactcaagtcctatgcaagagcaaccagccctcttaactgagctagccctaacctcactgggtgtgcatgtttcttttgttttaaagagacagtaccctactttgtagcccggacatgctttaaaactaattcctgtccttttgcttcagccttccatgtgccaggatggaattgtaggctcagaaggaccatgttctaataatctcataggtacatttgaatactcaatacttcaatatattagctttcttctgtgcatttaggtttgctgtagcacatttctaacactgaggaaaagcataaacttttatgttcctttccaaacaagcccttggtgtttttcataagtgaaactgttcatttgaatatttaacaagagttaaagttgggtcttgcagtatccagggaaactctgactgcagattgccacactaaaggttgaaagtattatcttacatggtagtcactgttgacactgtccagcaaaggaaaatgcatttgaactacatataagaaataggaattagttgtctgcatgctagatgttcagaacagctggaaaagtaattaaaagcccagacttcccaagaagcaagtagcaggtttgagagctgactctttgaagtggggttaacacagggtacatgtgcagaaggggtgttgctgaggggttgcgatagtttgtctttgaaatccgttgcaactggcagaagtgacctctagcaggttgtgatggctactcttgtttttagatggatcttgtcatatccgctggtgggtggagcctcagggacaactgttagagtggagtggcagaactggaggtgcaggtagggaagtgtccaggcatggaatagaatagcctctgggtgccaggagaacagcccttgtgaatcataggcatcgagagcttgctcccgttggagctaatgggtagagaacaggaaagtgagtgcagttactattctgtccctgcagagctctgaatctgaagataccacagacattgctgggctgttagtggatcctcagtctgccatagccactacttaaaagctctttcctctttataaaagcctttaaaaaaaaaattaagctagatgccaccaatcacctttaaagctaacgttgctcttacagataccaagtcgcttattaagggggaagaggagactcagatagaaaaatttgatcaattgatttaaggttgttggaggattaaaatgttacttgattgctggccttatcttggatttgggaatttcaaggaaaaggggacaatgctggcttttgtccaaggatttcagcagtcacatgatctgtgtacccaatcccaggggcagagagtgctggcaacttgtgtgcctcgcctcatccattgagaggaggaactgctgagtgggaagggtgttctggcttgggaatcgtttagctgagaactgactttggtcctgaccttaattttatacaaaatctggcacatcccaaagttatgacatgaatgggctatgctatttggctataagttggagtttaagggaggcaatagcaaggaaaccagtcgaggcagtcacttccagtcccctgctgcacggggagaagcaagcccagccaggttggggcagagcacagggatcatcgtgataaactatcttgaataatttagagatatggacaatttattcaaagtctgaagctgcagatctctgagcataagtaaatggggatctgggttatataaagatagcatttataaacccccaggaatttacttacagctagattcccttgtgatgggcatgtgtgtagaggtgaagtgatcacgttagagcaggagagccatgcgggattgctttatatggctttgttttctcagggttggatccccatatctcttcctttcacacagaagcatgcaaaggactgtggtttgatgaaacagtaccagtgttatgaagccacttggctgaataataaatcatttaggaacctcgtgggaaagtcactagcaagacatgatgctgtttcatataatttaataagattcttttctaacagcacacaattcctgttactattttttaatggtctgtaagagaatattcaatgctatttccttaggaagagtgaagaaattatcccccttcaggattcaaatgaagatttattgatcttcataacacaaatagaatgacattgtttttatgtatgggagtaatttaaaactaggttttcagggctgggaatatagcttagtggtagggggcttgcctaacaagtgtgaaacaagtttgttttctagcatggaatggtggtggggtgggcacctggatagggcattttgctgtgtcactcaaacttagtgactcaagcagtcctcccgcttcagccttcagagtagcaaagctacaggcatttacccctgcacccaacctaggttttctccttttcttttctattctcttctttctctcctttggtttgcttgtttttatttttcgagtcagggtttctccatgtagccctggctgtcttcaaactcacagaaatccacctatctcttcctcccaagtgttgggattaaaggcgtgggctatcacaatcacctggcagtgaaaaggcatgtgtggtggtggggtagggaaagaatagaggccttttgttctatatagaaagatgatgtgttccagtagaaaactctgcctcctttgaaatgagttgtagactagagtctccaatgatagccttccaggatgtgcagttctggctcaatagagtgaaagactgtgtttgattctgttaaatatattactttattgtttctttccaattctttcgattttatgtgttttgttttctagtttaaatctggcattttggtgcatggctaatcttagcacttggggaaaatgaggtcagcctgcctgggcaacttcgcgagatcttgtcttccctgcccttcaaaaggagtgagatcccctcccccctctctataggcaaaataagttatcagtccacatacaatcaaatggaacctttgtgcttttggtctgtcccaaagaagcagaatgaaaatcctaaggattccagtgaggagagagaaaagcagtcacccttctcatctgcaggcaatagctcccaagatcccttgccacaggatgctaaactttagtaatctctagattatttttaatatctaacacagttcttacgtgacttccctttgattcagtatagcactccaggtacagcagatctattttcctttagaaacttccagacttgggcggggaggtgtgcggctgggtgggagtgaggggtaaggttatagaagccatggtacagcaggcttctgtggattcttcatctcatccagctcatgttccaagtcctccagcgtatttacgtttcaccctggaaatacttgtgagcatacatagttttctcagtgagagttgcttcatgagcatactgcaacgagggctttttataattgggccaaaacagacctcaaataaaagaacatgaaaatttgctgataaaacttaatgaggatagggtagacatcctggctgattacacattcacccttagacacacatgagtttattagaagcagtttgagcacctttgtcataaagatgataggcattgtttttgtttgttttgtttgtttgtttgattgattgattggccgatttgtttggtttggtttggtttggttggttgagacagagagaagatctcatggttgtagccctggaactcaatgttggtatggagctcactgcgattcacccgcatgagctaccatatctggtacagatagacattggttaatttaagatatactgaatgaagtatcaaataagccttgaaacctaagacatttaactcatgcctcatggctgacataaagtcttcggaagagttataacttgttggtctagctccctcccaggctgcagtgatgtacatggccctaaccagcaagtgacctgcctgaatgtgaagttattctctgaccagtcagttattgtctaactagtgagctgcctgccttgtcttcctttatcattttatctcctgaaggtttactttgaacataaataaatgaagacttagacccaaagcctaaaacatgaactgttcacttaacagtaattctcaaagtgtgattccccaagtaagtcacacaagcatcacttggtaatgaagactctcttatactagatactagagggctggcgggtccatggtagattgtgtgtttgtgtaaggccctaggttcttggattgataattagcaccataagcaaaagaagaaactgcagtgggcttctgcaaaacagctatagtcagttattgaggtatcggaaaggtcaagagtgacttaagttttagcaccagtcggattcatggttgaagaattaagcctaaagttttgataagcatttactactgtgaatgtctgggaaacatacctgggatcacacatgaaacagtaagtgttagagggtttgtactgtgtgtcccagtctaccctcctatcaaatgtcttcatctgctgcccacagcaaccatacgatgtagctgtttttattgactttgtcttttagctgagaaaaacgagacagggtggtgtcacagggtcaggatgcaaatgataaatgtaagaactgaacccaggcacaaagagtggctcagaaatccaccccctacccccaccacagacagggtgcttgcgtgcgcttgctcatctttagcttgacagtttactgggccctatcgttttttgttttgtttttttaacatttttttgaatggagacaatgtgagaaatagcaggaagtgtggtgcgatggcgacagttcatattttaagttaagtcccctcaccacgagctccattcgttggtggtttacatgtgtggtaggctactggcagtattggccaatcatggaggtgcatggctaggttgtagttgctcagccatttaaaaccgaacaataaacagaatgaggctgttaggggtagaaccagggagttagtgggaagtggtttctcagagtgaggtgtagctcagtcaacattacagtcttcagttaacatatgtgcaatctctgggcttactagggaggccctgttctcatcgccttcccttttgagtctcctccgacttttcatctctctgccctttcagaggtgtctgtctgtgtgaagctggattccatcagacactttaaaagtttctgttgagtcttcagtgtaatagagaaaatgtgtttttctttccaagagatgggatagaacagttgagccacttgagaaggctcttggaaggagttaatggaggggatctaatcgttagcatttggagccaatgaaaatgcttccaaatgacattaagaattgctgatccccttacattcttttaactttagtgacgggctggagagatggttcaatgcttaagagcaacaatggctgctcttccagaggacccagggtcggttcccagaactcacatggtagcttacgaccttgtgaaactccaatttgaggagatgcaatgccttcttctggccttcttaggcaccagacatgtatatagtatacatacatgtgggcatatattttatgtatgtattatacataatacacaaacattgtgcacatatatgtgaacatcatatcatacacattataaaaataaatacatctttttaaaaaataaaatgtgacgatcaagtacattttccagacaggtctgaaatctgttgctgttcgtggtcctctgctggcccagcaggctgcagttgagatggctccctggcagctctgcaggggacagtgtcttggctgactctaggtggaggataaagatagagcatcgtccctttcacgcttcgtattgtctggaaacaactgctatgctttgtatggctcgagcatatttcatttccaaagtgctgacatttttagttttctgcaagcaaaagcttaaccgaggctttgacattccaactttagcataggattttcccttgaaaaacagttgttcacctagcagttgaatagagatgggaaagagcagaggtaggtaggaggagaaattgttttcaagctccatccatctcttttcttcttgtcggtgtaagtggttttatttgcttaataatttgatttggcccaaatgatggtatatatatatatatatatatatatatatatatatatatatgcatatgtatgtatgtatgtatgtagttttatatatatataaaactaaagaaaatcttgagtcaaatctgaagtgaaagaaagaactaacctggaaaagaatccctggattcacattgattgactttcagagtgggccactgggattaacctctgagaactgaatcacaatgctcttgatgggccttgtgcttgtttttgctgggtttggtagcctgtgtatttgattctagcactctgaggtctaggcaggcagatctctgagtttcaggccagccaggactacatagtgaaaccctgtcttctgtgactttccagcctgcattttacactgagccatatctgagttagagctacaaagttcagcccagaaagaaaaaggtggaagtattttgggatgaatgtttggaaggtgtttttttcttctctgaaagacctggtgcccttggtatttgtatgtggaaccctctagtttatatttaactagagaatagctacatgactgcattggatatcagttggaagaaaagtaacaggcttgcctttaactactggggtataagatgtgcagtgttcaaaagaatacatttttcttttcctttgccagcaatcaagagtaggaacatggtgcatgccatagactccttgagtaggagtggggctttccagaagtaccacttaactgtccctggaaccatttagttatgtgggtgcatgcgtgcatatatgttttgcacacctgtccgtgtatgggtgtgtgtgtgcctagtgtgtgtttttttgttttttgtttttgtttttgtttgtttgtttgtttgttttttaaaagacagtcctattgtagttctggctgccctggatttacaatgaagtcacgatgaccttgaattagtcttgtctcgtctcgggctcttgaatgctgccaggattacaattatagatacatttggagtgtattttgaggtagacttctgtagcctaggctggccttgtatccctacttggttgagcatccttgaactttctccatccttttgtttcaaccttgaagtactggggctgtagacatgaggactgagagagcgccttgaggtcatttacctgtagagacttaagaaccaactgctccccctgttcagcttcattctctgaggctactgggctggtggtaggggttgggggtgggggtatctttttatctctggcagccactgggctgtctccctgcctgctctttgggttcctttgttcactacaccatcacttgccccattctcttcttgggacttacagctaggaccaactgcctgttttctggagattaccagtcagccaaatatttgagttcctactgtgtgctacagattaagactctccagcaaaggggcctccttgaaccctctgggattccactctaccatattcagatgaaagggctctgtccactggcctgtatgcctgagggggtggggtgtcacttctgttccctatttcaagtttcctcccttaccacttctacactgccatcaccttctgggcctctttccatttgcttcatactcagagtctttagaacagaatttagctcagctaattccatcaaccatgtgcagctttttgttggccactagactgtggctgttcttgtccctcctggcctgcccgcctttctttgaaagttgttctgttttaccttctctatttcctttgttcccctttctagtcacccgcccctccacccccagtcaccatgttcaaacacgttttctgaactcttacatcatcttctcagactaccgtgcgcctgtgcccctcactaccccaaacccagctttcccagttccccataatttgccctgcacaccctctgtaatcatcctctgcccttcagcagcacctggcgctttctgacgatcagctcccccggcagacttcccatcccttccccgtgcacacacctgtctgcttctgatgcacttgagcacctagttaattccctgctgcttctgcttcttgcttgtccctaggtgacaagctcttgaggagtcccctatcccttggacctggtaatggatcttttgggggggtgtttgtgggtgggagggtggttttatcataaatatttgccaggtatagtggtatattcctttagtcccagcactagaggagcagagacaggtggatcactatgagttccaagttaaccaggactgactatacagtgggaccctatttcaaaatgcatatatacatatacatgcatgtgtgtatatatgtatatgtatatgtatatatgtatatatatatagtatatatgtgtgtgtatatgtatatgtgtatatatatatatatttgatgccttgggagtatttcctccccatatctttgaaagtgagagtgcaagtcttgttgttcttaaggaacttttttttgggggggggtgctgtgtgaaacagtctcactgtgtatccctgccaggaccttgcccagtctggaacttgcaaaccaggctggcctcaaactcacacagacccacctgcctctgcctccaaatgttggaattaaaggtgtatgccaccatgccaactcaggtttcttttaaaaactccttgacagcctgaaagtaagaggagaaaacattagttttatcttcaaaggatatgagcaataagaaggaccaggctagctcagcactaagtacctactaaagcacagtcacactcccagttcctcatgagtctgttttattcgtccatgtattcccctgagtaggctgtttatggattgcagtttggtgggggcacacacaactttaagggcatctcagctttttattgatggtttccatttaaaaggctcactaagacatctgtaaccttttgttacttacaaaacattttccctaagtccacctcctagtatggtgacctgaaatccccaggagttgatagtatggggtgtagttatacaaccctaaggctctcttgcagcccctttagagaatgccacgatctacaggctgaatgttttcttctagcgatcagcaaacactctgggatcttagaatacacgggacgtgaacaaacctgagtaaaggcagtgacagggctgaggctcaccagttcctcttcctttctgggaaaatgagccatccttgggaattctcatgcttgtatcatgcctcaggggattttcagaagctgatttggttaatatgcattgagttattgtcatgtgttcctatggaagttagttgtatgctttaactcttcacaagaaaaagggaagggtagaagtttaggtgttacactattcattgttagctatatctgggtgctggcctgccactggtgctaaatgtgatgaagagctgtaggtgatggtagatggaatccagtaccaggtagatggaatctatcccttgcaccggggaaaaaaacaaaacaaaaaggtcttgctgtataacatacataccccaggctaacaaggaaattactgtgtatcctaggctggctttgaacttgggttcccaatgtctcagtacatgccaccatgcccccctgtatgtatagttttaaaaattcattatattcatttaatttttaattttcatatttctgtacttatgtttatgggcatgtgtgtgtcacactgtgtgtgcaaatggaacaactttttaaacaatttttagttttgtgggtatgaatgttttacttgtatgtgcacctcatgtgtgcctgttatccttggagaccagaaaaagatgttgggtccctagaactggagttaggaatggttgcaaggcaccatatggacggatgctagggaccaaacctgagtcctctgcaagagaatccaacactcctctaacagctgaacttctctacagtccctagataggacaacttttagaagctggatctctcctccttgtgggtcctaggaatcaaacttgggtcttcaggcttgatggcaagcacctttgttcactgagcctcacttcactagccctggaagtaattctaaatgctacacagttagcacggtgttatgctcattttagagcagcttcgtcaatgctcaaatgtgctagcttgctattttatggttgatttgcttttgcagacctgaagcttaagcccagggcctcaggcaggcttggcaagcagtctttagcaccaggctacacctctgctcccatactgcacttgaaagtgacctaaatgtataagtttcccagtgttacatggacttttgtgttggaggcaggacccagtttgagcaggatctgagcagatgggtagggtggaaatgattgcctgcttaggggatgaccctgtcctgttggtttcatgggctgtttcctccatactctgaaactcatacttctgaactacctcccatcccatggccacagggaaggccatactggactttttttatccctgccttggggtgtaaaaacaaaggcctacaatctagtaacccaagattaccagagaaacagcactggagacctaccccgtccagatcgcaagcctctggtcatgactaaccatttaaagtagactcatgtaagagagcctcttgccaagcctgagacctgggactttcttaattttgctgttccataatcagtcatgatccactatatggcccatgctccttcctccacgaggaatttcctccatcttctaaccactttatcatccactgtgttaccagatgcaggcagtccagggtcattctgaacaatgccccggctgcaagagttctccgtttgtgatgctccacctccacccccacccaccccgcagtccctcttcatatctggccttcaaactatcatagttgcctcctaactgggttatgtgcctctagtaatttattttttaaattgctgccaaaagatttttaaatatggatataattagttcattccaggccaaaaaaataaaaataaaaaataaaaagccccatcagtgggtttccacagtggcaggctaaagttcacccctttcccgatggaaccttgacctccgagtcactctgccagcctcatctttgccatttcccctactccactctccctcctttctcacaaagtgcagtatgctctgagcactcccaggggaacgtttttcatgggtcagaaacaaagcaaaaggtttgtagttagatgtgggggggaggggggcgagagggggcttgtttcttttgccaagtaaggaagggcataagaaaataatctcagtcattttaaggagtgctttttaaccttaaagcccaagcaatttaaatgattgaatgaatgaatgaatgaatgaatgaatacaaaccaattaattgtgggtgtcagcatttcaccagagaagggtaaaatggtaggatttgggacctcttgctttctccacatggtgttcttgttgccaacatctggtttgcctttgccccactgccctcgtgttccacacttcttacctctggtgagccccacagccttttgcgtttggctcatggtccactttcccttgggttggaatttcactctttgtatttgctctgtcttcccatgaggggatccattctctttccctactgtttagtgctgaggatccttggcggcaccttgcctgctgccctggctttggttttctgaaagtgccagaattatacacatgcatggtccattataccagctatagtttttgttttctttattaaaaaaaaaattgaattcccattgtgatcgtgccgggatatcaccagcttctaatatacttgtggaagtgtgcgtacaactgtgactcaaagcaactgctgttcacttgaattgtattttgacttacaagtaagcatgtgtgtgcctgagtttagtggactgtgtttgtttgtttgtttgtttgttttcccccttctggaattgtaatgaagcatctttctttaatagcttttaagtttgttgaataagcactgtaaataccattgttttgcacattttctattatctttgtataggttttttctgacttcatggcctggggggagttgagggtattgaagggtgcctgctgttgagccgaaccagtccttctggctcctagtccttcactgtctctgactggccaggtcctgtgtctgtgggtcacaggccacgtggatggaggttctatctagcctgtggatagcatagcatagcatagctcctttgtatgtgcatacaagcacttgctctcagttccaatacaaagaatagtagcacataggagttactttaagaatactaatgtatggaccaggcgtggtggcgcatgcctttaatcccagcactcaggcagaggcaggtggatttctgagttcgaggccagcctggtctacagagtgagttccaggacagccagggctacacagagaaaccctgtctcgaaaaacaaaacaagacaaaacaaagcaaacaaagaatactaacgtatgtagatggaataatgacttacatctctaatccagtatccaagaggttgagacaagaggatcatgggttcaaggacaacttggtcttcatcgcaagatcctttcatttaagaaaaaatgtatatatgtaaatggtgctttattctagttagtttatccaacttaaagacagatattgtgttttctgaagacacagcaaattcataagtgaccccagaaagtatgttaggcatgtcaggtctctcccacaccaagactgcagacggtgagatgatggttcagtgggtaaaggcacgtgccaccaagcctaatggcctgggttttatccctcaggacccacacagtgaaaggagaaaatcaactcatataagatgtcctctgacctccacacatgtgccccgggtacacttacagcacatgtgcacagaaaataaatgcaaaaacagttttaagtgggctactttattggaccgcaaggttgttgactttggagctaaaatgggtgttgggtaggtgttgctcagacactgtgactggcaggagaggcaagtatttggaacaagtcaaacagcccctccaggatagctacaggaagtccagctcttggctttgagtggtcagtgggagataaggtgtggactgttagagacttggcccctcctatcactggatggcaaactgtgaaaggaagataaagagagtgggggtgttttgaacaacaggagagtgcctttatcacacgcttggtttatgattatatttttggagaactctgcttgagatgcaggtctgcgttccacagacatgtgaaagcaattccatgtctttttgattgagagtgtgcaaatcacttcttacctatgtaaataggcatcagcttggtcatccaaatctgtgtgccaggtattatgctaaagtatctgtctctcggaattgtctagccatccagccatgtccagatatctaggaccctccttgggtctctgagtggcactggggccagggcatccctttccttttagctgtgggtccagtgttagctaagtgaatatttatagatgagagggagttcaaggaagggacctgtctctctagggttatatttcttgccctgtcattttttttctttgtgtactttgtaactcttggtgggaattcagttctttgtaaaagaggtatctgttttgggtggggcctgtaagatgtgaactgccgtttagaagcctgggcatgttcggcacctggtagggtaggagatcaacctaaagcaaatgagcctgtgtactttggcgacataggcttctttcagtggagcacagcccttctcagcagcaagaccaaacctaatcctgcaagccccacccctgggagtacagttgccatgaactaatcatccttccaacggtcaaggccagggcaggaccagagcctcagacttccttcagtactgcattaaaaataaatctccccaaacctggacttcggctgggccacagtagcctcttggtactcagtatacgccacgatttcctgacatgcagtgtcttgggagggggcaagtcttgctccattgttacatttgcttgcaagtcatctttggtttgttagtgtatataatcaatactaaccaaccacttgtatatcagagtatttgtttgccttcacacatatggtggtgagttctttttcagagggaaaattggggagatggggggaggaaagaccatctgttctgtgcacagagggtagcccatcaggtccttgggagctcagacacgtcacttcccctggcacagtcattctcagctgacagttggtaatgtctgattacccactgtaaaatcttgaccacagctgaccacttttccaatgggcaattgaaagatgtgactctttctgttccaatgccttctagaagaggccagggaaggagcaatccaaacagtggtttttaatctttccccaaatcattttctttttccaaggagtgttgccctgcaactgccctgaattctgggaatgtgcagccccttctgatctgaggttaaccatctgccctggagttacttagcttgcactcctgcagggaagactggagaatcctgattcgtgtgcaccctttccccagtatatcagaaaggcctgagtgagacctcagggctcatgaaagagttgcaggatattgcccaaaactctacaaactgctactgaactttaccccagcttttctcccaagctgtaaatgtaacaggatacttagttctatttcagagaagtacccagaacagccagatcactgcagtccagttgcagaccaggcacgtagctgggtgtcagctgctgttcaggtgctgcagttgaaagagaaaggctgagttgggggatacgagggagaaccagctatgccctatgctgcccttgtggtgtgagttctttcgtggtttagcaagtgtggagctgagcgggatttgtttcatcggcagtgcacaaagccggatgggttttatttcctgtttgctgtgcagcgcctggagaatcaacagctgttctgctccttgctatcagtggaactgcatttgtgataagccaacttacgtatttttaactgtctcactggtgggataaggtgggattttttttttttttttaaacagcgatcatcacactgggctgctgtcagagctttgccaatataataagagaagctggtaggcaagtagaggtagactgactcacaccagaaggaaaggggcaggggtaaccagaatgaatgttgggcaaagaaatttaatatagttagctcagactgggggtgccacactgtttcccatatgctttgatgactccatgtcactctcagataggagaactgaggctcagaagtatgtaattcatcagccagaagaatcataatctgatcagacttttaaaaattatttttttaatatttatgtgcctattttggttattccctctatttgaatatacccaggtgaagcgagcttatgactgacctcatgggccttattccattcaaaggctgttgtctttcaaagccttggtttaaggctggcgagatggctcaacaaaggtgcttgcctctaagcatgaaagcctgagtctggttgacagagagccagctgccttctgacctccatacacaataaatacatgattgtttggtttttgtaaatcccaaaccagagctagccagtaaccagcatctgtgcactgctcagctctcctccctgctttcgggttcctgccctactatccctcagtgatgaactgttacccaaactataagatgaagtgccctctacctagcaaacaagcagaaagccctggccttcctccattcgtcatgtttgtcctagtgggcctgtgggatgaacacatgggccttccagtcctgccgcgtttgcagccagctctgtgtgtttcaggaagtactcttcattctcaacctctctagcttcaggctcttcttgtttttctactgacttggtttcccaggcctttagctttctcatgtcctctacctgaaaggggtttcagtggtctttctggtgacttgataggcacaagagcgttgaagccacagaattcagatggagacctgttgccatcccacaagagcagtggaacattcagcagataacagtcattactatataggatttacaggaggattaaacacatataaactgcttactgcatttctgacatagaacttttgcctcaggatatgtccccagctgttctctggaaagatcatacatgaatacaagcaggcttctggtatactcttaagttgaattctgttttctgtagtcgtagtcttgtcttttccagttttaaattctagaacaggtatactgtagagcacccgcctccccttgctctggaggtagggtagagtgggagttaaggtcagttcccaccctaaaccaggtgaccaccatgcactacaggtagacaagggcatttgcttctctcttgctctctgtccacacaggcaccttgaccacttacgccggctttccctaggctgtttggtatagagtgatacaggcttctgctaagctaggcaagaaagtgatggaatacaggacctggtagccaagcagaaaaacaatgtttaggaaaagtctggcctgcctggggaaaaggccagggactcgctcttctcacagcccagtgccaagggccacccgtgttcccctcccaggggaggagggtgctgggtgacaaatggctgccaggtggcagctgcatcttggccttgtgaatttggcagttgttagatactgtctgtaatatgtgcttcctggagaagagccgcaaggagcggactcagcttcctccgtgcagtgtgcttataggagagcctgtgatgcgggaaggtgctgcctgcctccttcccgtgaagaagcaaggaggcattagaggaagagtcatgactgtgaaggggttcagtccggtgggcacctaccagaaaactctcttcccagcagttcccattttgttttgttttcatctttatggtgctagggatagaacccagggcctggaagatgctgaccagggactgagctgtggaaggagtgttctccactcgctcttcctccccctccctccttctctgagtccaagaggaggcgtgcctcagtagatcctgagctaacactaaagctgtaggaagcagtagccatgctccctaactcttctccccccctctgccctttgtcacacattccttattgcccaggagtggcagagaggaaggcacagggaggttgcccaggtccacagaaatcctggccaaagggctccactctcaatgtgaatttccaaggagtagcatgggcttggagaacagcatttgctggagacgaggcatgtagggtccaggactacgtggtctacccatgtgttgcagtccagccctacccggtctggtgcttatatccaaaatgtttctccaaagggacccaggaaacaggccttgtgtagatggcttcctttttctcttctcatatttagttgtagtaagtaaacacaaagctagaactagattctgagtctctacttcagtgcctccgtgtttgttcagagctttgctaggccagtggctctcagaaaggttggtggtggaaatcctggggtgtttgaccttgttgaccttcacgagctggttctcagggctgactaaatacactctcccagagaactgtgaggaagggctaccaggtcttcccacagaggcgtccgtttgaagttgaagccatgagttttcatttctggtgataggctaggctatataggtaattgccaacttaaagctttcaacttgtacagtttgaaaaatagcttatgatgaagttattacacatttggtagaatgcattcttgggattttgggtttggatcttctctcccattagcagtggtctgatcctttctcttgatgctgaccagatcgccacagttttattgcagtctacagttgggtctggagacaactgatgctctgtgatgcactatgtatgttactaagcttggggggtaaggtggacttagattgaggagcacctgtgcactttgaggtaggtaacagtgttcacacgtcagcttcagttaagcttctcactgtctagataaaatcattagtaagagttcctttaaattatatttgtctagttaatctatactacctaactactgccctttgtctcctacttttttaaagagacatttgttttatgagcaagtgtgtgaatgtattatatatactgccatgcagatgcccttagagcccacaaaagggtattgaacccctctgaactggagttccaggtagttgtaagccctgatatgtgggcacggggaactgaaccaggatcctctgcaaagagcagtgagtgctgttagccattgggctatctctccggcccatcccctacttctgatatacatacctggttggtttgttaatttgtcacgactgtctgccctataacccaggagtgtggactcctcttatccaagcccacgtacagtttgtgtggaagtagacataacctggaaaacatgggttctcctgttgatggatacgttggaatcagccattccacaggaccgggccattaaacaattgaagttgacctgtgggacttccttttagcctccctgaacttcatttgaaggccagggtcccattgcacagccagagagttgtgtctcctttgagccagacctgccttgttcctttgaccaaggaagagatgaggaggaaggggagcactcctttttttttccttgcccagatacagatgagaaatgaaagaccaggccttgggtaattgaaagacctcgtgctaagattgttgagcaatcaggagagcacctacactcccaaacgctacaccagagagtcacacattttgtccaaaagaaacttaacagagttcagaaactttacatcaatttgttctcccagataaatcacccagtattccaggggcaaatgatgtcactcctctaagtaatggcttcatctgcatagcaaggttaatcctcagagatatcacttgatggtgatgctgctttaaaaaaattatcattaaatatgatagcagagttagatatgtcttcttgcttggaatgaaaaggcctgagtccatgagagttaaagaggtgtcatgcacacttatgggcaagaaacagtagagtggtagccatgggtactggtgagtgctgtgagtgcactagaccagagaacaaacttgggctgaagcctggggggctgttgagtgatgggttaaagacttctcatttcctgtagtttattgaaagaagtagagaagacaactagagaggaagatcatgcatctttcttccatccctggatgcccctctcacccattaccatcatgcttgtctctcaaatacacttgaactgtgcaaaactaggcaaaaatacacgcccaatctcttagcaacccatctttactcaaaaggaagcaatacagagttgactatagcaccccacagtgctcagttaagtgggggttgctgctgctgcatgatgcttgggcttccttcattataccaacgcctgtgccattggggtggggcttggtgactttcatgggttatcaccctatccaaggcatagcctagcccctaagccaagaaacacatcaacttcctggaactcagagagagagctaccatctctgctctctctgccttcagagtgcacacaaggccatcctggttagcagacacaggtttgccttagacttgggggttggcagtcttggatttggtggaacatctggtcaggttaggttctgtctccagcctagaccatcctttagatgttttttgtggcttgtcaagtgctacagccattctcatatctgagcttctactctttttagcttgcatcttgttctggattggcctgatctggtcaggtcagcgctctcctcacacatccctgacaaaccatcccttgtatttgtgcatattataggggcttgcgctgtagccttttcagtcaagtattataaaaggccaaggcatctcaacttactccgtatttcatgggagcccgaggacagattttttagatttcctcttcagaagctggggtaccaccctttacttctagaccatccttgcttttacctttcagctctgtggctatctccgtagacctggagacaggctccttaatcttctctttctggctttacatagcattgtcccttatctaggggggtcggaggtggggctggcctccccctgcccttcctcctcccgcagagacctctgccttctgtaagatatctcgcctctgactttgcacaagacttctgggaaggaacatccagtattcagcatctcagacccacccccaaatgctatagaaagtctttgtcacatttttctcttataggacataactagaaataaccccacccatccctccattcttctgaggtagtggtgatggaggtaagaaagaggtatcttgaagttccttttgaaagaccgccttgtatatttctatcctgtaagctttgtggctccgatagacctagtggaactcacctagggaggtggctcttgtgatccagctcacccaagtcactcccatccagcgctagagatgcagctttcagagccactctcagcctgaccctgtgctgggagcgcgtccttccccctcagtcctttctgcttatggggaagctacctgggcctgcttgcgtccttgagtgtctaatggaaagagaaggaactgggtctaaaataattttaatgcgatttttaggttctggaaatttttaattccgatacttgtctcccactcaagcatacttatagttgactccatgtatttggagatcttgacagttcaaaaaaaaaaaaaagaagctgctcctttctaagactatgctactaaacttattatattttaaaaattgcttgcactcttactgtcattatttttttcttcagtggtaagcattgaacccagggcctcaactttataaacaaataccctaccatgggagttaaacccacaacctccaattattttaaaaatgaatgcaatcaagggaagtttgtccttacccccacctcccacacacacacacagtgatataagtggaagggatgaatctaagacctcaagaatactaggccgatgctttgccactgagctatgtacttttttttaaatgtttaatttctttataagtattaataagttgagataggtagggatgatctacaggggtattttgtttgtacaattctgaaaactggataggcattctaagttgatattatgtatgtatttgagacagggtcttactgtacagcctatctgatccgcccacctctgtgtacgctactatgtccagcccctgattcatattttaaaggatgctgggcaaatagttaaccatggagcttttctttaacgtgtgtcatatagcagtgaagcaatgatcctgacccagtggtccctgggtaggcgtctcccatcacttgttttaacagtgaacaaaaatgttgagtatatgactttctgtggcagcatttatgcttttcttacctggagaataactgggttgtgtcaggggcctccagatatgagggtctccctggctcattcagagccttccctgtaagttgctcctgtactctaaagtccaaagaactttttaaagagaataacataaaggaatagagaatggagtcactgaagtatgaaaacagaaaaacttctggaagaatcttggtgtcactacccacccaggaactgcttgtgagagtaaagggtggtggagcgttctcttccacacagatcagtcctgccccacgtgcttgggagctgtttgtggaggactccccgtgagatgctcaaggatagctatgtggtacacttacgcaccttgtttgtttccagatgctctgagaaaggaagaagtgagaaactgcaggacagctgcacctcagcatccttgcttatgtgggacctttctttctcctctttctgtggtgccgttggggaacctggagctcacttctgtgcgtgccaggcagatgctggctctccgagctatgtgccagcccttcagcttcttaagtcctgtccctgtattgcaaccttcgttgctgtgttgtggctccagaacatgctgcatgcccccttcttctgggctttcagggtccgtggacccccagagcagacattctcagactcccgagggacatgcgcgaagatgttttctgtatcttctacagaaagaacagggcatgcatttggtcctagttgttcagcgatgtccccgtatttgtaggaatctctacctcaaggcattgttagttgtacatttcttactctcttcagctctttttcctctcctctgtttctgcttgcaccaagtgctgtttctcttttcctcctttatgctggagaatcagctgggtctgttcagccatttttgtctctctttggtgtttatggtgccgaagttgaaacctggggcctcacatgctaggcaggtgctttgccactgagtggtccgtgcattccagtactattaccacgccactgggatgctcaaagctccacctagagctagcattctgagcattctcctgtgtcgttaacaagccctcagcatctcgggaatggagggtgtacttgggcagaggtaatgggggtcctagctgttgaaggcacacttgtatgttctggtggaatcagctaacagcttgcttacaggtgcagatgcagggtgggaactgtcctcaccatggacactgagtagaggaaactagacagaagcagaatttttccttcttttaaacatcttttaatgttatcttcttttaatttttcaggttgttgcaatcctgtgctccagaagtggtggctttgaggtgtgaccctgcccacatttgggcccagtcctcaccagctcctcggcagaacgaagaaaacaggtcagttaccctgcgtaggcttccttgagtccaagcagtctcacgtgagtgagtcttcaggcactcccttgcctggacttgaattgtctgctgctttcacaggccctctgtcctgtctgtccctttgtatcttcctcctcatacctcatccattctttctccccaaggcatagagcgaaatcctgttaaaatcataactgcatcttgctggttcttgagctattgagtctctggtgtgtgggatgaggcgtctcagaagaggatgcgcagggcacctcacaggaagcaaaacctcaggcaaccctccttctccttcctcttttcttctttcttcccaactcccagttccaaagtgcaggttcaaaactagagcaactaaaacggaagcaatcagtggtatcaatcgttcacatctgtgacttgagagcttcatttggggtccttgtctgattccagctggacatgtttagtaaaacagggccagtgttttttatttgaaagattttagtgtggtgggtgtgtgtgtgtgagagaaacctatcgggtctctctccttttgacatgtggatcttagggactgaattcaggttgtcaagcttggcaccaagcgctattaccacagagcaagtttatcatttttatttttgttttaaaaatgagcttagttgcagtacctaggacaatacggggaagaagcaattgcgtggaagagagaatgaggcatttctaggtttgtgaatattaggttaaacaaacacacactacacaagaaccttaaactattaaaactatattagcctagtaggtaggagtcctaacagcttaaccccacaaggtaggggatttcagcccctctggtacaagcacagaattctctctgagacttggaacatatgttaaagagtgagtattagtatcctctttaaagcatgcacaggaaatggcattgtatcaaagggaaaaattgtctttcctaacacagattgagtatcagcaggcttaaatgttttcatttggatggttgtttcatttcattattgctggatagttacagaggatcaactagaactagccagcttgtttctggttaaataaattatcctttacctcagcattaatgtaaagataaatgttgtttttaatgtttttctaaagctgaacagttaacagtgttgagtttgcactaggcttttccttctgccctgttccatgaccccaaaggaaaattcccaagccagactcagccaagacttagcagactggcgtgaagctgtagcccagctctgaggacagcgtgttggtgcttctgaaacatcctctcagcatgtgttcaggcccctctccttttgttaactgcattctcatcagaaatcatagttcccctttaaaaccttgctgctgtttacttaacatttcaaatatggaaaggaagtaaacaaacgggttcctagtgccacactttacactttatcccctagaaggaaatagatgtagccagcgtcttcctgtccagacagcagggaacatgattgcaaggcttctctccttttcaggtaggaaaaaatgctaggtagttagcacacatttatatagctagctatatgtgctcttgctggattgacatgtggggcagggattattggtaatttgcctctatggagggaatatatgttttgtcacttcctattgagctggacatgatggaacataaccctaatatgtggctgggcatggtggtgcacacatttaatcccagctcgcgcgcgcacgcacacacacacacacacacacacacacgatttcacttcctaactactgcttacaattactgcttactgttcacttcagcctcaggtggcagtgggagacatcttcatagaagagtagagacagaaagagtcatgccaggctgtattcctgtatgtgtctatttgccagttttcaacagaaatatcaaagtaatcgagagtctacataatttctttgaaaaggctataaatattccagtatgaggatatctgaaggaggccagcctgggttacaatagaaagactgtctcttaaaataaacaaacaaacaaagacaatagataaatatgtttactttttagattcatctatataagcgtggttgtacatgtctttaatcctagcactcctgagatgggaacattgggaatttctgtgtgttagaggctggcctggtctacatagaggattgcagggaagccaggactagatagatagaccctgtctacaacaaagaaaaagagaactgtatagataaaccctgtctcaaagtggggaaaatggtaatggtacgaccaaagaccagcatctaaacttgatataaattggtagaaagatatgttttctctttaccaacataatagaattatagtgaccatttctagtcacctatcttaaacttttctgtacattaaaaatacatagaagagcgtttaaaagaggtgagttcatttaggaataaaatgggtatgtatacatgctggttggttccagcaggaactgatggcgtgcttgttatcaatgtattaaaaaagaagtaagtgtgtgctctcttctgggtgtgcactcctgcctttatggttttttccaaagaaaggagagaaaccaagcatgcagacaccttactaatttgaaatggtctgctggccagtggggagacttcaagcagcattcaggcttgagttttgtttctttccttggagaggcaggttaagtctgctggctcctcctcctgctgctgctcccctcgttggatctcactaaccttctaaaagaccccacccccaaagacactcatcagcctatgaacttgagaattaagtttctaatgccaagtttcgagggaacgcatcagattgtaacagcatgaggcatgttttgcgcagggaggtgctggggatcaaagttccgtatgtgccgaacaaactccctgctcccatatatattttatcttttggtttaggaataaggtcaattttgatgtggcttgagttatgaatttccttttggctgtttgtttcctatcacccagtgtcttctagatgtggcttaatatttattgttaggctctgagctcttaggaaatgagaaatggagtgagtcaagtggagatctgtgaaaaaatggggtgcagtataagcgaaaatttgtgtgaaatggtagctgagaaagagtaaaatactgtaagaattcctcagctgttgagtgtctgtgagacagcaggagacgataggttgaaaacccacatacagttttataagaaaaaggtgacttactttgtcctccttgtatttcatgagcatgatctgagattacagcaagttaatggttccacagtttccttctaagcaaagagactgaatctgtttcttttccttttttgagatacaagtttctaagcgtagcccagcttagcattgaactcagattctctcacttctgtgtctcggctcagagggtcaaaggcgtgtgcccttcactccccaccaacagtactgagtcgccttccttgatgaatcaactaatgcagtgtctcctgtttgtcttccagcataaaggagtgatatccagagaataaaagggctccccagagtcatttcctactccatgtggatgacagcaggagcaagggactatcatttggggcagaaaatggaggtaatttgcaatggagacagttcttttatgaggtataggtaactttttttttggaaacatgctttttagtgttggttttaaatttggttgtaattacagcagtgttggtatctatagaatcagcacacacatcctcttaaaactgcatccagttagaggaaacctgaagtttcctatcagctagttcttaagtctagaacttttaattagaagaaagcaagtacagggtacgtgggaggtgctggccaaacgggagctctgtttcctcttggaaaggctcaggcctttccaaactctgctcacgaagattagggaaagcttgggctcaggagatggcacactggataaactgcttgctatagaagtgcaaggatcaaagtctgaatcccccacacccacattaaaaacctaggtgtgtatggcacaccacacacacaccacacacaccccaccccaccccacccaccctgtaacccagtgctcaggaggcagggacaggatacttaggtagaccagccaaatcagcaagttctgggttctgtgtgagcacttcctctgggttttgtatgagacacttccttgtgcataaagaaggcaacgatcaaggaaacgacacaataagcacacatgggcccacttacgtgcaaacacaaaacatgccacagtacatgtgggataaacaagaaaggggaaaggaagatgcttcagaaggcttgaattgcactggtgctaagcacttggaacagaaaagccttccatcagtataaaaaagcttaagctgctttggaactgggtgtggtggctcacacctgtaatcgcagtacttgagagcctgaagcaggaggattggggagttctggtcattcatggctacatagtgtggccagcctgggctacattgcaagctcctgtctcaataaacacaatgaacaaactgaaataataattaataataataataataattttgagctctcttctgggtttgggttgaactagggcaagggtgttgggcatttctgtctcttttaccatggtagctatgattagcaccacatgactatgataatcctacactttctcacaaggacatcgctgacttctctttttcagttctatagcagagacttcttagaagcataaaaccctgtcccgatgacgtcgaattcgcccattggtttagaaggctcagacctgtcttccatcaacaccatgatgtcagcagtaatgagcgtagcgagtgtcacagagaatggtgggagcccccagggcatcaagtcccccatgaaacctccaggaccaaatcggattggcagaaggaaccaggtgagggtgtgtggctttggcgggagcagctaatagatttcatcttgggagaatgtagagtagaagttcccacactgcctaaagggacaccctggatacatcctgaattaaaggtagacctaaaggctgtcatcatttttcaggagcaaatattttcatgatttatatccttgcatggagaaaaccctttgtgccatggtatctttcagggagtgcacccttattctttgcctgtgatttgacttcagcacaagcttctgtttaatagagtgaacttggctgcctctgctatgatgcagaggaaagcccttgacacagctgattaatttgtttgtttgtttgttttctttctaagccagctccttgtggaaagaaagaaagaaaaatcttcaaataagttcctgtttgttcagggttcagcttccctattttgccttttggcttcagagaatcccaattaagatccatcgaatggaaaaggcttgtgctcggttgcttcatagcagtgcaaagccctgagttcagtcggcttaatcctcttgaattttcactggtcacaggatcaggagagattggaaagagtaattgcatcaacagaaattgggaggaatgaatgttgtgagaaaagcccctgtctcctctactgggaacaaggcattgtctttttcagttaatgaacaaacagggcacttttttaacaagatagataagggggcagagggcacataattctcagttcatctgtgagatcatgtagtgtacagtgacttccccgccagtttcttgttggtataatgtagtcacactactccttgtttggagacaaggtggtggtctcagagcatctgtgagcggcatggacaggacaaaccggtggggctttggtgaactaatggctgttcttatgcagactactctctgagaacatctatgatgacctttgacaaacgctcaggtttttagctcaatgtgccctctaggaggtggagtaacagttctacgttccctgcagcatgtaagtgtgcatgcctccgttcctcacctcaagcctgaggcctcgacagagctcaggaatgttttataggcttggagcattgataactctctttctctctctctctctcccccctgccttcgtgtgcctctcttcctgtgggtgcctgagaaaatactcagcctgagcacagaaggaacactagccctgggaagaaaaggtttatttccactctcatatgcctgtctgtccatctctccatctgtctcactgtctatcaactcatttaacaataggcctagcttctatttccattagctactctgccaactatgagatgtcaggtcattcgttgtcttcctcatccttctctgctttaccaagaatgaatggaacatgggcaagaacttttccttaaatagcacagcgcggcatagctgccccaagtccaggctctggttccttcccctacggagacagttagggtcattccttctgcctctggatctggaggtgaagaaatgagtgtgcagtgtaagcaagtgagccactttctacctacccctttctcctcagggatccaatagagttggatctttgtgtttagaagggaggcctaggccagaggtagcctgctaaatacagcaccaaattcaagaaaacaaaacacagtgcatagacagctcaggatgtgaagaagtggccttcttacctgacaactggacagggagagtagaatggagggagccttggggaaggttgcatccatgtgaccatagcattccaggagagattagccacagccggatgctgacaagggtgccagattgtttcattatggactggtaagttatcacattagctgctaattttatctctcagctcaggaagtttgtttctctcaccagcgtgactgtaataactgggctcagaagcctttagcctgagccgtttccatcatcacaatgctcttttgctattctgttcacctttaaaagttagtaaatctgcttccacagaccaccacggtttgtgaacttacattacagcctacacgacagcgctgccagcttcaagcttggcagaggttaatgatcaaccccagagtcaatatcagtcagccctgtgtgcctccacacaatgtgtgcctggtgtctacttcaaggtgaccacaagatgatttcattaaaatatgtctcctcaagtgactggccacttggatgtctagaggttattttgagacaaggtctcacagttttgccagactaacatgaaccttgaaggctcaagcaatcccctgcctcagtcttctcagggactaaagccagtatctggctgaggtttttttctcttctttttttaaatgcacactaatacaatgtactgttgaatcttttccttatataaaaaaatctacatagtattgttagtctgatgaatggattaaaatacctcagagcttgacttttcactggaagtcttgacctgtgaggcatcctcttattgtgcctgggagagaactagaagtgtactagaagataactgggtgaagccagattcctttttttttttttttttttttatgtctctgggatcttccttagaatctgagacagaatgcttgactggcctagttctctgacccacttccacaaccagaaaggtgcttacactgagactcgagagagcttcaaacaagacatccccacacatacatccatctggttcatggtgccatttgttttcacagtctttaggataccttattctcataacctctcatgaacatcacaagggtattgcttttctgtgcctcagggtcagacttataactgtatcatggtttgggtgtgggcctttgaacagttagtctgaggattaagctggtgtcaatacttcattgttctctgtttggagcaagtcccttgtccctctgcactctaaagtttccttttccagaaaatgggatccctaataagtggccatctcctagggattacggagggaaaaaaaacaagcctgatgttgctataaattgactgatcaacatgtgatcaacaattagtcttaacagtggagaggcaaaaacacagtcaaatgagttcagatgagaagaatctcctcagagatatccaagaccagaaaaggatgtggaggttggccagagcatccagccactcttcctccctggcctctgactttatttagcactaacatctcccctaaatgctttctcttgactggacttgccacagtgtgagctctgcatccaggtctacatgagtgctcacgaccgtctggtctagccatcagtgtcttccgcggagattttaagacaaacagatctcaagagttccccccagtcctggtctagcatgttgagagtctagcagttggtattgtacagagctcctggatgatcctgctggttttgaaagcctggtgacataatattcagccatcataattcctgatcgcttcccagggatgagtccagtgcattttaggaacagagactcatgtcaaaactcgtgtctgagttttgtgtgagttaggaggtaatattggtcattccttgtgatttcccaggaattagttggcaggaggaacttttaacaagtgtcagtgaaagaagtttgccttttttgtaggaaggtaagaatatattgcttgaaggaagcttgtcctgtatgttttgaagaaaaataaagtgagccacctaaccaaacagtgagctgggtttttgttctggtttttggtttttttgtcacctcgtgtagaatcttgagtctgggctgtcatgctgactggctttgctgaggtcagagctcttcttgttctctatttatgggcactgccaaaaagatgctagctttatgggcagagccttgttagacccctgagagttactgctggggcaccaaggaagccttccactggtgggattgactttcctgttgtatctctttccctctattatgtttctgagggtgcttgagacctgtgatcctagcacatggaaggtcatggcaagaaaatggagataaggaaagcctaggctactgaaagggtttcaggccaacctgggctgcatggggcagcaacaaacacatacaacaaaagacaatggtattggagctggggtataagtgataaacacctggtgccccatctgtgcagagcaccatggctctgtctcctcttcacccatcaatgtggtcttagcacagtatagccagtgtcgattttcccacttataaacaaggaaactgagggcagattggggagtgacctgcacaaacacctggacaggctccagtgtaatgactgcagctgcttagacccagctctaattcatgggcttatgacagaagtggaagacaccagttcagtgtgatgggaaaatcatcccctgttttatccttgttttaggaaacgaaagaggagaagtcttcctacaactgtcccctatgtgaaaagatttgcaccacccagcaccagctgaccatgcacatccgtcaggtttgcccctacttttgtattgtttttcactaacaggatgattttattttaattaaattgaattgtctagtaaattataagctatgtttaaaatttagtgttttagcaatcttgggtaattatggagtgatttttgcatagtcacgtttctatgatagtctaagacagaatgtccaggtaacttatcacttatcttgatataatgctttttactgtttgtaaccatattgactaaccctcataatgaaagactatagtatggttctatatatgtgtgtgtgtggaggaagaggaacagtcatgggggcctttacacataatctcacaccatgatgacgctgagttctgtctgtagcttctgtcccagaagctacattgcaggcatctgtcaccacacctgactttccccccttgccatgtagtcagctggctgaagcccaaagtcctcgtgtccattcctgccctttatttaaatggtaccagtgtacttcctgcagccgaggagttcctggacttgggattgtttttcccttatcataggatgtatccttgtcctcttatggcattgctggtttatggcagactgctggtgacagagggaacagtggggaatgatgatgcattaaagtcttaagaagctactaaatagtaacgacacctagtcaccgaggaaacttggatgtggatagagattttccttgtcattttcaaaagcaggaactacctcattcaggtttctgttatctaacaaccagcctaagtcttcaaactggaggagggactgcagcctcccagtgtgtaaacacactatttgtttctcatattggctgtatagttaagactcctcctgtccagaggagttcataatatatgttagtttaaaccatggacctgcagactagttctgagttttgcatcagagtggaaaataatagaacaaaaacaatcatatgcccatcttctaatgcctttggctctttcgaagacactggaaaagaaacctggagggtgggggtcgggggttgggagatggagaaacttcactgttttttctcacagatctccagatctgtattcccagtgccatcttctcagtgaccgttgtcccgattgcttctgcagcacaacacagacacgggaggagctgaccacgcatgcagtatctgtgggaagtcgctgagctcggccagctccctggatcgtcacatgctggtgcactctggcgagaggccttacaagtgtacagtgtgtggccagtctttcaccaccaatgggaacatgcacaggtgggtgttgttccttgcttgggtggctgactgcaccattgagccattagtagacttgcctaaaagcttcagagggtttttgttgagtgtttgtttgtttgtttgttttttctatttcccatagagaaaaatctgagatgattgtattcacttactcgcaccatctcagggtatcagaggcattgcctaggctaaaccttggcccttgagttctttggggtggaacaatcttatttctttcccctgtgccactacgagttttcctttgttagagaggtagaggtgggcagctcgttacaacaaagcacccttaggacaaggcagcatcacagatacaacttttcagtgtaaacatgtccccatatgcctaccagatctgccacagatttttctttgcggagtggggaattctggagcctttgatagttaagtggcctggttctgaagctttagaaaggagataaagcagggtgtaagaacatctaataagtgacaggaggtgacttccgggaatgatgcgctctcaggagtgagacaggaaatagaggcaggtttacgccgagaagagaagccatgggatatgtgttatggaggtagcatgggtttcaatcagagcagaaacagcttttaaatgttctctcgctctctttcaaacacaaacgtcttaagaacattttggggatgaagaagagactcagattgtcacattctcatggtcagtgacacagcagaatccaggtctcctcaggtgtttgtaaatttctgaatccagtccacttagtcggtttaggatgaggattggaaagtatgaatttagcaaatagttcccagcccatggtaagcactcagtaaatagtacctactgttattgggtgtctaagtaaggctgcaatcatttaccactggcgaatctcttgtctaagcgtccagaagtgaggtatgcttcatgaaaggcctccgtatattataattttatttattttatgttatgtgtgtaggtatttacttgtgtagtacagacctcaatagtgtaaagtgtcctgctatacttccacctctgttgccattgggtatcaaagcacgacgaggacccttgcatgtgtttctaccttctggttgtttctcttcatagctaggaatgaaaccctagggactcggtccatcgctgagccccatgccagcactgtcactgtcaccttaacaactgtttcctgcaccctttctaggcttccttcttcaccctcagagttatttattatttagtagattccttaagattttctgttcccaagattatgggatttactgtagagatggctccgttcttctttccattctaggcgtcactaatttcctgggttatctcttgaggtgcaccaggagtatagttctaaatggaagtaaagtgtgtcgacattattgtcttgttctgatcataggaagaaagcattcaccttgaagccctacccctgctgcttgttgtgggtctgatatcttaaatgaaatttacctgctgaaggaagttcctaactattccacatctgctatggtttttatcagggacgttagattttgttaatgatctctgtgcttgttttctgtcgttgttttctgtcattcaatcctgtcctgtgctataggtcgaatgagcctcttggatacaagcatttctaatggtgacaggcttggttgactggtattttgataaatggttagggctgtgatcataatagatgccagtgtgtagttttcttacgctgtgtgcttttcatgtcagacttactatcagaaaatgaactgtggaacattcttttctcttttggaaaatactctggcaagttgatttttgttgttgctgatggtggtgggtactttggttgattggtttggtttggtttggtttttttataagttcattagtgaccacacctgagtttttctctttttttttttgcagtttttttttcagattagcagccaacctcttagatttcctattggctacattcttgaagaattctggccatttcatctcactagtcaaagtatttgccacacaggcttcccttttaatgattttaacttgtgaggtccaaaactttaataactacactgttttcattttttgttattgtttgtgcttttatttgttacttcatgtgttggtgagtgtgtgtacggcatgagttttatgtgtaccatgtttgtggaggccaggaggagtttggatccccgtgtaattgtagtcacaggccccgtgagccagtgtatggatgctgagaactggacctggagtcctgcaagggcagcaagctctctgaacccagagccatctctctagccctaattatgggatttactgtagagagggctttgttctagttctactgacgttttcctctttatttttttttctatttccacagtttgggcctaagcatcatttcacccttcctctcgctccaggctctcttcttcctttttcaggtgttgtcaagtatgggattagattgtagacttgaagatattttgaatacaggcagtaataactgcatttccatactttggggctggaggagtgaagaggggattcttgttgtctagaactgtgtagggcaggctggtcttgaactcacagagatctgactgtctctgcctaggattaaaggtgtgtgccaccatgtcaggtggatccataagttttgtatactatatttttttgccatttacctccatgtattttctaatttatctcatgatttcttctttaatgtattggttatttaggaatatgctgttttagcccacaaatatgtcttcccagatttctccctatgactgatttaaggtcataatgctacatttattttgtctttcctgccaaaacttgtaaatgctgggttaaaagaatatttgacttttgctaatcaatcacaaagtcattaccaccttcatttgttggcagagctgtattttgggggaaaaaatgtgaaaatattcacaaaaatgtgtcagagtggagttagatgtatttgcatgggtcgatctattccaggatctgagactttggtggtgagctgggacctctcgtaagcacagatccgagctacattgatcaggagccacaactgcgctgggatgtgtgagggatttagaacaggggtgataccgaggttcttatgataaacatggttagaggaaagcagtcaactgagaagctgtatttgagaccagagtgctgtcctgcatttctcctggaatggttttctgtatttcagttgctgttgtcattacatggacttagcagactgttccatgtagcattccgtttctccgaggaagagagagaaggatacagtgtcactgaggacactgccttcccctcctgctctgaaggctgtgtgtgtgatgtgcctccatgaatacattggccttgcaggtgaactctgacctcccggcagttgcctgtgagaggggtctaggctccattccagttttttttttttttttttttttttcctttttgctaacacctggggtgggggtgggaggttgacaaatctcacaacacaaactctaaggatccagagttcagggtattcttagcagctatccaggtgccttcaatggaatacttctctcttccttggtcactagctattttggaatgtgttggttaaccttgattttaaggctgctcagtcccttctctgtatgattgttacattagtaaaataaacacagtgagctagcatactaaatactaaactgttatgggtagtcacatcgacagttgcttcgcagcaaccatagagcctgtatttcttagactttgattacactgagtaaattgacatggtttgttttgtgtatggatgtgtgtgggtcagttactcattgactatccagtatgctgtccaggactctagggctcatgccatcttcctggcacctcccaggtactaatactacgtatgcataacaggacgcccaacatagtatgctatcttaaaactaaaggtagatagagtaaagaaattatgagaaagcttagggaaaagagggatttttttgttttgtttttttgtttgtttggttggttggttttttgagacagggtgtctgtgtatagccctggctgtcctggaactcactctgtagaccaggctggcctcgaactcagaaatccgcctgcctctgcctcccaagtgctgggattaaaggtgtgtgtcaccacgccagagggaaaagagtttttgaataaagtattatcatatgttgttcctatcctgtaagtgctcatgctgtttaggttggaaaatgtgtgtgtgtgtgtgtgtgtgtgtgtggtgcttatattcttatggatttttacataagctggtggaggcctgaaattgtctggtaccttcttcaggacctgacttgctctttaccttactttttgacacaggtctccaggaacctggagctcaccgatccaactaggctatctggcccagccagcgagctccagggacctgcctgtctcttcctcctcagtactggacctgccagtgtgcgctgccagactcggctctgtctgtggatgctggggatccaaactcagctcctattcttgtccagcaagcagttatcagctagatcttctccccagctccctagaactaccctattccaaacctatagcttggtttgtgaggagaataagagtctcccgtcaagtacggaaaataatttacagaaccctcactatggctccagcttctggctttcccaaatgctttatcagatgctctcatgttgaaaatttggattaaacagtgcatgccttccaaatcaaacttgggaaagcaagccagaacacaccctccaggtgaggcgaatgtaggggaaagggcatcaagctctggcacttgcaaaagctgttccagaagccctcagtggccgagccgtgaaggaatgggtgcctttagtggagcacttctctcctttggccactcgctgttttatgaaggtcttggttatcctagtttcaaaggctgctcactcagtcccttctctgtatgactgttatgttagtgaaatagacacagtgagctagcgtactaaactcttatgggtagtctcttgaaagaggagatggggacagaccttgtatgaaatgtctataaaatgactactttttttgaaagattgtaaaagtaaaaccctgcagaccataatcgcctttgcagagagggaaacccaattccattttgctcctcgtgtcccatactttaagctataaagaattgcatatattgattaggcttaaggagttgctggagcctgatgagtgctctcgaggcagccttcctatttactctgaaaaacagggatgtatcctcacttgacggtcatagaacggggaaaagggaaatcccagagcatcgcctacttgccatgaactgatgggatgtgcattgaccctgaggatgctgatggataggaacagaggcttatgtgttcccattatacttaaagaaaacctgagccccacagaaatgtgaccacgggagctctggattcagcatgcttctctcctatgcttgagcggagcctgccgatggctatctggaacaggggccagcactaatccagaaaaggagcagaggtgagccactgtctacagaggacaaccacttcttcactctccatccccaccaagaggaagagcctcatgaaattctcccacagtcatatcgagtttcttaggacaccctgtaacgaatcctgagacttgctgctctcaagtgtggaggaaaccatgcaaaggttcagccagtcccatctccaaattacctgttcactctgccaccatgttcctctgtgggaaggaaggtgtcaggcaagaaattagttccaggacaaaaacctgtgggtcattccaccaagaacagattgtaaagtcttgtttccctagaaatatcccctgcctgttcttgtttgtttgagatatggtttttcatggccacccaggctggccccaaacatcaaggctcttagttatccctccacctttccctcccaagtagctagaactaagtaagacacctgaccttgaccttgacatagttctaaagaagaaaaaaaaaaaaaaacatttcagaagtcatttacaatgaaggaacctattttgaggaaacaagatcagttaaaagggaattgcttcaggaactggacaccttaatacctttaattccacatagaagagggcacatcaatagttgggcacgtggtgtgcacctctaagcctagcagcggagtctaaatcagaggatctcagagatgcgtgcgcatcagcctaggctaaggagtgggaccctgtctcaacataaaacagacaaaaagagaacatacctgaatattctgttgctttatatgtagtgctttactgaggttcccaaggatttcctgtggggctttaattatgtatacacaacaatattagcagcactgaatatatgtaaatacataccatcacacacacatatgtgtgtgcggtgtgtgtatatgtattataatatatacacacacacacacacatataaaatgtgttgagtatttgagtgttagttttatggtgatagtattaagcgttgtcagcatatctaatattttatattcaagtaaacacacctctggtatagtttagagggcttttttaaagatggaaacttctaaccaggggagaaaaaatcaaacaaaaatatttgtgcattctagtccttgcttcttccccttaatatgctttgtgtcctattgagagtccatgtgactctgtggcctgttgctttccctggacagtgacatttatgaatgtgttcaccatagaagaatgtctttaagttatcaatttctccctaattatattattaaactttcaacagagagctttcttattaggttgtatataaaactttcctgtttgatcctatttaaaccttttcctcctttgctgacatctctgtgacggaccatgtctgagactcgagggctttcataaacgtggcatttggtggactgactacttacttctgtagcctctcatcaggcttccttccattcctttctgttcgaggggctccatggtctggatagttagcctactgcttaagaacttgtccccatattcttcctcttaagtatttagtccagcagcctcttctgcatgccggatcagctcacggttttgcgaaaagaagaaaccgacctgtgccttttaaaatggggtatattctaagagcctaagtgtagagtggtgttttgctgggaagctaagtgctagctgcctaagtctccatcttagatcatgcaaatccccattgccatctcaaggcatctttctgcctcttctgaaatgtgtttatgtttagtgtggggtgtggatctgcactgagctcttacatgatattctctggctcctttcagcgcttgcacttggtagttcagaattctgcaagttgttgaacactactattattctccgaaaaagagtaggcgagagtggcctattgcttgattttaatattcaaataagatcaaatgcaggagaatgcatcaaagcagatgctagctcgtgtcaattgagtctcttgagtaggagtttagagattgtgttttctcttttagtgtggtttttccctctctattatacttttaaaggttcactacagtttcattttcaagagaataatttaaaagtgtacttgtgcctggtgcttattttttatttctttctaaaagaccagtttgagttcagtgagttggaagggaaggaaagatctcataaaactgtccgtgcacggggtgttaaatagcagtccggcctcttctcctagtgccgcttctcaaattcatgatttggttcgtgatcctttatcacttggctggctggatgctaatatttttaacaacctttcttctcttctggcagtgggaacgtttatctattcatcttcttttggagatgaaataaataccaaagttttctctgagatgcaggcagtgtgatgtttttgacatattttgttaaaatatttcaaaagcttaatcatactgggtgaaactagtggaaggcatcaaaacccagagcatcatgcttgcccacacttgaacagcccagtggttatgagagctgagaactaggtcacagcaaagaagggataggtgtgttgggagcaggatgagaaatggagagtctagcatcatctcttctactgggtcattggcccagacatgggtgtgtgtcctgtccagtgttataacaggaaattagcaacgtgaagtaggattctgatttccagctctagatcacagatcgagacccgcaagtgtgccggctgcacttccctgggctttctgcctcactgttttctacctttgtgtaaatatccagcctgtccgaccagtttgggctgcacaagctggtgctagcaaacactgaagcgtgcccactcggcagccagcctttctctgacttgttaaggaaggcaacgtctgttcccctcacccccttcaatgaggaaatgagctagcagcaaggaaacctttgcctgtgtgtgtggcacggaatcaccatctctcctttggtgcccatgtgccccccttgaactgttctttactgctctgagggtttggggtcctgcacagtgagggtattggtctttggggagattttctattttcctctggccagattctgtttcataacgggctcagagggagtcagcagtacattcttaggttccgggtttatgtaacccagcctcactctgggggagctgcagccagctctacaggtgagaaaactgagggccaagattagaacctgctcttccaaggccccctccctgccccgctggccgaattagaacagcgaggctcttccctcaaagcacttgattgtgtcatctgtggaaagcacaggccatctgtgctgcacacctgccccatttaagataaaaggcagccgtgagtgctgcagtcatggagaaggagctctggtggtttggttgggtgatgagtctctcagctcatttgtcttcttcctccaggtccagattcctcctacttcctctgatgtttctcatggtcctgaacggtacaaggtgtccccagatggtggagacctctctactaacattgtcttcccctccacccacaatagtgctctctgctttttcctttgggcatgaggtgaccatcttgaaaggcccaacctaagtgtttcttgttcctcttctggaagggctagggagtggcaagcattgattcatcattggcttactatgaagatggttatcttttcctcccccacaaaaggaagatgagtgaatgaggaggttctgacatctttcagaaacctaagaagaacctcctgccaggctgaggtgacaaatggtctcagtgacttgagcattccattctaccatgaaacgtaggtttgggcttggtttgacactgttattttagcccttgctgcagacagtctttctctgtggtgaagctggcagtgaattcccacagaggtaatggctctgagccagtgaggccactttgagagtagtgacttcatttggggccccatcacctgagtctcattttcaagtcaagactgcctataggtgtgtactttggactgcaggctacagggagaagttaaggaaaatggggcagtttagcttatcgaagaaactgcctgaagtagagactgttgggtggaatttgatgaataatattgcttgactagtaaaaagagcctctggtgtctttgtttctcaagaataagttatttttgtttgtgggtttttttttttcttttttttagacagggtttacctcccaggctggccttaaactcctggcctcagcatccctggtagctagaacaaaaggcgttgacctcaactggacaagtgtgcagaaagaatgtatacaaaaggtagtaactgagaagttactttaggggaaaagtataggcaataggggattaagtagtatatggagtcaaaggtctagctgttagaaccctgtctagagtgaagattgacatgtcctgattatgagtcaggacagcaaggagagctacctgttgcagccactcagtgcagggtgagggagctgtactttctaaggcaacagatgacagccagaggatgccatccacctctctatgaaagccactgcaggaaggggaaggagaagaatgtaagagccaaagtcatttgtgtccccaaaggataactggaacttggaggaaaaaaaaatacctctcaagtattggaatcgcagctcatttcttcagtgaggaagttttgttttggggtcttacacagagccaagaaagaaaagaaattgtcgctcagtggatagatgaggatagaatgccttttctaatctcttgaagaaacatgacacaggagaccagaaattagtggtccagcctgctgggatgaaactctgaatttaggatgagagattggccctgagctgacgatgtagttcctggaaatatatattaataaggaatgtgaaagcagtgcatgcctactttgaagtaagattctccatcctaaataaagttgatctttccttctatactggcaccatcagagtaccctcgactttggggtcatgttacctgagtattgtggggaaagtgagtctcaggaaagtagcctgcgatcatggaagatgtggtctctgcaggggatgtcggaatgaatacatttcaatcttaggactaagggtcagtttcaccttgttatagcctccacggggccacacagtcctatgaaaggacttggacttacctggtgggtaggtttactatgtgcagggcattttacccaagcaccagagatgccctgggagcagccagccaagacattcccacagagagcctgcagacagaaagaaggtttttgcctcatgccctgctgactcctagacgtttctgagaatgctgctgttgggtcagtcagcaaggcggcttacacatcatcagatcttcctccacaccctgacatggctgatgtgacctgcctctggacaagcatgactgaacatgaacaacaccttctagtaaggcggcagcattgccgtaacgggtggggcaccctgagaccgtcttgccattcctcttccagctgtcttctcctctgtcttcatgctccagccccctcttccgcgcacagaacttgactgactgacatcgcaagcatcactcgcagcattcctccctaaactccttccctaggcatttgttacaaaagcaaacacaagtctttgtagaggcatgctcttctacagtcagaaatgcaggctctagctgagatgctccttagctctagtcaccccttcttggcttatcacaacaaggtgctgtgcggagggcaagaaaagctagcaccgggtagatggcgtatctatcaccagattgccagaaacctgtttgaaccagttaacttgagtagtgaagaggtgactctagaggtctgtgtagtgatggggtgacctttcttgtaatgtcatttgttcagagtatcaaatgcttcagcccctccactaatacacctatgaggaaattaagtcttgaaagctaacaaacactggaaatatctagctctctcttgagcactatccttctgatgtaaattagatatgggaggcttaatgaacgccacttaactgggtgtgtgtgtatgtgatgggggtggggggtgggggctgggacagagaaagaatgggttctttcctgtgagttcccagatcaaactcaggctgttatccttttaaaacacgtcttcccatcatgtgtctaccagaacataggcaaagacagcagaacctctagaagctcgcaggttagcaggtcaggcagatacagcagtgagcaagaagagatcttgctttgaatgccggggaaggtgaggaccgattttcaaggtcctcctctgactatgacgcgtgttgtcacgcctgcgcctccacactctcgtggactcacacattctcaaccagaacaagtctgtgcagttagggtcatggatgtatgtgtatttaaaattcctatctgtgatactcagctcaaaaagatgattatcagttttctcgtcaactagcactgtattataagaccatcatttttgtcaatcaagaaaatgaaaaactatcagtgacgttgctcaagggaagagcagagaaggcttgttatgaagctgattgaaggactctggagtaccttagttcacaacacactgggaatgagtgtgttagctgagcactggctcagcagaaacaaatccgcctactttcctgtcatcttcactgggccatgtgtggcggtcacgtgctctgccctcttaagaacgtgtttgtttaaatgtgtgtttgctgagtccagtgtgggatggttgttgcttagcacacattcttgagatcagctagggacctatatgatttctcagacttgtgtgcagtatttggtgggctacagtgttttagttatggagagagagcttggaaaaatggcgtgctataatcctcctgtgctgtttgaagagctgtcctgtgggaaatagtgtaaaccgtcactgtgttgcctctgaggacaaacggccacttaaagcaaaggaggaacctcacagtggtgtggtggggacagagctttccactgagaacagcaggtgaagttagctttccttgtggctgggagcacacgggtgaaactgggggatgcacactgtgatccccttagctggagagagacttcatatgctgcgtgtgcagctgtggaatgtatcagtgggcttcagcctcactggccttcactggtttgagggacatggacgttagataaaatcaaggaagaggacagactctggccttttaaggacagggaataagagttttgtcttccccacccctccttgctgccatgccaagctgataggaaaaggccattactggctcattggattggcccatccatgtcctatgaacctttggaaggatgtgtataggtggagttgtcattcctgtctctggaggctagggaaggaggttgggtgagacttttctaaagctctttggctagtaactgacatgaaatctccagtcctcctgccactattgtcaatgtggggctagcaggacagattgggagctctgccatcctgtggccggcaaccagaggtctcaccctagatggaaagtgtaatcgcattttgaatccagcgtcccagcaggacttcgagagtaggatgaactgctttgtctgtccaccctttatgtgccccagagcgccagctctgacctgccacccctgcctgctctttgcccttagcactcctgcagttacaggcgtgagaccagtgagaaggttctgcagtccttcattgagactgaacatcgggagtattctgtgcatgaggcccctccccgtcctccctgtctcctgttggaatttgccacctgttggatatctgctattctgcattgcaccacaggaacccgataaggaagtgcctggggtcaggttacggtcctgagtttccagcaggggaactcactgcctcatgtggcctttagaagctgtcttgcttagtaggaagaccatgaagtcctgttggttcgactgtagctcattctgactgggaagccatggctcatctgcaccagaactgttccatctgtagaatggacacagtcagttaaaaatagcgttctcatgaagtcactagatgctggttccagaccctccttcttgtctgctgtgaaaacagtttctgtcatgaagcccaagagcaaaataatacaacattgcctgcatttccgtgtgttctgtttcaggactggcaatatacagcctaaaatgctccagtgcttacagccatctttctcaaattaatttctagtacttttaccattgttgggtataagatcagactgatatcccttacaaataagtttttcaaatgctagtttgtttttttaccccaaacttaacatctcttaaattgaggtgaatcatgcaacaaacatcaaaaaggaatatatctatttgcccttcttacctataaatgttgatattaaaaagagatggtttagccaggcataatggtccaaaaacccagtgtagtgtgcatctctgattttgaggctaacctgttctacatgattaagtctgggccagccatagccacagaagtgtgacccccgtctcaaaagcaacaaaaggggaagatagtctcttagaatcgcaatcagtgcagcacttagaacagagctattcttttcgctttcttgtggtttaaggcagccaaggactgataaagcttccttccttagaatctaagcaagggattatggggccatggcctggttgtaattctttgcctatttcctcccactaggtgatttagatctttctgccccatcacaccaattcctacaaaaagaatagaattttagcttgagccctcttttcccaaggcctctgctctctgacctctctctctgacatctccccctgccccccactcctggcagcctttcagcagatgtctatggtagctatagtctagacaggacgttctaattctagagcataagtatgaggcgaaaagagtgatccctgacactctgcagcatccctcggccacagccttgtaggaaaggggtctgagtgtaaggaaaggaagcgtgtcctctccacctcacatctttggcttgttcaccctctatatgtgtcctgccactgagtcacaagacagcctccgagaagcatgagctaagctgcttttcagagtgagggggacagaacatgagaactgctcccctccccacactcatattcttatgaacttcttggaactgggcctaatggtgccagcatgtaatcccagctaactttggagactgaagcagaaggatcacaaattcaagggctgtgtggactgtgtgaaagaacagctggagacagggagaccctgtctcaaaaaaaaaagaaaatattattgaacagatgtggataaaggtccactgtagagcacttgctgtcatgtgcgagctcctaccttcaactcgagctccatgaaaatgaactatggggacaactgcttgtcgtctgggtagttctcggtggtagagagttcctacctagtacccacaaaagcccggttctctcttcagccctggtagccaggatgaggaaggatttggacatctcaagtaaaatcatcctttaacataattatttgtgaaaacctacgtctgtattcctacattctgcacagtttggactctatcctgatagtagtggtggtggtcattagcatagtgaaacccttttaatttgtctatatgtcttaggacctttcctgagagtgttgctttaaaacttgataaagtaaagccatatacataggtcgtcacccatcaggtaccctttcagaactgactcatacatactacttatagtgcttcttgtgtgtaccctagttctgtagataacaagagttacaacatataatgcactcgttgaattgtctggatggtttcatggtctgttattaatccacattggtcttaagcactctggtcatgtgatctgtctgtcagtatacttccagtttgacaaccccagatgcttccacaggcagggagaaaatgacaatacaaccgttagctggaaggtagttcctgggggctagttcagaactgaggcttggtatatgatctaatgcaatgatttaagaatgcgggggttcttctaatatatatttgcatgactaaagtaagttttttattcaagtacatcggattgcctgatagtttgtttctatcttattaatgccagtcaagtttgtgaatgttttctaacacaaagcaggacatcaatgggctgtgcttgcaagagcttgaaagaattcaaggagatgctaaagttttaccaagaccaaaggcactatagaaatgatgctcttaactagcaaagtgttggagtgtggtggtgttcagggattcaaggtagtgggctccacccccacacttgagaaggatagtgatgactgatgggaacattcgggtaaccctgtctgtgtgtaatatattgagggaaaataaaaaagactggggtttgtgttgtcattgccagatcacattttctgtgtgtgtcttccttctagacatatgaagattcatgagaaggataccaacagtactacagctgcagcccctccatcccctctgaagcgcaggcggttgtcctccaaaaggaagctgagtcacgatgccgagtcagaagacccaggaccagctaaaaaggtcctctgagtttatgacacagacatgctccattgtgtggcgcttggcagaaatgcctctagcctttattatcacagtgtgggacttggaagagatcaatccgggaccttttgacctggatggaggggtgggtggaggggtcggtgaatggatggatgagtggatgagtgggtagtcagaccttggtactgagtgaaaaccatactttttagcacttcctagactaacgttaggcttccttctaaagcaacctgtgtgggagcccccttggtgatgccagtctctgctttttcctaagatggtagaagacgggcagtcaggcgatttggacaagatgagcgatgaaatctttcactgcccagtgtgtttcaaggagtttgtttgcaagtatgaactggagacccacatggagacccactcagataacccactaaggtaggggaatgtgaacagaacctgtggtctgggaaattactgtctcatatcccatatgtcactccatcatgggctccagcaactgagttagttcacaaggacattggttggtaaggcacttaggaaacacgtggtttggaacaaaggtgagatggtaagcaaggatggctgttcactttactcccttgttcttcctggggtcccttgagtagtcactgtgtctccaagcattggcgatcgcctgtcacagggtatgtcgtatatcagacatatttcctttgcagaaggttttggccgcccaaatgattgcttgctatacacggataagtggtgtatatgaagacagtgcatgcatttcatgttcgcaacacagcactgacatgtatgtactaagtgcttaaactgaattagatgtacagtgccgaaacctgaagcactgtaggtgagagttgctggcatgcaaacgggaaagctggctacacagtgtgagttctcagtgcttgctctgcttctttggcctctgttggtccttaacaaccctaatctgatcctcagcttcaaggcgctgaaagtgtgcatggtggtacgattttttttcctagccgtggtagagagaggaacactcctctgtctttgtctaacttctcttgtaactcaccagtattcttggtgtacaaatggagttagaaaatttccctacagaattgctgcagtttatatgttccgtctattttcagcattataaaggacagagggccacatgggaccctcagctcaagcatgtagctgaaggttcatctagctacagaggacatcttgggagtacaggatatgggtgtctgtttgcctgaattcccttctgttagttttatgacagggtttcactggaatgggaggaagaacttttgtagaggttaaagtgtcaagccctgaggatgctataaagcacctggatgaaactttccaggctgggctggccagtgtcccatgggattccacctccactctctgtgaggggaaaaagggcccaatccagagagatgccaggaatgttctaactgtcctaccccaagcccgcctctactcccatgtagctcccatcagctgcatctgtatctctggtttcccagttctcgttgacatagaataaggtcactaatgcctgtattctctcccactcttctccaattctaaaatatttcttttaacttttatctactacgaaatcgctcttcctcttgtcaccgaccactgattctgagaaactcagaaatcatttgttttgttgagatgagatacctcagctgtcctggaactcactatgtcgactaggctggccctgaatacacagaaatctgccccctttgctcctagagtacctaggattaaaggcatgcaccaccatgcctggccaagaacctagcttcatactctcatccgcacagcatcctcgagtgtggagccatggtgaacagtgagcagtaagtgacgtaagcctctcactgtgtggcgagggattagaacagcacagaggaccttgattcctccagccacgcagccattaatttaatgcccccgtgtctgttttacctcacttcatattttattttgtgatcagattttattgttggaccaacctgcttttgcttttcctggtaatcccatcatataggaaagtaacctggctcttgtgagtgatttctaggcaacctgagtctgtgtggtgaggagggaagactgggtgtctctttactgagttggaaatccttctcgtgcagagaaaatgggggtgggaatcccattagacatgggtccatcatgagcagagctatcttggccatggtgtacatggctttgaagttgaacctttgctgtcctgtcctgttaaccaagtaggtttcctcacctacttgatgatgacaccatttggggaggggttggctgaagaggttgcttagcaccagatggacttagtccttttaggcagtattcattccaccaaccccacagcagcttgccatggatggctcctaagaagcggtggcttgatggcttgtgtgcccagagaacagaccagctccagcttcgtggctttatctagtaactcttatgaggccagatggggctgacttttaaaaagcgaaaggagttgattatagaacatagttaattccccttttctcctctctgctcagcttccacataataacctactaccagaggaagccttggggccaggcatgggccagtaggggcctagcccgggtggtacattgtgacagtagctgatgggagagactgcttgttaacccagaactaaaatagacaccaactccattttcaaatcccagaggcgcagagccacagtgggatgctaccagtttagaaccagagtccgtaacttaaaacagctgttggtttctttcctctgccctcgtcccactccctcccctccgacccaagttggcgaggtgcccgtgttccttaagaaagtgttggcaatccaaagtagtatatatgctgagtcttttctcctgcactctgccgagtttcaaaatcgtgaaattctggcattgaacaaaaggaagacacagcaccaccgctgccactggtagattcctgttcttaagatcgggtattgcttaccaccccttctggccagctcctgggtgaggggtgatagggcagagaagagagccgaatagagacatccctggcagtgagtggccttcagagatgaaggtaggggacagtgcacagggcaagtgtgcagggagggaagagcggcaggcgctgaatgtcttgctttgttgttggggcagaacactgtgacagacagactgcaccactgggaacaaagtgaggtggagcaatgtgcaggccgctgatgttcagcagaacggcgtgactcatgtgtcgctcgacgtctacttgcacattttaaagtgaaaagtggattagtagtgtcatcttaagggtgggacacacagatgctcagtgtctgtgaggcctaggattcaatctgcacctccccaaggaaaaagtaaactaagtgctgattaaattcatttaagtcaaaatagaatgtataacattctatacttacaatcagcatacaattattagtggtacatttttactttctcgctatcttatgtttagtaattgaaatctatgcttattgaacagtcataccccgtcttaatggaaaccagtcccacaccaggtacctatcagcccacagagcaggttaaaagacaagccagaaggcagtgaagccttccccaagactgagctgtgtagctggatagtcactgtgttgatgaaggagctgccaaaagcaaacttgctccaagttattgtataatcttaggtggttccttgattaaaggagattgggtaataagtaattttaacatcattttagttaaaatatatccaacaaataatggaggcctcattgtgacaatgtgaggcatttgaccagtcttgactaaaacaggaatgtctgaggtgggacccagggactggttagaaaaaaaggaggcaagttcagagccaagaaagaaagactcagtaactaagagctttggatctgacattggatattgtggcactctttgttccttctacgttatggccatcattatggtcacagcattgatctttaaattaccccaagtttaaggcagtgtccttgggttagtcaggaaataggctatgggaagctagcagggtctttggcaggcacccagggctctgaagggacaccagagcttgttgcaggcccgccagtcccttactgtgcatcctggcaatggggccattgggtgagacatcccaggacgttcttgtctctgtttcttgggtattctgaggaacattcagctcccttcactgctcgccaacacctgctgagagacgctgagactcttagtgtgtcagcgaccccatctattctcaaaacactaaacaccaagcaaaggtgaatagaatactggaatctttattaagactccaggggtccaaggatcagcccagtgggagctgggagtggaggacagagacttggagggggaggtacctccctagcccggcaattggaggtgtctcagtcggactttcacagcctcctcaccacccaagggcaggagcaaggaccagtttcacctggctttaggggcttctcttcctgtcccctatgagccccttagatactccctgcttcacgacatgctggcttaactgaacagacctagtgaggtgcctgtctgtgctggacagcctgggtatgttcctaggatgtggcaaggggaagctacccagccaggcctctgtcacaagccagcattgctgctcacaacaactgggagagattactgcagctgtgggtgtcagttctctccacaggatgggcctgggagggtaggctgagggaagagggatgtctgggtgaggtggggctctcttagagagggattgtttgcacttagtcctttcggtctctggagacaaagcaagaaaaatgaagcatgaaatccccctttaaaaagaatgccatcaaaactctgtaacaagcacagaattaggcgtctcagggaatccggctgggtcccccttccagcagggagtcataggttctgctcactgcatttgcagggaacacggagttgtcaggatcaggaaaagtgcccaggcattgaggatgtgacctgggccaacaaggagcctagacacatctgtaaatgacaatcctctgagcaaacggggttacagacagcactgtcccagcactgcctggcacctctgtgacctcaggcaagtggaggctcggtttccccatctggaaaatagatttggcgacttgtgagtatgaagagagtgatcttaggcctgaaactataacgaatactgagttttttgttctgatactgttacttaggatgtctttttgtttgtttgtttgtttgtttactgtggaggtgagggcaatgtgctttcatgtttgaaaattgttgtcacacccagcttttatgtaggtgctggagggggttcatcatacattactgaaccgtctccctagcccaccgtgtcttcctagcatctcaagtcctccaacagaacagttaacattttgccgtggtctttcttggctatcccattccagtgacaccgaggagtcaaattccagaacaacctctcccaagtactatgtacttgacagagcatgaaagcatttgtcctttgctctctattgtcatagagagccatttttatcttgcgttgcctttgtaaagtttaggacattaaagagctatttaaatggagtctgaggcctgcgttctgagtgccgtcacctttacagactatgccaaacaggcaggattagcagcttggagggcctggatgcctacaaataagagaacgacacttcttttggtaggatgttggagaaatctacaattgtaaaaaagttccttaattttgatatttcccctgtagtcttttgaaaatatattttgggtcgttatttttttaaagttagctcgttaggcttaagaggagggagagcatctgtctatccctccactccgccagcttccctttgtttgtttattgaggcaggttcttcctatttcaccctgcctatcatagaacttgctatacagaccaaacttattatacaggcctagagctttctcctgcctctgcctcgggagttatagggttaaaagcatggactactatgcccaagttgcttgttttttgttttttcaggatttattttattcatggttatgtgtatgtacatgtgtgtgtgtacctacagcgagtaaaggtgttggctccctggaactagacttagctgcctggatgggttctgatcattgaacttagttcctctatacgaagagtaccacctcctatccattgaggcatctctgcggccctctgttttcttggagggaggtggtgtttgtttggggtgtcactgttttgttttgagacaggctcttgctctatagcccatactggtgtcaagttccccagagtcttcttgctacagcctcctgaatgctgctattccgggcacacagactagcacccagttcccactgccccagaagcgtgcttgctgggactgcacaagaggccttgggggacatctgagtgcctgcctctttaggttacttttttgaaacactcctgctgacttcaggatttttatctttagaacattacggtcaccagacaaataaataatactgctgtagcagatgctgaaggagcacatcccagtgccactcagctacgaagctgacagagaagacacctgtcctttttatttttattttttaactactttggactggatcattgggtccctgtaatggatggacatgcacaccataatgcacaccatgataccactccatttccacctttgcctcggtgttttcttgtttgtttgtttgttttttccgagacaaggtctctgtgtagcaatgttttcttttaaaaaaaagaaaaaagtaaatgaaagaaagatgccttttaacagggatgcttgccatccaagggatagatatctcagttcccttcctagttaggcacgtggcatgcagcagttagcaatttcctttcaggtggcttggcttctaacttggtctgcagctgcagcccgctttgagctcttggtcctcctgccctcacccctgcctataaggtcttggggttgcaagtgtgtagcaccatactcagttttgatgctttttgaatctttgactggatttgagtatgaactccagcactgcttgttgcactaagatgtcttttaagagctggaagggcaaaacctcagctcgtgttcccttgactcggtggatctgggtggcccactcctttccgaagtgagcgggttgcgtgctagttgtcagggtcttctcttctgtggcttgctggtttgaggctgcagtggagatgagttcctgtggagccagacacattagcaataacatctctccaacctggcaaaagtcacagctgggatgcgatggcacgtgcaagaaaagggatggcgagtatgcaaataggggttcagaattttttttttctatgactgggaattgagcccaggactttacacatggcaaacaactgctttatactcagctatgctcccagcttatggaactagtgctcactgtaacagtgtgtccccgtgaccttgacaactgaaaaacacttctctaagcacacattgtgggttgtctgtgaccatggttttccagcaccccattcaacctctatgacttcacatactcacagctacagtcagaactttgctcatttatcctgcctgctgctagggggagcttgcagtcagtctatggaaccccccctccagctcctccagacctcccctgtctgtgcttcacacctacccagtaccagggtgacaatgacactacaagtggtactaagggaggctaggagagaagagataagctgcctcccaccattaagaacttctgttagagccccgcctctcctttccactaaggtaggaccccagattcagagactggggaggatgctgggctctgccctaacatgccaaattcaaaaatctcaccgtcttaactataccgtaggctaatgtggtgctgctcattccagtgctttctaagtgagtcagtaccatgttctgccttggggtacaataggctacttctttaaccaccatgctttgacagtcagtatagtgaggacgcctatagagactgaggtcaggcaaatgtctgtctctgtgttcatcgatgtgttccatgtgtctccttaaactgttagcagtttttccacgaaatccccttcccccaacccggtgggaataacctatttcaatgtgattttgaaaaggcagttctgtttttggaaggaagtgtgagttcgtatagtttccttgagtttcacaagaaagattcactttccccaaatacatttattttattgacagcaatgttggtttccaacatagggccttttctgttgccaggaaatcagaagacagccagtctggtgtgtaacagttctctctggcaggtcatcaggatctgttacaaaatgaaaacccttcagctccccctctgtgctgtgactcttgagtgtgtctgcgtcttctcagaattttgcaatcattctcctggtagggctgagatgtccccacaaacccggttgaggatgacagagtcctggggaccacccagccaatggctgtaaccttaatgaagagtgaccaactggagccaggtctatgggtaccctgagaatagctcctggtgcaggctctgcctgctgccacagactccacagttacagcgacctcccttgtccttcaagcacttggaaacaaggttgcaaagccctcatccctgataaagggccgacttactgatggttctcctcctcagctttattttatttaaggtctatccacaggtgcagagtgtgaggcaaagcagccggagattctgagagcatccctttacccagcctcacaatgcatgcatggtttcaaggcagataaggctttcagctccagtttatttatttaggagggtgtgttttgtttaggtggctggagctttggtttattgggagtatcgcatttgtggaatacagtgggggtttgtttatttggagggttacgtttgggggctgtgtggaggatgggtttgtttgtttgtttgttttttaatctgccatgtcaagctacttgctagctatgctaaaccagtgattctcagccttcctaatgctgcgaccctttaatgcagttcctcatgctgtggtgacttccaaccatacaattatcttgttgtaacttgggaattgtaatgtaaatatctgatttgcaggatagctgatatttgattcccaaaggggtcctcaggtccctcaggttgagaactgctgctctaaacattttcagacggtgcctgttgtctcagcaacttggtgtctcagggatccttttaaaacaaacagccaggtgtggtggcacatgcctttaatcccagcactcaggaagcagaagcaggcggatttctgagttccaggacagccagagctatacagagaaaccctgtctcgaaaaaccaaaaacaaacaaacaaatccagtacttagaagacagaggaagtggatccctgcaagtttgagagcagaatgatctacagagagacttctaagccacccaagatgacatacttgggactcttaagaaagagaaagatctgtaaaatgaaagagtggtgttagtgacaggcaagtggcagtgcctacaggagacaccagcgagaggtctcctgctacctgccattgatcttacctttcaggaaaggtcttcttcgtcccttaacttagctctggtttctagagacagcagccgtgggacagtctgagccctgggtttaatacttccctccattcccaaaccctccccacccttccagaagttctcatcgtctcatacgtgtgcaggcagaaaaaaacatgaaagggagccccttcttattacatgtcccaaacccaaagaggttagcttctgtcagctgagaccccactgcacactcaacggtggctggagaccttcattgttgaaacttgaagtgataaaatatcacctcggtagttgaggtaaaggacatttcacccattcttatacatgtgttaaggaacatttagcatatgcagaaaacttaacatcaatttcttaatatctagtcagaggtcagtttatgtaattctgatatttctcatctttttaaaccagaatattgtaaggaggtgggctggtaaccatgttctattaacttgaacgtagaaagtctaaaagcaagagtcctgtctccagacagaggcctgatctcctcagcctcagaggtcagcatcacgagtgtgctctcagacctcaaacctgttccagccaaaaatagaccctggccgaaagtgccagcatctgtgccactgtcccatttaacctgtgcctcagccttctttgtattctgacaagggagggatcctgtagtataaagtctccccaaggatatgccccactcacaaggtgggagctacaccaggggaaggttgtctgagcccaacttctgtaagaactgttggaagctcagtagactcccctcaaaaaagagcctcgtgtctccagtggccaatgggaacctggtcgtctaaatcttgtttaggggatgtttccagattaacagaggagaggcaggagggcattgtgcctctgctgctagggagtgatgaccaaggctgcacaggccgcttcagccccagctcagttgcaacatgagtgattttcattgtcattctttccagaaaagaacgagcaacaaagtttctattagtgagtatgtagtgtaaaggggagcaagttgctttgctctgtagaaacagtggcaacacgcccctcctcttgagggttcatcccagtgagatgtagtaacacaagtaaatggaactctgtcatcatctaagtatgcacacccgccctgcctcacaccagtgagatctgtgaatgagggattgtgaggaggagccccagtgactgtagtgagttcggcctgggggatgcttccaataccattgccgcagcattgacttcactctcagtgaagaccatggtgcccaccacctgttggccttcatccacttcccacgaggggctttgcatttgtgtgagctcagtgtgtgcttatttttcaggtaatagtggtagtgaaacaagaatttaacatagtttctaccaataaactataatcagtttatctctgttaaataccaggagtgctgtgtggtttgactactgccatctaggcatgtggtgtttgtttctgaaacggggttttgcctttgtatctctcaagtgccatgtgccactgtgcccagcaacatgggcatcttgtgtcttgttgcatttctttccttggtggtgnnnnnnnnnnnnnnnnnnnnnnnngaggaggaggaggaggaggaggaggaggaggagaaacttggagacaggctcctgctatggcaacttccaggatcccagctgctttctctttgtgcacaaactttagatgatggtatcatgcatacatctgtaccacctgcaaagattcggtatccagaattattagaatttatcctaaaaaaaaaaaaatcaaaagggacccaggcatggtgctgcccgcctttagtcccagcaccggggaggcagggttaggggaatctgagttcagagccagcctggtcagtacattcaagaacagccagggctgttacacagagaagtcttgtttttaaaaaccaagcggagagtggagcacactggtaacgtgacttctttatgccttatttttattttattcagctaaaatgaagcaataaagctaacagaccattggagacgctgagccgtctcctcatggttgttactctcttctcctagatgtgacatttgctgcgtcaccttccgcacacatcgaggactgctgcgccacaatgcacttgtccacaagcagcttcccagagatgccatgggaagaccttttatccagaacaacccttcgattcctgctggcttccatgatttagggtttactgacttctcctgtaggaagtttcctcgaatctctcaggtatggtgctagacctagtcagccaggatgggagttggggtgttgtttttgtataataccatttcactaaaattcagcctggctcttgggtttcttgggctaaggagttgatggtcttttattttagttgagttttcatgtgaatctacctcatcaggaccttttgcccatacttcacgctttgagattgaaagttgagtacttactactcctgtcactactaccctgttataatatttagtacatagatcacaactaggtatttgtagcagtttctgttaaaatggtttggatttttttcaaatccaagtgtgtgtgtgtggggggggggggggatggatgattgtgaaggccagaaaagggcattggatccctagagctgaagttgtaaagtggttgtggtcagatataggtgctggaaaccacacttaggctctcctaactactgacctgtgtctgcagctccttggacctttacgaatttgaacaactaatgcactgattagttccctgcctatgcaaaaactaccagaactactttttagtattctcaggtgtaaatttgagataggaagtatccacatataagttcttgacataaataagtctcaagtgcagtggacttgatacatctgtacatgcacagctgtcccaggagattgatccctcctcccccagtcatggaagcagccattttgtgaagaaggcatcctagtttgtcctcttagcttgtttggtactgcttgagctggcaatcctcctgcctcagtctgctgggtgctggcttgtgctgtgtcccccagtgtcagcactcccccatttccaaaggcttacttcaaattccatcatgatgttatttcactctgcttgtgtctatcctagagggtgtccttgagcaaacaagcaggtttctttcaggtgtgcccaacctttgacactgctagctactgagctcacccttgtgaactgtgcagttgagtgacaggagaaaagtatctcttcatagtttaagccactttacagtttggtgttggagtacatccatggctgtccttagcctgctgtaggccagggccgccctccctcgcttttcccgaattcagtctcagatctgcactccgaaaagttgactctgtgttaatggaagcggctgctgctaacagcaggcacctctcacatctccttcacggtcgtgtttcaatcctcacctttcttcccttgcttttgcttgtgggtcccacttaggcctggtgtgagacaaacctacggcggtgcatcagcgagcagcaccggtttgtgtgtgacacctgcgacaaggcgttccccatgctgtcgtcactcatcctgcacaggcagagccacatccctgccgatcagggacgggagaagctccagaccaagaccctggctgccgagtccttggaacagaaggccttcctggccttgctgggcctgcagcacaccaaagacgtcaagcctgccccggcggaggagctcctgccggacgacaaccaagcaatacagctccagacacttaagtaccagctacctcaggagcctggctgccccaccgtgctgagtgtgtctcctcttgacgctgcttctttaggtggctctctgacagtcctcccagctaccaaggagaatatgaagcatctgtccctgcagcccttccagaagggcttcatcatccagccagacagtagcattgtggttaagcctatttcaggagagtcggccattgagctggcagatatccaacagattctaaagatggcagcttccgctcctccgcagatcagtcttccgccactttccaaggcccctgccaccccgctgcaggcgattttcaagcacatgcctcctttgaagccaaagcccttggtcacaccccggacagtggtagccgcctccacgcccccacctctcatcaacgcccagcaggcatctcccggttgtatcagccccagccttcctccacagtccctgaagttcctcaaggggtcggtggaggcagtgtccaatgttcatctgcttcagtccaagtctgggatccagccaagcaccaccacacagctcttcctgcagcaagctggagtggagttgccgggccagcccgagatgaagacacagctggaacaagagagtatcattgaggccctgctgcccctcaacatggaggcgaagatcaagcaggagataacagaaggtgacctcaaggccatcatgacaggccccagtggcaagaagacccccgccatgcgcaaggtgctctacccctgccgcttttgcaaccaggtgtttgctttctctggagtcctgcgagcccacgttcgctcccacctgggcatctcaccctaccaatgcaacatctgtgactatattgctgcagacaaagccgccctgatccgtcacatccgcacacacagcggggaacggccttacatctgcaagatctgccactacccattcacggtcaaagccaactgtgagcggcacctgcgcaagaagcacctcaaggccaccaggaaggacattgagaagaacatagagtacgtgagcagccccaccgcagagctggtggacgccttctgcgccccagagaccgtgtgcagactgtgcggggaggatctgaagcactaccgagctctacgcatccacatgcgcacacactgcagccggggcctgggcggctgccacaaaggccggaaacccttcgagtgcaaggaatgcaacgctcccttcgtggccaagcgcaactgcatccatcacatcctcaagcagcacctgcacgtgcccgagaaggacatcgagagctacgtgcttgccaccaacagtggcctcggccccgcggacacgcccacggatgccgcttccagaggagaagagggcagctgtgtcactttcgcggagtgcaagcccctcgccactttcctggagccccaaaatggctttcttcactcgagccccacccagcccctgccttcccacatctctgtcaagctggagccagccagcagctttgccatggacttcaacgaaccccttgacttttcgcagaaaggcctggcactggtccaagtgaagcaggaaaatgtttcctccttgctgacgtcttcctcctcctctgccctctatgactgctccatggagcccattgacctgtccatccccaagagcgtcaagaaaggagacaaggacacagttgttcccagtgacgccaagaaaccggaaccggaagctgggcaagccgagccgctctcaccccgcccaccaccctgccctaccttgtcagtgactgtggagcccaaggggagcctggaaacccccacaggcacggtggtggccgtcaccacagctgccaagctagagccccacactcagcccctccagggctccgtgcagctggctgtccccatctactcccccgcgctcgtcagcaatactcccctcttgggcaattctgctgccctcttgaacaacccagccttgcttcggcccttacggccaaagccccccctcctcttgccaaagccctcgatgacagaggagctgccgccactggcctccatcgcccagatcatttcttccgtgtcctcggcccctactctgctgaaaacgaaggtagctgaccctggaccatcgatcaccagcagtaacactgtggccacagacagcccaggaagctccatccccaaagctgccgccacccccactgacaccacaagctctaaagaatccagtgagccaccccctgcagccagcagccctgaggaagccttgcctactgaacaagggccggctgccacttcctcgtcgaggaagaggggcaggaaaaggggactgagaaaccggcccctccccaacagcagtgctgtggacctggactccagtggggagtttgctagcatcgagaagatgctggccaccacagataccaacaagttcagtccctttctgcagactgcagaggatgacactcaggaagaggtggctggagcccctgccgaccagcatgggcccgctgatgaggagcaaggtagccccgcagaagacaggctgctgagagcaaagcggaactcctatgccaactgcctgcaaaagatcaactgtccccactgtccccgggtcttcccttgggccagctccctgcagcggcacatgcttacacacactggtaagaaggccctcacggctcaccaggcggtgagtcttgaaaggaaagagtaatgggtagggataggagtaggcctaaagtttggggcctttgtctcatgctccattctttgtctcagaagtcacaggctgttactttccatataatctgtgcctgtggtctgagccaccaaggcttatctgtaaataaatgtatcagacacagtgacagtggtcataggctccttcacttccctccccataacctttgcctgacaagttccaagagtttctaagtatggaggccattccggagaagtgggactttgcattaaggtaacagtgatgtaatgagcttggtgctttgacatgataatcttcagtgccgtcttttttttttttttttgaacattctatggagttctttagctaccacacatgtaatacagaaaagtgggattggatattttttccccttcactgaggtagctccagcgtcccttacttattttgactttttttcctatttggaatacttagatgattgatagtagtaatttttctaaagttctatttatcctaaaattgtcaactgttgaggaaaacattctgcgtatcatttgaatgttttaattaacaaagctagattaccaaaacaacatcccggaaatagttttcagatgtcagtttctagaagttgaagtgtagaacagagacttatctattaaattactttatgcctagtgcttctaatatttcaatagccatctagaaaggtataattataattttctgaatagtatcacaggatttgtatcatcgatcgattgggcgattgttgtacattcagtgaagtccttacccttttggagtttacagtttaaaatatggatcactggcaagatttgacttttcagaccaacaagtattttgtagtatttgggacagacggaaacattacttattgatcagaatgatgctcaaattttactgcagatctttttgcagtagatcttgctagaaacactccaggaaggaatgctgtgatttccacccacccacccccgcccactgaagatttgtgtagataggccatctctcagcaaactgacaggcttcctgggagccaaagtgtccatttcttttccatttgtgatggcatctgcagataccagagacgtgtcccctctttccctggggtttgatcactgttggtgtaggagcatctgaacctgttcggtccccagggcccacagagtagaaaaaagagccaactcctacaagttgttctcttgcttctacacgcaagccatggcacaagtgtgcttacgtgtgcacgcacacacaaacagagagagagagagagagagagagagagagagagagagagagagagagagcgcagccaacagcattgagcaaaacccaatttcaactgtagttaagcaaactgcctccatcatgagagagggtctctttccatcctctcagctactttgttgaattatcccagcatctgtacttggtctcaacccatttctccattctacccactccctaccacggaacaaagaggtcagctgctgaatgtccaactaggggtccacctgctggctgccagcacaaacatggctttagctctttaccctgcttagttaggttccaagaatgtactctgaggaggaagctgtcatctttcatgtcctcttgggcagtttctacacactcgatttcctccctcctccagctctccaacctgtggctcactgcgctccctctggacatgttgtacctcgtgagacaacaatgcactgtctctgccagttcccctcacagcatctcggcctgtgtctttaggccacaggaggacaaagtgccagcaaacacaaccagtccctttcagcagtatctgtcctcaccttttcctccttccctttgctctggttccttgttcacagtgctgggtcaggatggtgcaatctctgagaacccctccagctgtggcatctgggatcccctagctccctctcattctcatgggtgcttggagctcctttgccagctcctgggctcttccatctcaccttctgccccactgctaatgggtaacaagcactgacgtttaaatttgggagatgtcctcacagtatagaaagcaacttgagctacttgtacctagctgccttttactaaggtttaatccatgtttttgtatgtgggtttgtgtctgcacatacgtgtgcaggtaactgcccaggctagaagaaagagttggatcccctggagccaaggttacaggtgcttgtgagctaccagatgtaggtgctgagaaccaaagggtcttcaagagcagcactttctttaccactgagccatctctccagcccaagtactttattaagtggtagctttgactgcaaaagaagaaaagtaccaagaaaccctgggccccgagggtaaagtatgtgggaagtccaaagatgcttagctcctacagtcttgtcagcacaaaaactccatgtgtgtcccaggctagttctaaccttgattctcttcagagaacatttgcagctcgtccatttaggacttgacaaacaaggtcccgttgtcctcagcaaactcttgttccttctgcctggctttgttcccagtgcccttcagataatgcctctcttccttttctgactgctctgcatgaatgaatttggatgactggtggctttaatgttcacattggggtgggagacatacaggccccggatacaaaagtatggtcacagctgctcttacacacacatatacactcgcgcacgcgcgcacacacacagtctaccagattggtaaagtgcactagtgactttcagacatacactaaacaggctcaccatttttacatccctgcaaggcaaaaagcatattactattttaaaagtaattttctgctttgtataagctttaaatgattgtgttacttgtcagtttgaggtccttcagtggcactaatgtgactgttcatggaatacagcaaaagcatgtgaaaattaaaaagtaaattatttcataccaaaaaaaaaaaaaccaaccctaccattttcttaaaatctggaatcccagcctagtggagtcgggaagatggctggattaaatacagagttcagttgcccgcatccatgtgtaagttgtacatcttacaaatgcttgtaactccatctcgaagagattccacaccctctcttgcctcccacacatggtgtacatgtattcatgcacacagaggcaccaataaaaaataattaattaaaggaatcccagtatagtagcctttggcccttaagtcttttttttttaaccccttttggtgctggtacttgaaccagtgcttcagcattctccatagctccctgccagctccttgtttctccgttctcttcctccctatctgaccagacctgaagaagctgccatctttcttttagacaaaggaaatttaagatattctgttgttattaatgaaaagcaaaagagccacttgaaaaatacatggggaaatgttttatacccggtcacttcaagatttaaaaaaaaatgagggtgttggggctggagagattgctcagaggttaagagcactgactgctcttccagaggccctgagttcaattcccagcaaccacattacaggtggctcacaaccatctgtaatggggatctgatgccctcttctggtgtgtctgaaataaataaataaatcttaaaaaaaaataattgagggtgttttcagtgcttcaagcatttggtaggtcctctactagtgtgcaagggtccttgtctatacacatagtgggatttttatgaggcctttccaaggtctctaagtatgcttggattgatgcaaatattcctgtctgtttggtcaccccatccttatacatctcttgtatgcctttctactccattgctcattgctggggttggggtcgttggttggtttcatgggtggtggttgttgctgctgctgcttttttccagtgctgtagtttgttgtgggtggctctgggctgcttgctttcctggaagaggctgtctggaatgagtaatgagtcacacacacaagtggattcctgtgaaccaatcgcctaatgaataaaggagccaatcactaggcgagtagacagggcttccaggttggagagaggagagcaagcagcacagagccattcacaacatttccccctttctgttctaataaaaaaacaaaacctttctcacagtatagagtacaacaagattagacctaacacccagtccatcatctatcctaaattaaaaggctggagagatggctcagcagttaagagcactgactgcacttccagaggtcctgagttcaattcccagcaactacatggtggctcacaaccatctgtaatgggatctgatgccttcttctggtggtctgaagacagcgacagtatactcatataaataaaaaaaataataaatctgaatgataagtcttttttttttttaaatcattctatacctgactcatgtcctggctttagactgtaagccatctgaaaaccatcctctcaaagtaaatagcctgggttggctatgaatctgcaacaccatcagagacccaagaatgactgatattaactgaaagtatataggaagcctaacaccgtttccaaaacttagccaatttatagagaccgctgatcacttggacaatcccttacttcaaaacattgaagcattggtcttcagccttctggccaggatcatctaacaaaccttagaaaaacaggatattaaggactagcctattctgtctctgcacaaccaagccgtcctaaacctgtaattgtgtcctttctctggacagtgtatgtagatgaaatgagaattcttgcctagtgtctatcttgccacaactggagcaactcatagatgctccagtttcttctttgaatccaagacagggaaagctagcagactagtctcaataacacgtgaataaataacattaaatgtcacattctgtggattgctgacgtttttgaaaaccagctatgtatgtaaagtaatctggactgtcttcccttaactactatttctaattaaaatctttgaaaacactctaacagtaaactcagagccatgactttgctatttggcccttaactcacaggcgtaatcatctcagatcagtttataataacagttatagaagatgattaaacaggcaatgattatcactgcgctttctattctagagtcagtgattgatattctatcctggttcaaattaaaacaatccaaaacaaatgaagtaatctaaaaaacttatacttaggccttttctctggtgccaagagaatataaaacccaatatttccatggagtccatgttagacagaatatgagtattctataaccatcaatagaggaggtttgtaccaatgaaaaccttgatgttgcatcaaaataaattctgtatcaaaataagttatgacttcaacttagtaacaattaaaatgatttctaccaaatgagattatgcctatacaatcaattctagctatttcctccctgttccaattatgaccatttctaaattccctagaaagacaacctataataaccacttccagccccaaagcccaggaactggggcgatgactctttgtaacttattcaggctgaatatgggcattgagatattttgaatcggtgcgggtggggagataggggagttgttggcctttaaaaggccacaccaaagattgatttagtctctgatgcctgtgtcctggctgtatctggttgaaagtccaagacatcaggagttcaagcaggtcagttcagcatgtctgacgaagaaactcaccaaggctgtatattctgtaatgtataaatgtcaaagcaaaatgttagtatcatcaagataacatttttgttcaattctctgaaatctagttcttcaggggggggggggtctccctctgtcaagtctgatccatataactctggatcttaatcaccttttccaaaaccacaaagacaaaacctttttcccaaatcagccaaatttgagacgtaaccaaaaaaacctttattttgcctttctcccagaggaataaccacaaaactcaacatcacacccattttgaaaattaaaacaatataaaacaaatgaaataagctaagacactgtatgtgcctatactaggcctttcctatcttttcaagcaggaaaagatactcaagatttctgtggagcccacgttagcagaatatgagctttctgtggctggttaagcagtctataccatctttccgtttggctcagagccacagacatattttattaatacccgtataatggctggctgaactctctacctggagccacagaaatagataattaatacttgttcaaggcaggcaatgattatcactgtgatctctactctggagtcagtgactaatattccctatcctagttcaaattaaaacaatccaaaacaactgaagtaaactaaaatactgtttgtgcttattcttaagactttcctatgttaccaagaggatacaaaacccaaccaatattcccctggagcccatgttagacagaatatgagtatcctgtaagacaagtaaagcaatcttataccatcttatggttcagctctctgcctagagcagccatctcattataccatctatctgttcggctctttgcctggagccacagacatttattaatacctgttcactgccatttctacttgatgtcactgactaattttccctatactcctatggttgagaaccataggcaaaattccccatgtgattcagacaaatatctgtatataaatctatactaaaagcaagtaatcccaatttaataaattcataattcaatcaatctctgctccaagaaataggcaactttcattctacagctctcactcagagcagcctgcattccccacagcagcaggcctcctagcccgccagcagttttctttgtttcaattcctgtgcttgagtccaagctacttgtttcagcactaccgaagttactcactgaaaaaaagaaaagaaataaaataaaactcttaactctcaggctaataatcttaattttctagtggattcttgcccaccatgttcttcaccacctgtaaatctcaaagaagacaaaattttagtattgccaagatataccaattttctgtttggccctctgtctagagcagccatcttgttataccatctatctgttcggctctcttcctggagccacagacacttactttattaatacctgttcactgccctctctacttgaagtcagtgaataattttcactatcctagttcagaaccgcaggcaagattccccacgtgatttggacaaaatctgatataaatctatcctaaaagcaaataatcccaattttaaagaacagtagtttcaagctcagagcctcatcagagatgagctgtgtctttgagctgtacacatccctggcccatctgcaccgtcagacaactccggaggcttgggagtgtcatcttaaaggatgtgtgctctcaggagggaattaatgatttcctttgatcgattattcctgataacggtgagggttgcatcgtcatagccactctgggccttccatcccatggaaaacaagaaacccttctttctggcttatcttagcagcaaggcccaggagcctgtgcagggtcctgcacactgcactagttcaagctttgtctgtctcttaagcattaatctaaaaggatggtccctggtttgtgtttcctgggagctgtgccacgtgactcttcatgttagttattgagtacctgcaggttcaaggttccaagatagcagcactgggcagcaacttgaaggtgcttttagtccccaatagagtcaggaactgggacctggattctggcaactggggcaggagtgcgggggcagagggcaaaccagtgacactgaacagtccaacatctcctacagctcaggatgctgccctttccccttcctgtcttcctggtcccttctgtctctccttccccttttttcttcttctctttccctcctttctcttttcccttctttcttctttacctctgtcctttcccgtcctcctctcctactttctcgtatatgctctctccctgagtctttgccctttcccctccaccgttaatccacacaaacccaggactagccacaggggagcttccaatgcattttgaaacacaatgtttacaatgcaaataaatgaaggatataagcaggccaaagcagaaacctcccctgggacagaaagagggcttctcctgccaacgcatcatcaccgtgtttgtagtgctggcctagggtttgggctggccttgctcgtgcctctgtggagcagagtacatagcctgatgcacacttgcctgtgttggtcactcccttagcccatacaaaggaagaatgaaaacctgggaaccatgaatcttgttgcttgccacactagagggaggctcactctgacttctcaatatgggccttgaaggttgcctcccattgggagnnnnnnnnnnnnnnnnnnnnccccgccctcccccctcccccctacacacacgcccaggtccatctcctcaccctctcagttctacctgccaggctatccagtagtgctttttctctggttcatttaggtattgcttgctgtgccttagaaatgttgtggtgttaacagtttttattgtcttgcttcaaacacatgtatcttggtttcattgttaacttatttttagtctcttgatgacaactccttccattacatgaaggctaagggaaaatgattattttagtcattgtctctcagtttctgtttctttttgttaagtatgtttctcttattttcttaaaaggaaagggtggagggttgaacaaatgccagcaatcccagaagagtaaatcaaaagcaacttttctttttcattgcagtagaaagccagataaatgcgtatttttttttcctgcttcaggtcagaaacccttcccttgtcaaaaatgcgatgccttcttttctaccaaatctaactgtgagcggcaccagttgcgcaaacacggagttaccacctgctccctgagaagaaacgggcttattcccccaaaagagagtgatgttggatcccatgatagcacaggtagaaactctaggtgatggagaaccagagagaggagggtgctccccagaactcggttaaggctgtgtaagctggggcggagcactgagcagctacagctcagggggcctagcccctgccgagactgtgtgagctggggaaacagtgtcagtgccccaggggactttgcagctgccagggggggatccagcaccttccttcctaaaattgccattgctctgatcctggaagataggatgagccggatattgtgcgctttcggctcctgacttaaacccctgaaggaaacacgaagctctgaagtctgggggacccagatcctgcagctttcgtgagcagcccttgcccagtggactcagtactgcaagaactgtggccctccaagcttttagttgggaggcgggttgaggcggggcaaggcggggcttttcttctcaataactcctccctgtataaatctgtccttgtttgagacagcactgtgcatgtccttcttaatcacaactctgcttgacctgtccgggtattatgctcctgtgctgatgtgtgcctcctccctcggcccttacagagtaattaacgctgctccgttccttttctgcccgctgcccccatcaccttctgtatttactcaagtcctctatttaatacacttccatggtctaactgctagagtttgctagccctaccaaaacacaccgtacaaaaaagtaagctgcctcaggccacttggtagcagtagcagggagggcattgcacacacaggcttcaggctccgtgggtgttgaaagttagcgtttgcccatttctgggatccaagccagcctctaatgtgttcatctagggttgcagttgtctctcgtgacttctcaaactttggtgggatggagtgctgtgtagtttggagagtggcaccctgaacctaggagtcagtgtggatagagtgacagtcattgattccaacccctgacccccttgtcctgacctcagtgttgacacatcacagtggactggctatctgggagagctgaccccagtgggtaagacacctttacccttcccaccacactgcttattcagaccagtgagagcaatggaatgccttgggcttgctgggtccttctgcccaggttagaccctcttgttcgggcaagaatgccacagctggtttgctaaccacactgcacccccaacccccaacttctatttccacacaattccctaggatctgggagtgaggacaggtagcctgcaatggttgagtccctgtgagctaagcctgatccgcttcccaagcggctggaagcccaaggcactgcagcagctgtctttgccacagaccatcctgataatgtttaaccatcattgccacagtacccattagactggaacattttcttacagcctgctttacagaaaggtcctgtgattctccccaaaccagttcaaaagggaaggcagctgacaggggggggggtgctttggggtgggaacccatgtcctcagaagagtctcaggcactgtaccctgctcatccaggaggctgttcacaggaactctgctgacgccagagctcggtcagaatttatggtttgagcttagctttggcacaagtgttagcctgtgggcgtatttattttttaagtttacaattacaggttttctttttccaaggccctgccccagaagttatatagattttcttaaaggcacaaagcctcttagaaaagaactatcaaagagagaagtgtttggtttaattgtagatacagcccatggtgagagagagagaggacaggctgaggtgggagaaaaaaaaaaacagaacaggagacctaggaattgagggaggggtttgagaaatttacaacccaaggcagtgcgatactggctgggggtagaggaacaggttttttttggtttggtttggttttctggttttagcctaggactgtggttaaactcaggatgaccttgaacttgtgaacctcctgctcatagctctggagtgctcacaggagaatgtcaccccaactccaagtccatcagcttggggtgacgagcactctaccaactgaactatcttctccatcccaaacagactttgttttaaagagacgggaaatgaccagaagtactgaagctttagaggttcagtttatatgcaaagattgaattccttttaaatccctaaacatgttttataatgtcagtgtcacttttccaaccacatgaggtcttccatgaaaatgtaccccagatttcctcctgtacccgatgctaaaaatactaaggcggggacagttttcccttctagggttgtattaaatattcagttttacactgagacgctttcctctgcgtggcagatgtggcctactctactcttgaatgttcttggttcttattcaggggatgcgtggaggagccattccattggtaggcacctggaccagaccttttacaatataaacatgaattttttttatgtattttatatgtgtgagtgctctgtctgcatgtacacctacctgcatgacagaagagagcatcaaataccattacagatgattgtgagccattgtgtggttgctgagaattgaactctgaccaggcagccagtgatcttaaactacatttcatttgtaggaaggaagcgatccttaactgtggagatgaccaacaaaatatgtggggttttttgaggacaagccataataggacctgcccattcaagttgactagtcactctcttgtatgagaggaggttaagtctattgttcccaagaatcataaaccaggtcacaggctatcctgctaaaacactcccccctagtggaagtctggagtgcaaccaagctacctttgttctttgtacacagaaagaccttatccacccaccctcagaatggaattgtgaatgggacagttcagactgggggcatgcacttggctttggtttcagaattcatttttattttcataagtctatcattttaaatacattctctccagttcaaacagcctatgtgctgggttagtccagggctgaaatggaagaaacacaaatttgagagactagtctaggatgcatagcaagctccattttcaaaagcagaagatgtttttgctgagaacccaataataggaacagccagggtaaaaagtaggaaaaaagtagaattaaccacaaagtaaccttatttttaaactggacttggcttattctgaaaaatacttgccacacaaacttgaggacctgagttcaatccctaacctaacaaccgttaaaaacagaaaggaaggaaggaaggaaggaagacagacagacagacatgtgttagctcacgccgaaaatcccaccactgtgggaacaagatgaaagaggactgaagcttgctggccatccattctgtccaatcagcaagtttcaggttagttgagagactctgtctcaataaataagtaaataaataaataaatagaaagtaattgaggaagacccaaggtagatagtgacctctgatttccaaacacacgtgcacacaagacacatccatgcacacacagaattgctcacaaagtaagcaatctgagcatcctgtgtgtcagttgtagtctaaagtaaatcgaaatccatcccatagacactcactgtgattccagaaaaagagcagagatgttttcctctgagcataaacgggtgatgtgggtgggaatgtccccacttgattgcagggatgccctaagcaggtgtgaggtataagtgtcacgtctgaggcggctccttttccccatctgagacctgccttgatggcacatgacagagtgagcacgtgacactaaggaggaatgacaggcatgtgagtggccttctggcttattctaccacagcccggaaaagtctcagattagctgcatgcatttcagctgcctcgggcagtggtgagagatgtggcgctcctagggcacacctgtgcttgccttgaagcggtgactcttctctgtggagctcagaggaagcactgagcacccttagaaaaccggacattaagtcctcagccagcttccatttcattgttaaaatcattaagtctttgttcaaccctgttaaagaaagggtaatgttcctggtactgtttgtggggtttttcccatgtgggcttgttctccttccttccttccttccttccttccttccttgcttcttccctccctccctccctccctcccttccttccttcctcatagcctgggctagccttgaacttactgtggagcccagcctggcttcaaactcctacctactttagtttctgaaggtctgagatcgcaggtgtgcaccaatatgcctggccttggtgtcatcgatgttggccatggttccctctttttaaggtcactgaaagctggtggacttcccatgtctgtttcgctatggggggtggggggggtgtagacaagtgagatcaagaaatcactgtcctcaaaagatcactcaccctatagatcccagtccccatgctcacccacagcccctcagagccgctcaccatccctccccacgtgcccctggccaggtttgtgttcaaggtcctccccatgtgttgcctacaggtgcaggagcatgtttggtttctggcctctacctggagatgtgcctgtggaccattcacacagaatctgcatgtgggctcattttctgtgaaactctttgaggaccacatttggaagatggggggggggtgttcttgtgtatgttgcatgtttgtaaaaagctctttgcactggaaagataacccttacaacttggcttcctcaacctccctagtgctgcgagtctctggaatgcacgccctctctgtctgcactgcctgagtcactcacaccttcctgggggtgggggcagctgagtgtacgtgggcgtgatggtggaagtcaggagttctgaggcacgagagcccatctgccttccttgggagtgtgaaggctggtttggcctttataactccagattcaaaaactcctcattaggtttagtatccaggattcaagggtgggtctggccaagttccattagagcccttgagaagggcttgcctagtgtcacctcgtctgaacctctctcctgtctgcttgcttacacagacagccagtcagacacagacacgttgaccaccccaggtgaggtgctggatctcacagcacaggctaaagagcagccgccagcagagggagccagtgagatcagtccggcttcacaggaccttgctatcaaagaggccaaagcagcagcagctccctctgaggaggaggaagaaaaggagacagaggagaacccagagccagaggaagagtgtcgtgtggaagagagcactggggctgcagatgcccccgaggaagacacagccagcaaccagagcctggatcttgacttcgccaccaagctgatggacttcaagctggcagagagtgaggcaggctctgtggacagccaaggcccagcccagcaggagccaaagcatgcctgcgatacctgtggaaagaacttcaagttcctgggcaccctgagtcgccacaagaaggcacacagctgccaggagccgaaggaggaggaagcagcggcaccttcgctggagaatgagggcgttggcagagcggttgaggggccctcgccttcccctgagcctgaagagaaaccagccgaatccctagcaatcgatccaacaccaggaaccagggaggcctcagtggcgaaacagaatgaagaaacagagggtcccactgatggggaaggtacggctgagaagaggggtgacggtgacaaaagaccaaagacagactcccccaaaagcatggccagtaaggcagacaagaggaagaaggtttgcagtgtatgcaacaagcggttctggtccctgcaggacctcacccggcacatgaggtcacacacaggtatgagagaccagagccagcctgccagaagaggtggcctgcagtggccattgggagtctccctggaagtcaggtccaggggccactgagagaactggctaggttgcagggttatcctctgacctgggaaggctgggggtcctaaggaggtgtctccatggccttggaatgccacaagccttctacagggcagtggtccctctgcagtagtactttggaaagcatttttcttcagccactcagccccagttttgtcctctatagatagggaaggtggccgccctgtgcacaggtttctaagaacaggaagaataggcggatgtccatctggtgtaagactcagccagatcctgagaaagacagggatatgccagggaaggcaggtactggcctacacatatagggaaggccccaaagggtctgttattttagtggggggcaggggtgggggacctgggtagaaccatgaagccaaaaggcagagacacccttcctcggccatccctccaaagagagcacctccaccccctgaccacatctcaccgtcatggcctcccgtgcacagtggccgtgccacagccactgaggtgtagcgtgctggcacttgttctggccagagacattgtcagctgttgagagacttggtccgtaagctgtcgggaacatccaaatgcatcctcctcatgccttgctttaggtggctgtccatggccttgcagagcccaggggaatcatttctcctaaggacgctttgcttctgggcttctcttacgatcagtttgtagaaaagctaggctgagaggtacaggaagaagaatgtgacacccccaccccccccagccttgccagtttggacaaataagagagtcctgtccctgtgtatttagttctggatgctgcattcatatagagtgtgggaggtgggaaccagtggcctttgtgttaatggacgtctccctttcattctttcattgttcaggagaaaggccatacaagtgtcagacctgtgagcgaaccttcaccttaaagcacagcctggttcgacaccagaggatccaccagaaagccaggcacagcaagcaccacgggaaagacagcgacaaggatgagcgggctgaggaggacagtgaggacgagtccacccacagtgctaccaaccctgcctctgagaatgaggccgagtcagctcccagcaccagcaaccacgtagctgtcaccaggagccggaaagagagcttgtccacttctgggaaggaatgtagcccagaggagagagccgcagctgagcaggcagctgagcccagtgcccccaaagagcaggcgtctccaggtgaaacagacccccagagcccggcagccatcgtgcaagacttgctggagctgtgcggcaagaggcctgccccaatcctggcggccaccgacggggcctcacagctcctgggcatggagtgacagcccgccctgtctccatcagctcagagacaaagctagcggagcatcccaaatgtagattttacaaggttttctcagcttccttcagttgtctggagagagaggaaaaagagggcaagagagagacaagcaagcctgtggccaaccagctcgtgccatagccttacccagtacacatgcacccggccccagtacagccggcttcagtgccttaactacttatgggtcctcccatgtcgttgtgggtgtcccccttccaaaaaaaaaagacattttaacaaaacaaatattttaatgaatttttcggaggaccttttcatttaagcattaacattaccttttgtatttgtgtgtttgagcttgtttttgtgagtctgtgatagtactgtttttgttctgtgagctggaagcagaaaaccttccccttggatcctgtagccaataactggaagaaaatgatgtgaatttcatgtacatgacccgagggaagagggtgtgaggctaatttctaagctagacctgtattctctggttcacgtcggggaggagccgcggcctggcctctgtcattagtagatgtggttgacgcagggttcctgtgtggtgtgagccaaagccaggaaagagtctagcttcaacctcgcgagtgtttccaccctctccgtgttagaaatggctagtgttcccattcttaatttacagagaaaagtggcctccccagcaccctagcctacagaggacacggctggaggtcatatagccactttcccttcttcccattcggtatatgttattaatattattattattatttttatttttacttcttcagttcgctgggctctgcattcagcagaaacaaatgggcaatatttgtcctgggtgacctgtactgctccctggtccccccttattgtgtgcctgaagcttctggtggcacgccagtgatggctcttctactgtactcagacaaacctttcttccatgactgtagaatccagcaggggccaggagtggtcctccaagcgtggccaaggagtggctcagaggggagagcaaggatgcacaagtggtggggagcaggcatccgagacaccaggccatacctggggcacctcagagtcagtttgcaaggcaccccagtcttcctgctaagctgggtcagcgccttcccccagccgtgctactaccgtcatttgggaagcattgagatactactgccagtgatgaactgaagtgcatgcgcaaggtctagatgcgagagttgtcttcacctttctgcagtgtggggttgctgcttggagagaggagtgcttttaaatccctaactggcccaagcccctggtgcacagagacagggttcctttagttcctgggtgttctgtacaaacagtagacctcgctcatcagcaaaaagaaactcttcctactgtagctgagctcggttcagcaccctgtcctttagccgagacccgaggatgcctgagccacactgctactagagccctgtttgtcccttgccttcagggcctcaagatttccccaagagaggccctccactgcttcaccccctcccttatcctgtggctctatatgctcctccgcaaagatgtgcaacccgaggcgtgcgtacccctttgtccaccagtatctagtggctaaaatccaaccaccctgacttcaatggaagatagatattctagagataatgaaaagtgatatatgtatgaaaaaaacattgaggtatatatgatttttaattgtattagggatgtgtggacccatttaaagttgagattttatttactgtagagagagaaaaatcagaaccattgatcccatgatcttctaagtcaaacccagctcctacatcccttaggtgtttttattattattattattattattattattacaattgttattgttttcattgttattatttggggtttcttgtgttttggttttctttgcaactctccacactaaactcatgatactgtggggagaggccatgactgaaccctacgctgcggtaagatgtagcaggggttgctcccagcagcggccgccgccagggctgcaactggcaataatcactattgatttaaagctttatttagtctcatctgttccttcatagttaataaggtcttgccacattttattagtgagattgagagatgaattatttgtctgttgtcctccccgccttccctcccccaatattaaactgtgaagtttgtgattttgtttaaacgctgggtgaatcatagtgttagtttgcatgtccagctaatttgtttctatacattttgtttgattctctttctcctcagggcttttacaaatatatatatattatatatgtatatatatatggatcttctgaaaaaaattgaggtgcaaattttctcttttttgttgttttttgttttctctttaatggacacaatgctgatattcaatcactacataaaatatctggctgtgaaacaaaccagagaggccccacggggcgttatccaagcagctctgcagaagctccgtgaatcggataccgatttcagacagatcatcctgcgttcgtctctttcctctcttctctttcttcaagaaaaaaaagttgatcctaatgatttcagcccatgcattaaacagaaaacaataataactgtagaattcatatttttctaaagggaacttaaaaactgctgctacatgtatgtacaaaactggtctctgctacatgaacagaatcacaggtttggttttggtacttttgtttctctttgtactcagttgtgtagaacttccaaattcagagtgaaaagaaagctgttctgcatcaaaccatctaagcaataaatgttatatttaaaaaacggcacacgaccaacctgtgagttcctccaagcccatctccaagcctgcagtccactcaaggcaggtcttaggatcaagggctgacccgaaatcagtaacggccttagaatcctgggcacccaggcagcatctttgaaagacagttggggttggagatgtggcccagtcagcaaagtgcctgtcccaacagcatgaggacccgagttcgggttctgagaacccacgctgattgtgcagcagcatgggtgactggggatagggggcctgggggggacagggactgggaggagggggcggcaggcaaaggcaagcagacccctggaactcctggacggctagtccagccagattgtttatcacaggttcactgagagttcaagaaataagacaggaggctggcattgttggctcagtgggtaaaggcacttacatcaaacctgagggcccgagcaatccttaggactgacttaggaggtagaaagagaaaggactctcagacaaaagaacaagtgggaggcaagcacttgcatacataagacgaatgattttttttttaaaaatcagaaaaactttgataaataataaaaaagccaattggctgcagttagatgttcagtcttgggagtgtggacaggggacataagaagctgtggtgaatttcatgaggctagagggacagactgaaggggcagcagcacagacagtcgcttttgtctcttatttagctgcagcttaactggtaatgctggtcctgtgcactagtgactccaaaggagaatgctgggcctgccttccccggggaaggtggaacagatttagttggcctggtggagagcagtgggtttcaacctgggggggtcacaggaccctttcgagccatctgtcattgtgaggagccttgtacccttctcgctggggagtagccctcagaaggtgaccacagaagaaactcgtgggaagttaattatggcaatgctacaaagtcattggccagcctattttcagtgccaggtcacagcatggcaagaggtagggggtccctaagactccttaggctcctctcttggcccccacaactggcttggatgaagtatcagtgaggatcttagaatgtcccacagagctagacagacggctcagtggttaagattctggtgatggccacaaccaagtgactcataagcacggcccccagcctttccagctcggtggaagggagctgtcgatcactgagtgacgtttaaagcacctgtaagcatgactccttgtctggatgaccttggactacagctggcattgtagtttgctttctattgctgggacaaacaccatgagcaaaagcaacctgcgggagcaaagggtttacttcatcttagctcttagtcacggcccatcactgaggaaagtcagggcaggaagtgtaagccataaaggaatgctctttgctggcttgctccccatggcttgctcatcctgctttcttatgtacccaggaccaactgcccagggatggcaccacccacaatggcctggactatctcacatcaatcaataataaagaaaatgttcaggggttggtaagatggctcagtgcgtaagagcactgactgctcttccaaaggtccagagttcaaatcccagcaaccacatggtggctcacaaccacccaaaatgagatctgacaccctcttctggtgtgtctgaagacagctacagtgtacgtatttatagtaataaatatttggccatgcggtggtggcgcacgcctttaatcccagcacttgagaggcagaggcaggcagatttctgagttcgaggccagcctggtctacagagtgtgttccaggacagccagagctacacagagaaaccctgtctcaaaaaacaaaaacaaaacaaaaaaatatttgggctagagcaagcagggactgagcgagcagagctgacaggagtgagcggggttgactggaatgagtggggttgactggagtgagcagaggtcctaaattcaattcccaacaaccacatgaaggttcacaaccatctgtacagctacagtgtactcacatacataaaataaataaatcttaccaaaaaaaaaaaagaaagaaagaaagaaaaaagaaaatgttctaacacgccaggcctagtccacacaaagacctatctcaaaaccaggaaggaaggaaggaaggaaggaaggannnnnnnnnnnnnnnnnnnnnnnnnnnnnnnnnnnnnnnnnnnnnnnnnnnnnnnnnnnnnnnnnnnnnnnnnnnnnnnnnnnnnnnnnnnnnnnnnnnnnnnnnnnnnnnnnnnnnnnnnnnnnnntccttccccagggatccacacttaaagtcacagcaggcactgaccagggcagtaagagatctgcatagaagaaacctgatatctttgcaatattttagttctaacagggaaactgataagaaaagaagtagatgaggaagatacagaagatgtgaggtgggggtgaggggaagaagaagccaggatgggacagggatggtcagccctgaggaagtcacccttgcaaatgcctgggggtggggacagatggcccagaggaaggaccttgagccacaagccagccctgcaggaagctggggagacagctggaatgaacacaatgtagactttatagtagactggagtaggtgggtgggattctggtttcaggttgaccccggggtgacaaagatggccactgggaaactaccaagaggtcacattatgtataccaggctggcctcaaactcagagatctgcctgtctactcctcctgagtgctgggattaaagaagtgtgagccctacctggggcttgagtagtttaagagaagccccaggattgggtgataagccagatgcagtgtgagagtgtagagcagccaaggacagacataatgatctgctagacacatatgaccacccaaagatcctaccttccccttgatggcagttgcccaggacatggatgtctgcacgaaaggagccagttgtgagcaccaagcccagtatagtaatcatctgtgctgatgagccacacttggccctcagcaattctgaagtacagacttgttaatccaatgaccatgatagctcatgcctttaatcccagcactctagaggcaggtggaactgtgtgttcaagaccagcctggtctgaagagcaatcctatcttgggggagcggggggggggggggaattgttaatcccaaatttaaagataaaaacctgacttgaaggaagaactgtgattaatcaatggtaggcccatgcccaaccttgacttggttgctttcaaggctggtgcttgttagtgagcttcctgaggctaacagcttataaggagggnnnnnnnnnnnnnnnnnnnnnnnnnnnnnnnnnnnnnnnnnnnnnnnnnnnnnnnnnnnnnnnnnnnnnnnnnnnnnnnnnnnnnnnnnnnnnnnnnnnnnnnnnnnnnnnnnnnnnntaactcacagcaggaactgaggtagaaatcatggagaaataccactgacttgctccagacttatgttcaactacccttcttatatagcacaggactacctggcttggggtaatactgactgcagcagactgagtcctcccacattaaccaacaatcaagaaaacaccccgtacccgcaggccaatctgatggaaacaagtcctcaactgaggatccctctctttaaacatgtaaagttggcacctgaggttagccatcacagccttgtgtgcctttggacctgtggtaaggccaagcatcgtggcagaggcttctaaaggctcctcctactcactgctagctgcgaggaagcaaggaaagagctgggaagatgtttggctttcccagtctccctttagcgtatacccacaaagacctaacaggtcccaccctttagagatcccacttcctccggaacatactgtaggctcacaaccaagctttcgaagcacgagcctacgagagatatttacccaaagcacagcaagcaatgcccttaacccacaaggtggccatcattagcttctctatgttctgagaacttggacccaatctgaactgtcctgaagcgcccatcagttgcatttcctgtcctttctggaatcagctttaagggacaatcacctcttgccactaatcaagatatagaggcagtgctcaatgatagaacagttacccagcattccccaaataggtgtaaaataatgagttttgtgcatgataaaaatgtatcaaatacattcttccaaccttaaattcctctcctccatgccaagagggtttctctgggtagttctggctgttctggtcttgaactcagagatctgcctgcttctgtctcccaagtgctgggattaaaggcatgcaccaccactgcccagccaaccttgctatttttaagggtacaactcaatggcatcaaatctaccacactgttgtgcacccagcaaagccctattaacactacctccctgtttccctccctttcagagcctcctcccctctgcatcctgtttctatgaagatgactccttgggtaactcacacaagtgaaacagcacggtttaaagacaacatttaccgagagcttgctttgtgggaggtcaggcgagggacctgcctctcgaaatttgtgtccggacagcagggtgtggattaaacattgctgtgtacagggacacaaagcctcaggtcttcctggtgaagacacagccttctgcctgcccctgctggttgaggtggtgtggggggttgatattcatggccaacttggcctggccggatgtagagtcacctaggagacaaagcttggggtatgtctgtgagagaggttctagatcccattgagtgagatgaaccaccccctaactgtggacagcatcgttccatgggctgggtccctgtcccaataaaagagaaaagatcatctctctttgcctcctgactgtggctgcagtgtgacctgctcactgcctcaagcttctgccatgacttctccatctaccatgatggactgtcccttaaggtgtgaacccaaataaacccacccttaacttcttactgtcagtgcaacgagaaaggtgaccaatacaaatgggtggagaaacagcaaacagctggatctatagggacaaacatgtaggtcccagctcggcctcggatgagtggctttgtgccttgggctcttcttcctaagaaggcaagagtagtatctgcctcctgggatcgtcctgtggattataagtgtgtgtgtgtgtgtgtttatatatatagagagagggagaatatccacagctcttgttgacattgctgtggtaaccctgaagggagtgggcaggacttccaggctgtacattcactccacagatattggaggagagcaggaggaggaccttacaggagacgcctgccctgccttccaactcaaggctcctctacctttctcggagatctgcgatcctggcaccttctagttcaaagctccaacatgcccaaaactcttctctggacttgatgcttatcacataatctcactctggaagttgggagagagatacggtcttaccctcatccacaccaccagtcctgcatcagagcctcatccatgggagagctgccctgtgtagatcaacacccaggacaaagccttgtcctggctgattccccagggtgtgactgaggactgatagtggccatattccttatgagctggttagaatgagaaagtcaggcttgcccagatgtgctgattcaatagccctatcttaacaaaaccccgggggattcataagtatattaaaattagtgaggctcaggcctagagcctcaagtttggttcagatatgaatccagcagccagctgaatagagctcttaatagactccatctgtgttagctagtttcccattactgtaacaaaatacccagttttataaagttataagttataagactttataaccaacttacaaagacgaaaggggctggagagacggctcagcagttgggagcagctgttgtgcttgcaatggatcaggttccattcccagcacccgcatggtggctcacaaccatctgtaactctagttccaggggatctgacgccctcttctaaactccgtgggcaccaggcatgcacgtgttgtacagacatacatgcagacaaaaactctgacaaacaaaataaagtaaatacatctaaaacaaggcaaaaatctttaggaagggggagggggagggggagaggagggaaggtagacagagggggactagctaggaatgatatagtaggcctgtaatcccagtgtctgggaggctgaggtgggaaggtctcaaattcaaggccagcctgggcttactgcatagcaagaagctctctcaagctgggcgtggtggcacaagcctttaatcctagcactcgggcggcagaagcaggcagatctctgagttcgaggccagcctggtctacagcgtgagttccaggacagccagggctacacagagaaaccctgtctcaaaaaacaaacaaacaaacaaacaaaataagaagctctctcaacaaaaacaagtggcgtttgcttccgtttatagcttcggaggcttccagccacggtcagtagtctcactgccaactgtaaccgtggaagctgcttatctcacagcaaccaggaagcaacgagatagaaggcagaaccagcctccctagggcctcttgaagggcacagtccaacaatctcacttcctcctactggccctgccccttaaaaataaatccctctatcttccagtagcataatgtgcaaggaactgagtctttacctcagaagctgtggggaggaactccagagccagatgatgtcagcctttggggtggaggagtataaaatcgggagggacaaagactcaagagtgacgctctgagctgcactcgtgcctcagttgctggcagacctagtaggcaatagcttcatcgtgcttgttccaggcttgcattcgttacttgtctgtggctctgataaaacaccatgaccaaggtaaactcgtgggtgaaaaagaaaagttgatttgggctaacgattccagaaggatgcggagttcatcgtggcagaaaggtggaagcactcagcaggcttagcagctgagagctcgcatcctgaaccacaagcttgaagcagagaagcctgcccccaatgacatacttcctccagcgaagtcctacctcctaaacctccccaaactgccaagtgttcaaatgccagcgcctatgggggacattctctgtccatccgctctagggttcctgacgtttgccacgcccagcggctgcctgcccgctcccaaggaggcgggggagggaggggtgagcagggagaaccgctgggtttattttaaacctataattgaaggttgctcgttaacaacaacaaaccagtgctctccaagccaaagctgccaaagtcagtgtcctaaataaggaacacagcagtcgcttctttcaggggaaggaagctggagccaaatagggaagtgacctgcctggctttgactgtgggctgtcctgagtcctgcctgcctctcacaggaattgacaacatggtgagggctggaccccaggctctcagatgagtggggtggggaatgtatagctgctcattagccccgccttcccacaaagacaccacacaactctctcacataaatggtagtcctactatgcatgaaaaagttaggggcgtcagggaaatgggaagggggataaaacaagcaatgaaaactgaatgcagccccggatattgcttccgtggctctaattgtactactggctaggcagagagaggtagcagctctctgtgagttcaggaccagcctggtctacgtagagaattccagaacagttagtgctgtatatagagaccctgtctcaaaaaaaagcaaaaccaaacaaagaaagaagcagcgaaacccaaaggcagttatcttactttccatccagtttgctcaccctgcagagtgcaagtcttaggttgccagtccagtgagctgaggaggaataaaaccctttcctgtcagagcaggggtggaggaaagtgacaggatctgccttgtgagggtgaaactgcctatcgcacacacagcccagcacgtgcacggggtcaggtgtctatgactggaggatgtgtgcccaccaaaaggacagtgactgcataaaacgaggacacatggctccggtcaactctggaggcagatgtggtgtggtgtgccctcctaccccaggtggctggtgaggcccccattctcctgatgcatcacaagtgccatacgacagatgtttttttttaaagctctgcagtgatggctcacacctgctatgtcaagatggaacatcagaagtgtgtctttggagctggtgagatggctcagtggttaagagcactgactgctcttccgaaggtcatgagttcaaatcccagcaaccacagggtggctcacaaccatccataatgagaaacacatttaaaagaccaatgggcccaagggagcaggggtgggggtgggggcagagaatgtttaaaaaaagaaagaaagaaagaaagaaagaaagaaatgtgtctctgccttccacaccctcatccagacattgtaagacaagtccctcggttgcttgttggaaatcccatttcagacctgctgatccaggatttcaggcagccaggttaaacattccaggttctggagcttgggaaagtctaccagccacaattccagaagctggacactgtccaggattttgccctctctccgcagacatctctctgtatcactgggaagatgatcaaggcttctctacaaaatgctatcatagagacagacaggaatgattggttaagaacactagctgctctttcagaagaccagggttcaattcccagcatccacatggtacctcaacaaccaaatgtaagtctagtccaaggggggggggtgtcagagaacctcatctagcatccttatctgacctccaaaggcaccaagcatgcattgacgcacagatacacatgcagggaaatactcatatgctaacagtagttttctgtgaggagcgggtgtggcagcagtgcaagaaggcaccagggactgcagctaagtcttatgacttgcacctgacttcctcatacacctgaaaataagccacgaccatcgtgagagctgcacaggtgcaccatgatgctggttaaacaagtccatatttggtggagacgagcccctgccgccctgattggctgaagctgcgtgcctggtgaggtgacatggcctgccgtgagtggatgagggctgagagtatataagagtgagaggcccgggttaaagagagagataaagttgagagagataaagttgaagcgagagagatgaagacggaagtttgcttaataaactgctgttagaaggactggtggttgtgtcgttcttgctggtcgagaataggtgcgacagttttcattattatctaaacagtatcatgtttgcatggaccttgagcacctcttcccataatttctatgttttcatttatttaatgtgtgtgcacacagaggtcagaggacaacctgtgggagtcaatttcatcaagttgaaatctcagtaggaggcccctctacctgctcggaatacaaagtagcagctgctgtgggaatggttgtttagttacattgtttaaggactaatgacagggaaatcatccactatatcttcacacaatttttttttcaatttttttttctgagacagggtttctctgtatagccctggctgtcctggaactcactctgtagaccaggctggcctcaaactcagaaatccgcctgcctctgcctcctgagtgctgggattaaaggtgtgtgccatcactgcccggctttaatacatgtttttccatccactgctgcttatatctgcagatgtggac

SEQ ID NO: 388 - DNA, 7996 bp, Mus musculus
ctcgttcagccgcggctgctgcggcagctctgtaacacgtccccaggagactcgcaggagcaacacgtgatgtgtctacttatcagggtgagagggggagagcgagtctccgagtgtgcggaaggctcagacctgtcttccatcaacaccatgatgtcagcagtaatgagcgtagcgagtgtcacagagaatggtgggagcccccagggcatcaagtcccccatgaaacctccaggaccaaatcggattggcagaaggaaccaggaaacgaaagaggagaagtcttcctacaactgtcccctatgtgaaaagatttgcaccacccagcaccagctgaccatgcacatccgtcagcacaacacagacacgggaggagctgaccacgcatgcagtatctgtgggaagtcgctgagctcggccagctccctggatcgtcacatgctggtgcactctggcgagaggccttacaagtgtacagtgtgtggccagtctttcaccaccaatgggaacatgcacagacatatgaagattcatgagaaggataccaacagtactacagctgcagcccctccatcccctctgaagcgcaggcggttgtcctccaaaaggaagctgagtcacgatgccgagtcagaagacccaggaccagctaaaaagatggtagaagacgggcagtcaggcgatttggacaagatgagcgatgaaatctttcactgcccagtgtgtttcaaggagtttgtttgcaagtatgaactggagacccacatggagacccactcagataacccactaagatgtgacatttgctgcgtcaccttccgcacacatcgaggactgctgcgccacaatgcacttgtccacaagcagcttcccagagatgccatgggaagaccttttatccagaacaacccttcgattcctgctggcttccatgatttagggtttactgacttctcctgtaggaagtttcctcgaatctctcaggcctggtgtgagacaaacctacggcggtgcatcagcgagcagcaccggtttgtgtgtgacacctgcgacaaggcgttccccatgctgtcgtcactcatcctgcacaggcagagccacatccctgccgatcagggacgggagaagctccagaccaagaccctggctgccgagtccttggaacagaaggccttcctggccttgctgggcctgcagcacaccaaagacgtcaagcctgccccggcggaggagctcctgccggacgacaaccaagcaatacagctccagacacttaagtaccagctacctcaggagcctggctgccccaccgtgctgagtgtgtctcctcttgacgctgcttctttaggtggctctctgacagtcctcccagctaccaaggagaatatgaagcatctgtccctgcagcccttccagaagggcttcatcatccagccagacagtagcattgtggttaagcctatttcaggagagtcggccattgagctggcagatatccaacagattctaaagatggcagcttccgctcctccgcagatcagtcttccgccactttccaaggcccctgccaccccgctgcaggcgattttcaagcacatgcctcctttgaagccaaagcccttggtcacaccccggacagtggtagccgcctccacgcccccacctctcatcaacgcccagcaggcatctcccggttgtatcagccccagccttcctccacagtccctgaagttcctcaaggggtcggtggaggcagtgtccaatgttcatctgcttcagtccaagtctgggatccagccaagcaccaccacacagctcttcctgcagcaagctggagtggagttgccgggccagcccgagatgaagacacagctggaacaagagagtatcattgaggccctgctgcccctcaacatggaggcgaagatcaagcaggagataacagaaggtgacctcaaggccatcatgacaggccccagtggcaagaagacccccgccatgcgcaaggtgctctacccctgccgcttttgcaaccaggtgtttgctttctctggagtcctgcgagcccacgttcgctcccacctgggcatctcaccctaccaatgcaacatctgtgactatattgctgcagacaaagccgccctgatccgtcacatccgcacacacagcggggaacggccttacatctgcaagatctgccactacccattcacggtcaaagccaactgtgagcggcacctgcgcaagaagcacctcaaggccaccaggaaggacattgagaagaacatagagtacgtgagcagccccaccgcagagctggtggacgccttctgcgccccagagaccgtgtgcagactgtgcggggaggatctgaagcactaccgagctctacgcatccacatgcgcacacactgcagccggggcctgggcggctgccacaaaggccggaaacccttcgagtgcaaggaatgcaacgctcccttcgtggccaagcgcaactgcatccatcacatcctcaagcagcacctgcacgtgcccgagaaggacatcgagagctacgtgcttgccaccaacagtggcctcggccccgcggacacgcccacggatgccgcttccagaggagaagagggcagctgtgtcactttcgcggagtgcaagcccctcgccactttcctggagccccaaaatggctttcttcactcgagccccacccagcccctgccttcccacatctctgtcaagctggagccagccagcagctttgccatggacttcaacgaaccccttgacttttcgcagaaaggcctggcactggtccaagtgaagcaggaaaatgtttcctccttgctgacgtcttcctcctcctctgccctctatgactgctccatggagcccattgacctgtccatccccaagagcgtcaagaaaggagacaaggacacagttgttcccagtgacgccaagaaaccggaaccggaagctgggcaagccgagccgctctcaccccgcccaccaccctgccctaccttgtcagtgactgtggagcccaaggggagcctggaaacccccacaggcacggtggtggccgtcaccacagctgccaagctagagccccacactcagcccctccagggctccgtgcagctggctgtccccatctactcccccgcgctcgtcagcaatactcccctcttgggcaattctgctgccctcttgaacaacccagccttgcttcggcccttacggccaaagccccccctcctcttgccaaagccctcgatgacagaggagctgccgccactggcctccatcgcccagatcatttcttccgtgtcctcggcccctactctgctgaaaacgaaggtagctgaccctggaccatcgatcaccagcagtaacactgtggccacagacagcccaggaagctccatccccaaagctgccgccacccccactgacaccacaagctctaaagaatccagtgagccaccccctgcagccagcagccctgaggaagccttgcctactgaacaagggccggctgccacttcctcgtcgaggaagaggggcaggaaaaggggactgagaaaccggcccctccccaacagcagtgctgtggacctggactccagtggggagtttgctagcatcgagaagatgctggccaccacagataccaacaagttcagtccctttctgcagactgcagaggatgacactcaggaagaggtggctggagcccctgccgaccagcatgggcccgctgatgaggagcaaggtagccccgcagaagacaggctgctgagagcaaagcggaactcctatgccaactgcctgcaaaagatcaactgtccccactgtccccgggtcttcccttgggccagctccctgcagcggcacatgcttacacacactggtaagaaggccctcacggctcaccaggcggaccttgctatcaaagaggccaaagcagcagcagctccctctgaggaggaggaagaaaaggagacagaggagaacccagagccagaggaagagtgtcgtgtggaagagagcactggggctgcagatgcccccgaggaagacacagccagcaaccagagcctggatcttgacttcgccaccaagctgatggacttcaagctggcagagagtgaggcaggctctgtggacagccaaggcccagcccagcaggagccaaagcatgcctgcgatacctgtggaaagaacttcaagttcctgggcaccctgagtcgccacaagaaggcacacagctgccaggagccgaaggaggaggaagcagcggcaccttcgctggagaatgagggcgttggcagagcggttgaggggccctcgccttcccctgagcctgaagagaaaccagccgaatccctagcaatcgatccaacaccaggaaccagggaggcctcagtggcgaaacagaatgaagaaacagagggtcccactgatggggaaggtacggctgagaagaggggtgacggtgacaaaagaccaaagacagactcccccaaaagcatggccagtaaggcagacaagaggaagaaggtttgcagtgtatgcaacaagcggttctggtccctgcaggacctcacccggcacatgaggtcacacacaggagaaaggccatacaagtgtcagacctgtgagcgaaccttcaccttaaagcacagcctggttcgacaccagaggatccaccagaaagccaggcacagcaagcaccacgggaaagacagcgacaaggatgagcgggctgaggaggacagtgaggacgagtccacccacagtgctaccaaccctgcctctgagaatgaggccgagtcagctcccagcaccagcaaccacgtagctgtcaccaggagccggaaagagagcttgtccacttctgggaaggaatgtagcccagaggagagagccgcagctgagcaggcagctgagcccagtgcccccaaagagcaggcgtctccaggtgaaacagacccccagagcccggcagccatcgtgcaagacttgctggagctgtgcggcaagaggcctgccccaatcctggcggccaccgacggggcctcacagctcctgggcatggagtgacagcccgccctgtctccatcagctcagagacaaagctagcggagcatcccaaatgtagattttacaaggttttctcagcttccttcagttgtctggagagagaggaaaaagagggcaagagagagacaagcaagcctgtggccaaccagctcgtgccatagccttacccagtacacatgcacccggccccagtacagccggcttcagtgccttaactacttatgggtcctcccatgtcgttgtgggtgtcccccttccaaaaaaaaaagacattttaacaaaacaaatattttaatgaatttttcggaggaccttttcatttaagcattaacattaccttttgtatttgtgtgtttgagcttgtttttgtgagtctgtgatagtactgtttttgttctgtgagctggaagcagaaaaccttccccttggatcctgtagccaataactggaagaaaatgatgtgaatttcatgtacatgacccgagggaagagggtgtgaggctaatttctaagctagacctgtattctctggttcacgtcggggaggagccgcggcctggcctctgtcattagtagatgtggttgacgcagggttcctgtgtggtgtgagccaaagccaggaaagagtctagcttcaacctcgcgagtgtttccaccctctccgtgttagaaatggctagtgttcccattcttaatttacagagaaaagtggcctccccagcaccctagcctacagaggacacggctggaggtcatatagccactttcccttcttcccattcggtatatgttattaatattattattattatttttatttttacttcttcagttcgctgggctctgcattcagcagaaacaaatgggcaatatttgtcctgggtgacctgtactgctccctggtccccccttattgtgtgcctgaagcttctggtggcacgccagtgatggctcttctactgtactcagacaaacctttcttccatgactgtagaatccagcaggggccaggagtggtcctccaagcgtggccaaggagtggctcagaggggagagcaaggatgcacaagtggtggggagcaggcatccgagacaccaggccatacctggggcacctcagagtcagtttgcaaggcaccccagtcttcctgctaagctgggtcagcgccttcccccagccgtgctactaccgtcatttgggaagcattgagatactactgccagtgatgaactgaagtgcatgcgcaaggtctagatgcgagagttgtcttcacctttctgcagtgtggggttgctgcttggagagaggagtgcttttaaatccctaactggcccaagcccctggtgcacagagacagggttcctttagttcctgggtgttctgtacaaacagtagacctcgctcatcagcaaaaagaaactcttcctactgtagctgagctcggttcagcaccctgtcctttagccgagacccgaggatgcctgagccacactgctactagagccctgtttgtcccttgccttcagggcctcaagatttccccaagagaggccctccactgcttcaccccctcccttatcctgtggctctatatgctcctccgcaaagatgtgcaacccgaggcgtgcgtacccctttgtccaccagtatctagtggctaaaatccaaccaccctgacttcaatggaagatagatattctagagataatgaaaagtgatatatgtatgaaaaaaacattgaggtatatatgatttttaattgtattagggatgtgtggacccatttaaagttgagattttatttactgtagagagagaaaaatcagaaccattgatcccatgatcttctaagtcaaacccagctcctacatcccttaggtgtttttattattattattattattattattattacaattgttattgttttcattgttattatttggggtttcttgtgttttggttttctttgcaactctccacactaaactcatgatactgtggggagaggccatgactgaaccctacgctgcggtaagatgtagcaggggttgctcccagcagcggccgccgccagggctgcaactggcaataatcactattgatttaaagctttatttagtctcatctgttccttcatagttaataaggtcttgccacattttattagtgagattgagagatgaattatttgtctgttgtcctccccgccttccctcccccaatattaaactgtgaagtttgtgattttgtttaaacgctgggtgaatcatagtgttagtttgcatgtccagctaatttgtttctatacattttgtttgattctctttctcctcagggcttttacaaatatatatatattatatatgtatatatatatggatcttctgaaaaaaattgaggtgcaaattttctcttttttgttgttttttgttttctctttaatggacacaatgctgatattcaatcactacataaaatatctggctgtgaaacaaaccagagaggccccacggggcgttatccaagcagctctgcagaagctccgtgaatcggataccgatttcagacagatcatcctgcgttcgtctctttcctctcttctctttcttcaagaaaaaaaagttgatcctaatgatttcagcccatgcattaaacagaaaacaataataactgtagaattcatatttttctaaagggaacttaaaaactgctgctacatgtatgtacaaaactggtctctgctacatgaacagaatcacaggtttggttttggtacttttgtttctctttgtactcagttgtgtagaacttccaaattcagagtgaaaagaaagctgttctgcatcaaaccatctaagcaataaatgttatatttaaaaaacg

SEQ ID NO: 389 - protein, 1690 aa, Mus musculus
LVQPRLLRQLCNTSPGDSQEQHVMCLLIRVRGGERVSECAEGSDLSSINTMMSAVMSVASVTENGGSPQGIKSPMKPPGPNRIGRRNQETKEEKSSYNCPLCEKICTTQHQLTMHIRQHNTDTGGADHACSICGKSLSSASSLDRHMLVHSGERPYKCTVCGQSFTTNGNMHRHMKIHEKDTNSTTAAAPPSPLKRRRLSSKRKLSHDAESEDPGPAKKMVEDGQSGDLDKMSDEIFHCPVCFKEFVCKYELETHMHSDNPLRCDICCVTFRTGLLRHNALVHKQLPRDAMGRPFIQNNPSIPAGFHDLGFTDFSCRKFPRISQAWCETNLRRCISEQHRFVCDTCDKAFPMLSSLILHRQSHIPADQGREKLQTKTLAAESLEQKAFLALLGLQHTKDVKPAPAEELLPDDNQAIQLQTLKYQLPQEPGCPTVLSVSPLDAASLGGSLTVLPATKENMKHLSLQPFQKGFIIQPDSSIVVKPISGESAIELADIQQILKMAASAPPQISLPPLSKAPATPLQAIFKHMPPLKPKPLVTPRTVVAASTPPPLINAQQDGCISPSLPPQSLKFLKGSVEAVSNVHLLQSKSGIQPSTTTQLFLQQAGVELPGQPEMKTQLEQESIIEALLPLNMEAKIKQEITEGDLKAIMTGPSGKKTPAMRKVLYPCRFCNQVFAFSGVLRAHVRSHLGISPYQCNICDYIAADKAALIRHIRTHSGERPYICKICHYPFTVKANCERHLRKKHLKATRKDIEKNIEYVSSPTAELVDAFCAPETVCRLCGEDLKHYRALRIHMRTHCSRGLGGCHKGRKPFECKECNAPFVAKRNCIHHILKQHLHVPEKDIESYVLATNSGLGPADTPTDAASRGEEGSCVTFAECKPLATFLEPQNGFLHSSPTQPLPSHVKLEPASSFAMDFNEPLDFSQKGLALVQVKQENVSSLLTSSSSSALYDCSMEPIDLSIPKSVKKGDKDTVVPSDAKKPEPEAGQAEPLSPRPPPCPTLSVTVEPKGSLETPTGTVVAVTTAAKLEPHTQPLQGSVQLAVPIYSPALVSNTPLLGNSAALLNNPALLRPLRPKPPLLLPKPSMTEELPPLASIAQIISSVSSAPTLLKTKVADPGPSITSSNTVATDSPGSSIPKAAATPTDTTSSKESSEPPPAASSPEEALPTEQGPAATSSSRKRGRKRGLRNRPLPNSSAVDLDSSGEFASIEKMLATTDTNKFSPFLQTAEDDTQEEVAGAPADQHGPADEEQGSPAEDRLLRAKRNSYANCLQKINCPHCPRVFPWASSLQRHMLTHTGKKALTAHQADLAIKEAKAAAAPSEEEEEKETEENPEPEEECRVEESTGAADAPEEDTNQSLDLDFATKLMDFKLAESEAGSVDSQGPAQQEPKHACDTCGKNFKFLGTLSRHKKAHSCQEPKEEEAAAPSLENEGVGRAVEGPSPSPEPEEKPAESLAIDPTPGTREASVAKQNEETEGPTDGEGTAEKRGDGDKRPKTDSPKSMASKADKRKKVCSVCNKRFWSLQDLTRHMRSHTGERPYKCQTCERTFTLKHSLVRHQRIHQKARHSKHHGKDSDKDERAEEDSEDESTHSATNPASENEAESAPSTSNHVAVTRSRKESLSTSGKECSPEERAAAEQAAEPSAPKEQDGETDPQSPAAIVQDLLELCGKRPAPILAATDGASQLLGME

SEQ ID NO: 390 - DNA, 90120 bp, Homo sapiens
  misc_feature (1)...(90120): n = A,T,C or G
ggccagagcatggagactcttgaatggcaggttaaagagcctgaccattagtctttttttttttttttggagataaagtctggccctgttgaccaggcttgagtacagtgacgtcatgctagctcagtgcagcttcgcactcctgggctcatgcaatcctcctgcctcagcctcccaagtagctgggactgcaggagggtgctaccatacctgcctaatatttaaatttcttatagagatgtggtctcacttcgttgcccaggctggtctcaaactcctggtcttaagtgatcttcccacttggcctcccaaagtggtgggattagaggcatgagccactgtgcctggcttgctgtagtcttgagaggatgagagtataggagtgttctggagctcagaagatacccaaagaggaggccgacatatatatcttgggtcccaagtttgctgccccccttcacctctgcacttttgtcttgaatgtggcctgtaccaagggatgcatccccccaccccggcttcttttttttctgtatcagagatgggttttgctgtgttgcccaggctggtcttgaactcctaacctcaagtgatcctcctgcctctccgtcccaaagtggtgggattataggcatgagccaccatgcccagctctccccaatctcttaggagtcccttctcacccaggaagagaagatcagagttggacgaagcagctcacggtgccccatggtgtaggggcctgctctaaggctcctgtcttaccaaagcctgtgccagccacgggttgccggtgtgggggggtgggggtgactttcttgggttgccgccctatccaaggcatagcctggaccctaagccaagaaacacatcaacttcctggaactcaaagccgtcatcacagctgtctcagccctcagagcacatgtgaggtggttagaagagatagttttgccccgagctttgcaggcagaacaggcatggccctcgtggaacatttagcctggtttgattctgtccccagcctagccaagactcagcccatccttcaagagatgcctttgctgtttgtcaagctccctcctggctcagaccattttagtgtctgatctcttaactaaaacttgtagcctgtcgtgggttggcctgaactggtcaactaggctcttacatagtatggatcagccatcccaagtatttgagggtgttgtggagactctgcactgtgcccatcctggtcaagtgttgtaaaacccactgttctgtcgtctgtgggaacatttttttcagggcctctaccatcatcctaggcatctaaacttattccacatttcctgggggccttaggacagagtttagatttcacttcaagaaccctcaggaggctggggcggtttggatcaccttaggtcaggagttcgagaccaccctggcaaacatggcgaaaccccgtctctactaaaaatacagaaactagccaggcgtggtggtgcacggctgaggtaggagaatcacttgaacccaggaggcggagattgcagtgagccaagatcgcgtcactgcactccagcctgggcgacagaatgagactctgtctcaaaaacatgaagaaaaaaaaaaaaaagaactctcaggtttttgcctataatcccagcactttgggaggctgaggcgggtggatcacttgaggccaggagttcaagacccacctgggcaacatggcaaaaccctaaaaacccaattttagtctcaactaaaaatgcaaaaattaaagttagccgggtgtggtggcacacacgcctgtaatcccagctacccgggaggcttgaggcacaagaatcgcctgaaccagggaggcagaggttacaggctttcagccttggcgacagaaaaaaaaaaagggaaagaaagaaaaaaaaggaaagaaaccctcgggtttttcagaagctgggatgcagcccttatctttcatctcttcattgctgtctccttagacctggagacctgccccttaatcttctgtttctggctttacatagcattgtcccgtatctcccccggggcttgggggctggcctttccctcctcccacagagggacttccgccctctcttagtcctcctgcctccgttgactttgcgtaaatcttgtgggagtgcaaatccagaaattcagcagcctccaccaacaaccagacccaggctttctgtcacacttcacctacaggagtcatctttagggtgctactagtctttcctttttttttttttttttctgaagcattgttgatggaggtaaggggtgtcttagagtttcttctaataactcttttgtacttttccgctcttcaagctctgtgactccctcaggcctaatagaacccaaaacaaacagcctcgtgaactctggctttatattgcaagacattctcaatattcaaatcatttacacccaagggcaagaggatggaagtttcaaggtcaagtctctcagcctagccctctttctctaaaaccatcctctccttgctgtcctgtgtgcttccaggacgctacccggtggacctttttttaaggtgtctttttaaaatgaagggaaataaaataaaatgaaatgaaggggaggcagcagatctaaattttaatggaagtcttagctacatgctagaaaatcttaattctagacacttgtttagactctgaagtgtgtttatttattgtatttatttatttttttgagacagactctctgtcgtccaggctggagtgcagaggcacaatctcagctcactgcaacctccgccttccgggttcaagtgattctcctgcctcagtctcccaggtagctgggattacaggtgtgcaccatgatgttcagctaatttttgtatttttagtagagatggggttttgccatgttggccaggctggtcacaaactcctgacctcaggtgatccacctgcctcagtgtccctaagtgctgggattatagatgtgagccaccgcgcctggcctatttatttatttatttattttaatttttgttatatctttttattttgaagtgtgtttttattaattatgagtaaaactatggttcatgctatttatttggagatcttggcagtttctagaaaaaaaccaaagggctattcctcttcaggctttgttcctaatgaaatttgttattaattaaaatatgaaaaaagaataactgcttttttttaagcaatatttaatttcaccttagatgggtgaagatagtctgaaaggatgtttgtgcatttctgaaaactccacgggtatttttcataaaatgggcttgattcatagtttacaagagggcaggtcatgtgtcacgcaaaacagggattcttaccctgctgtccctgggtgggtttctagggtccctgaccctcctggtactgaatgaaaatgttgagtatagagtatgtgcattgtttcagtggggtgggatggggggggtataatgtccagtttgagggtctctgcattcccttctgtggcacagggtccgtccctgtgggttagtcctgaggttcatggtgacagctgtgtggcatggatgggcagcttgtctgtagatgctccagaaggggaataaaagtgagaaaatatgccaagcagttgtttctcgcccggtgttgtccgtgtggggtttattttacctctgagttttctcccagttttgtgctcttcacgttagctgagggaggctgtgttgagagccagggaatgtggccacatgctgtagctctgggagatgctgcattccagttttctcccagcacagggctttgaagcccttgacaccccagagcagacttgctcaaacttttgaagggcatgtgtaatttgagatgttttctgcatcttccctacagaaaggaaaaggtctgcatttggtcctatttgacgtgtgttaccaacactttctcctcacacctgcgagaggatgtaatcatctctcctctactttaaggcactgtttagttgtatatttcttattatttattttttgagacaaggtctggctctgttacccaggctggagtgcagtggtgcaatctcagcttactgaaacctctgcctcctgggcttaagccatcctcccacctcagctccagagtagctgggactacaggcgcatgccaccacacccagctgatttttgtgttttttatagagacagggtttcaccatgttgtccaggctggtctcgaactcctgagctaaacgatctgctcagtcttggcctcccaaagtgcggggattacaggcatgagccactgctagttgtatatttcttaatttcttcaactgtcttatttttccccctctgtttctgatagcactaattgctgccttgcttttctcttgttaaactggcagtctgtaggtgtctgctgtgaacatgccattaggatgcacgaagctcccccccggagccagtggtccgagccattctcacatggtgctgcccttgacgttattggaatgtgcctgggggataggggtgttcctgtctgttcaaggcacactcagttccaagctcttacttggatgttaatgggacaactctggatggaatcagcctggctcctggcagcttgcttgtaattgcaggcaagggatgggaaatgttttctagtcctaattggtgactcccggtgatgttgagcagaggaccatttctggtcttaatcctcttttaacatcaccttttcttatttttgtaggttgctccgactgtgtgttccaggagtggtggctctgaggtgtgaccctgcccacgtttgggcccagccaggttcagccccccaataaggagggcagcttgataacacaaagaaaacaggttagtgaaacagttttcactcgcagtgagtcacaataatgttgaacgtcgagtcttcccatgccctcctctcctaccctcccctacctcccgtttaattgtcatgccatttccaggtcctcctgaggctttgttgcaaaatcgtgttgaaattgtaactaggccagacatggtggctcacacctataattccagcactttaggaggctgaggcggacagatcacttgaggccaggcattcaagaccagcctggccaacatggtgaaaccctatctctactaaaaataaaaaaaaattagccaggcgtggtggtgcgtgcctgtaatcccagctactcaggaggctgaggcacgagaatcgcttgaacctgggaggcagaggttgcagtgagctgagatagtgccactgcactacagtgtgggcaatagagtgagactgtctcacaaaaaaaaaaaaaaaaaaaaaaaaggaggaaagaaattgtaactataacttgttagttcttgatctgatgggcctgaaatgtgggatgagaaagggtgccaagggttcgtctcaggaagcaacactttggacatctctctctttttttttttcccttttctctccctccctcccctccaaatccagaccatgtgtgttaaaaactggaacaccaggttcatctgcttggtaatgttgatcatatctatgacttgggaacttcatctggtttcccagtgctgattccagttggaagagattatattagaatatgaccagtgatatttatttttaagagacagggtctcactctgtcgcccaggctggaatgcaatggtgtgatcatagctcactgcagctttgaactcctgggctcctgtgatcctcccactcagcctcccaagtatctgggactacagacacatgctaccatacctggcttcttttttcttttcttttctttttctgtctttcttgtctttcttgatggagtcttgctctgtcacccaggctggagtgtaatggggctatctcagctcactgcaacctctgcctcctgggttcaagcgattctcctatttcagcctcctgagtagctgggattacaggcatgtgccaccacgcccagctaatttttgtagttttaggggagacggggttttgccatgttagccaggctggtctcaaactcctgaccttaggtgatctgcctaccctggcctcccaaagtgctgggattacaggtgtaagccactgtgcccggccccggctgatttttattttgtataggtggggtcttgctgtgtttcctaggcttgtctcaaattcctggcctcaagccatcctcccacctcaggcttccaaagtgctgggattacaggtgtgagccaccacacctggccttattttataataataacatatattattactaatattggagtgatgtcagggagaagaaatgttgcagaagaaagaatgaaaagtctaggattgtaaatatccagaaagaaaaaaatgctttgtgaatagaccataaaaatgttagtaatggtcttttattccccgagattgagtatcagagggtttaggttggttagtttgggctgttgttccaaaattgtccaggatgtggttatagggtagataggaccaactaatactggccagcttgctctggttcgatgatcttgtagaagagcccgcatgttatggtgggttttttctaacgtagaacaatgagctccattgtgccttgcaccagcttcttccccttcttccctgctctgtggtcctgaaggaagaactcaaatagaagacataagaacaaactgaagtacaatcttgtcacagcccaaggggctggttgttggttccttctggaacagattctcagggatgaggccagtgactcttttctttttttcaaacagtgtagctatgagtttcattttattaattacgctttcagattagagatgagtctctatttttttttaattgttatttacttaaaataggaaaaggaagtaaatgtaagtgatcttggtgtcatcagtgggtagtgtcacactttatactttatccccaaggaagaaacatgtttagcaaatatcttcctgtccagacaaaatggcaaacaacaaggcttttctccttttcaagtgggataagcttttgcaattttcagcccttacattggttaactatactgactgttgctaggctttctgtgtttaagacacttaggtagtttgcaagaatgtatctttgataacatgactgaaaagaatttttactggcaatttggctctgtttagtgaatatatttttttcactttgcttattatttccctcctctccacttccttcccttattcaatgatagaattagaattttttttataacttaaaattttacatttagtcttaaaggtgtttaacctgttcccagacttgagcaaactctaactctaccacatttttctttcctttttctacacacatacacacacattttgttgtttgtttgtttttgcttttaaaatttgagatggggtcttgctgttttgcctaggttggacttgaactcctgggctcaagcaatcctaccgcctcggcctctgaagtagctgggagtagccctcttttctaaatgtagtaataggacaaaagcaagatcatcttcaaaactcatagtataaattggtggaaagtttgtaacaattacaggaaagagagatttctagtcagttatgttgtaattctctgtacattaaaattgtgagggagatatacgtatttaaaagaaggaggtgagttcagtattgaaggtatccatttatgaatcaagtatgtaattatgtgattgattacaaaaattctagggactgatgactctctttttagtagtccattaagaaaaaattgtgtgtacacactcatgtatgcactttgtgtctacatgttttttccctatagagaaatcacccaaaataaaccttcaaagacagttaaaaacagaaagtttgaaacacagttttttttttttcttttaattttaaaaaatcttttgtagagatagggtcttgctgtgttgcctaggctggtctcgaactcctgggttcgagttgaccctcccaccttggcctcccaaagtgctgacattaaggttgtgagcaactgtgcccggtgtgaagcacaattcttcataaatttaaagggtctgctagcatggggaaatgtcatggaaagatgaaagtatagatgtttttttggggggtgggggctgtagctttcttctctttatggagaaagatgtggacaaagaggctggatccatagtctcaaattgtatgtttctgcggttagtccttttacctaccagttggaaaaccatttgattcacatcttcaaaatgtctattgacaaggaaggtacattttatctctttacaagacaagtgctttccctaagattcccttttgcccttttggtaagaatttaggctggtactgcaggtttgtagctgctctgggtggtaccatttctcatatgctaggtcatatcccctaaagttggaggaggaagccatgagaaatcatattcttccttgtgttgttcctacacgttctctttacagctgagatgatgagcttgatcttcagctgctgttgtggactcgtagaatttattagcacacattgtgggataataggatcttaatatccaattaccttatggtagggcttcagctgtagaatatcctcctagttaaaatgagggaagcagtagacttcatacctactgactggacctgtagccataatagtctagttgcaaggaacgcacatggcctgaaaaagtaaattgtgacatggccatgggccatagttttccctttggtcattcttttcatgtcgccaggtttcttttaggtctgtcctgagagtgtctaaactcagcctttagtgaatgcctgaactgttttgtctttggtcacttttagataaaggcgtgagacgggtcaagtggagcctgagcatccttgcaagggactgaggcacagtgtgaaagagaatttgatgcatgggtataaatatgagctttagaaagtaaaattttactgcagagtccttttggctgttgggagtgtgcgtaacaggcagtactgtaggggttaagataaggttgagaaacagctgtagaatgtggttttggaagaaagaaaggcagacattgcctctcatttgtgctccttgcattgttgtgaatatagtggtctaagattatagccaataaatgatttcagttttttcttcactaagtgaaaagatgttcactttgggcctttgcttcccttccagtgtcaacgagtactaccaagagaagaagacaagaggtcaacacagactcattttctactccgtgtgaatgatagctacagcaggggaaagtttcatagtctatcagtgggtcagaaaatggaggtaatcagcagtgtggcgggagggttcttctttccctcctagggtacgttacctgctttatacatattttttaagaaacaggctttgatatgtcaatttgaaatttgtttgtaactctgatagcgttggcttcttaaatctcttataaaattcaggctccccatcagaatcactgtattgcagcagtggagttaaatgaaacctgatgtttctcatcactagttttaggtctggaacatttgtgtagtagtgaataagcctaggttcttaggagggtgctgcagggcggcagctttctgggctttgtcattgttggcttggcctttcccactctgcctaacccagattaggaaaggtagagaaacctgcctctcatgagtttgagtcctgttggtagtgcacactcagaaaggaggcaaggttacttcgtccttggtatgccaagacttggtttaaatgaaagcttccatcactctgggcgtgaatgtggcctttaactggagaaagacagcgttggatgtttttgacctgaattacaattagagtagccatggccagcgccccctggcaatgacagaagcctaaacttccccatgatcacatcagcaatttccaattttcagttttatagcagaggcttcttagaagcttaaacccctgtcccaatgacgtcaagttcgcccgctggcttggaaggttcagacctatcttccatcaacaccatgatgtcggcggtcatgagtgtagggaaggtcacagagaatggcgggagcccccaggggatcaagtccccctcgaagcctccaggaccaaatcggattggcagaaggaaccaggtaagtgttcacacctagtggtgacctctggtgggttcaatccatgagaacattgggagatgtttccgagtttcctatgataaaaccttggaagaattgggaataaaacggacatacccagaggccttgatcatttttcaagggcaaaatttttatggcttatgttagtttcctttcatggagaaggttttctttgctgtggtgtcgatgttggtggaagtgcccttatttttggccccaccattggattttaactcaagctttcttcacttgatggccatggcagggaacatcactgatttctgtgatgtggtttgtttcctcattcacacagctggctatttttaagtatcttcagattaggtagcaaataagtattgcctgtgctagggctgccgttcagctttctatccttgaaaaagcacagaatttggcttcagataattccagttaagatgctgtttagtcatcttggattttcattgggcatcagatcagaacagggtaaagtaaataggtggaattgagaagggttaatgctgttacaaaagttgatgtcttctctgttgggaaataaatgaatcttcaatgtaagatgggacatttccttgaaaagttgttgctgtcttggcaacatactgttgaacagaaagaaggaaggtggtggaaggaggcagagagtgaatacttctcatttcaactctggatccatgtaatacgagttgacttcctcgtgtttaaagtttggtttaactaatttaatgagactatactaaatccttggagagaaggtggtcttgcatttgtccaggaaccagcaatggatgagaaagcaaacctgctgggcttttgtaaactaattttctttttttataaataatcctactgtggctgtccttatacagaattctctgagtattaatatgatggttttctataaattcttagaagtagagccttaattaaggctttcgatacaacttgccctacaagaaaagttgtaccagccccaaaccctgccagcagtatgggggaggatgcatttctccacaccttgctgaaggatggggacttggcagagttcagtgatgttttagggttggaacattgattcctttctctctctcttttttcccttttctccttgtgcctctcttcctgtgggtgcctgagaaaatactcagcctgtatgactgtggcctgagtcgagaaggagtgctagctctgagaagaaaaggtttatttccactctcatgtgactatccatctatccatctctccatccatcagcccattggacaatatgtacccagttcctatatccagctagctactgtaccaggtgccaggcatttcgggaagaataagacagacaaggttgtcgtcctcatccttctgctctaccaggaacaagtgaagtgataggaagagcttttcctcaaatagctctgagttgtcccaagtccagcctccagatcagagaccgtggttagggccctggaggatgcccacagcacctcccatgtttgcatgctaactggaggctgcctcttcaggtgtgaggaggcaactgtgcaggtggggcagggctgcctttcatccccctcctttcttctccagggatctggtatgctgagtttgcttttgaaatggaggtcctggccagaggtagcctggtaaatacagttcttaatctaaaaaaacaaaactcagtggggagagagtatggggaagaaggaagcattctccttacctgtggactagacagggagtgctgagagacggagcctggggaaagtcccattggtgtgagcttagagttccaggagagattagccacagccggatgctgacaagggtgccagattgtttcattatggaatggttagttatcacattagctgctaattttatctttcagctcaggaggtgtgctccttccaccagcatggctgcaataactggattcagaattctccattagggtgctgggcgtggtggcatgtctctaatccctgctacttgggaggcagaggtgggaggattgcttgagcccaggggttcaaggccagcccgggcaatattatgagacctccatgtcctataaaaaacaaaaacagaattctccaggagggcctctcttccagtatcacagtgctgtcttttctagtaggttcattttattattattattttttttattattattatgttttaaaatagagacagggtctctatttctcaaccagagcatggttgattcctagtttcataaactatacagctaatgtgtgtaaactgtcttaattgctgtgatatctggctttttttttttttaattataaaaaaaactttttgcagagacgaggtttcactatgttgcccaggctggtctcaaactcctgggctcaagccatcctcccacctcagcctcccaaagtgctgggattacaggtatgagccaccatgcttgacatggttcattttaaaagattacatctgggtctgtagacctcctcccatataacttggattttgtggacctgtatgatggcctgcagcacagcactgccagcctcagagaaggctggggtgtcagttcatgagtcaccccagagtcaacacaagtcagccccaccagccgcacagtgtgcctgctgtctattgcaaggtgaatgcaagatgattttttaaacaaatttgtctccctgtggctggtcacttggaggcctttttttttttttaaaacatgtatttacatcctattgatgtatcaccatcctgttggtaactttaaaaattttgtgtatgtaaaattgcctatctactaatttgacaacaataccccggaggtggaactcatccccaacttttggcctggctgtgagacatccctccttgttatgtcttactttgttgctgttgcttttgtttctccccacacccgtgcccccatgggggtccttggccagctctactccgactgcagttgtagaactgggcagagaaggtatgacaccccctcccccattatacctcagaaagaactagaagtatgataaatgagtacgactgggaatttgttttttccactatctctaggatgttcatgttttgtagaatccatatccttaattctttttgtgtgaaaatgtagagcatacctagttctcagacccaattccatagattagaaaaaagttttggccgggcacggtggctgatgcctgtaatcccagcacttcgggaagctgaggcgggtggatcacctgaggtcgggagtttaagaccagcctggccaacatggcaaaaccccgtctctactaaaaatacaaaaattagccaggtgtggtggcgcacacctgtagtcccacctacttgggaggttgaggcaggagaatcacttgaacccgggaggcggaggttgcagtgagccaagatcgtgccactgtactccagcctgggcaacagagtgagactccatttaaaaaaaaaaagaaaaagttcctattgctcagaatgagacttgtttgtctttgaagaggagtgagagggaaggtggctgtgagctagacatcatcatgccttcattccacccgtctggtttatggcgccatttgcttttatagtcttcagggtgacttttattttcatcatctcccataagcaaccacaagagtgtttcctttccgtgccttggggttaatccttttggtcagactttatatagagcatagtggcttagggcatgggctgtggagcagctggcctgggttttaatgctgtgcctaccacttaatagttctctgacttggggcaggttacttgcctctgtgtaccccagtttccgcatccagaaaatgggatccataataatgcttgtctattagtggttgtgaaaaaaccctgatggttctgtatagagtttagcacatggtaagtgtgcagtaattggtgttatttgcaaggagcagaaactcattcaaatgaatgcaagtaaaaagaggtctattgaaagatgcccgaggataggaaatgacccagagcctagacagagcatccagccctagggacggtgccctccatcccgttgggttaacactgacatcttccacactgctttctcctggcttgggcttgccgaggtgcaagcctccttgggttcagccctacctctccatgaactttcaattcaagtgctcataatcacccaacttagtaacttagccatcctcaaacctgggcacatatcaccatcatctggggagcttgtgagacaaacagatttctggggttctactcccccaaccccagtcccccagtgactccgatgtggcacgtccagaatctggttaaatgcatagaaaccaaccccccaggtgattctgctgatcttcagaaatctctgagcatcccaactccaaattactgggagaggtatccaagcctaggtccagttagttttgggtattgagacaggaacccgtggtcttagggactgtgggggtgaggagtcaatgatgcacacagcctagaactctgcatgaattatttggaaagaggatctgtagcatagggttagtgaacgacattggctttttctgaaaaagacaaaacatactgcttgacctgtgcattctgagggaacataaaaggagccccctcaccaagtagtgagctggttcttttgtcaccttctgtggaagtcttcagtttgggttggcattcctatcaaagttgtcgtgataaggacagcaattttctcagtgtgatgtttttgttgagtatttatgagcagtgttaagcagatgctagcagtgggcaggggcatgcccactgggtgcacagctaggcactgagggcttccctctttgtagggtgggctcttctgatgagaaccttgttatctctcaggtgttcttggagaccctgaaacctgttgcaaaatagcccaggctggacttggggagaaatgtattcctttctagctcttccgtgagtcaatgcttaatttttcaccatcacagattattaagtggtgtctgtgtaattagaatgctagtattgattgagtactgactatgatcccagcactgttctagtgcttggcatgtggtaatttaacctgcatcacagcatggtatggtaggtggtactgtttttcccatctttcaaatgaggaaactgaggcagacagggccgtgacttgcacaagcttatacctgggcaggttctggagcccatgctctcagctacatagacacaagtgcttattacacttattacagaaagaaaaggcacttgttgactgtgagttgaaatttatcttcccttttaatctttctttttaggaaacgaaagaggagaagtcttcctataactgccccctgtgtgagaagatttgcactacccagcaccagctgaccatgcacattcgccaggtagattcccactgttcttttattttattttattttattttattttattttattttattttattttagtcaagtgcagtaatgagaagagggggaagagtagaacaaggagttaaacactcactgtgagcaatcagttgagataactcagtaccttcggaccagcctatttttgatctaaattattcttccttaagcacagggcagggtaattggattttaatggatgagctgtagctgtgcctaatttaaatttagttttttaaataattttgggaggtggttatgaaatgacttttgtatatgcatattcctgtgacaaagtcttaggtcaacacagaattcctttttggctgggtgcagtggctcatgcctgtaaccacaacactttgggaggccaagataggcggatcacttgagatcaggatttggagaccagcctggccaacatggtccagaccagcctggccaacccatctctaccaaaaatgcaaaaattagccaggcatggtggcatgcacctgtaatcccagttacttgggaggctgagacaggagaatcacttgaacccgggagcagaggttgcagtgacccaagattgcgccactgcactgcagcctgggtgacagaccgggactctgtctcaaaataaataaatctcaaaataaataaannnnnnnnnnnnnnnnnnnnaatcgctcccccccacacgtgtgtgtgtgtgtgtgtgtgtgtgtgcgcgcgcgcacgtgtgtgacggagtctcgttctgtcgcccaggctggagtacagtggtgcgatctcagctcactgcaacctctgcctcctgagttcacgtgattctcctgccttagcttcccaagtagctgggattacaggcgcccgccaccacgcccagccaatttttttatatttttagtagagacggggtttcagcacgtttatattagtataaacgtacataacacagaaggaaatctactcagcttggggtctttttttgcttttctcctttattatgagatttacccttcttctcctgctgtggccaattcatgacaaaatattgatgagtgtagaacagtgaaggattgatgacctagtaaaatcatgacatagtactgaattaacatcaagttactaaagtaactcgggtttgaatagaaatgttcctttttaccgtctttcagaggccaaaactctaccctgtgcaggtttcagttctctttctctgacggcaggcctgagtcatcaaatctgaagaagggacgttgactcctttaatggaaggacatatttccttcactgttgagtgtccttcggcttgtaggagttaatatatgtggtcactgaatctgtatgtggttcaaagcaagacctgggaaggctctacttctttctgagcctttcagtagaagtagttttcaaaacaatgtgggaatggaggaatatcatacaaaatatttatttgcctgttttcctgatacattttaccccttcagaaagatatttaaaatgaaagagaaacacatagccaagaaagttgattggtttttttaataaagctctggatctgcatttcctaagagctgagcttctgatgcactttcttaagtgaccgctgtgaccattgctttctgcagcacaacacagacactggaggagccgaccactcatgcagcatctgcggaaagtcactgagctcggccagctccctcgatcgccacatgctggtgcactctggcgagaggccttacaagtgcactgtgtgtggccagtcatttaccaccaatgggaacatgcacaggtgggtgagggcgccctttgcttggggggttggctggtacttggaggttggcaggcaggacagtggcctctgagccttcagaagacttgcctaaaggtacagagagttctggagctctgtccattgtatggaaaaaccagagatgcacactatctctggggtattagaggtgaagtgccttggcaaggtctgtggcccttcagagttcctcaggatgaaacacagagtcatttcccctctgccaattggagttggttgtttgtttgggtgctagaagtgggcagattatcacatgtaagagaggaactctccatgagtagcatccacgtaaccctgccatttaaaaaatatttgcatatgcctaccagattcctgacagaccttttcattgcaaataaaaacaaaaagtctgggaccttttaataaatagttaagtggactggtcctggagcttcaggataagataggataaaattaagaaaaagaaaatctgataaacatcaggacattaattcctgagagagaaagatgctcactcaagtgggagacagtagagtggtagacatattaaaattgtttggggtgaacctatggaaaatagagtttataggctgatcatacatgttttgaggggtttacttttccatattcctgtccagtccttattctgctttcttttaaaaaagttgagtcacatttgttacatgtttatttcaaaagaaaactttatataactactataaaattgatatgctagttatatttggttatataaacactaaaatgagttggaccagtttattacacgtacacatgggacatactgatacagcggttaagtttcttgatttgggaactaggcacctgaattcaagtctcaactgctacttgtaaattttctatcctcaagcaagttacttaacctctttgtactccagtttctcatctttaaaatgagattttttttgttttattattttctttcatgctattttgaccccccaaaacgagatttttaatcgtacctacatcactggataaggctgaggattcggtgctaattagtttagcacacagttcctggcacaaactaagcactcagtgtttattattatttgcgtttctaagtaatgctgcagtaatttaaagccagtgtatatctcagtctaaactcttagaagtgaggtatagtatgacttcatgaaaagtgaatattttaagaatttacaaagtgttttgctttttattttctcataaatttcagtcctgatgggttattctctttgcccctcatctcttcctgggactgtttttgggtacaaaggaattgaatagtgttactattttacaatacaatattttgcattttagctttttatttttttaccaccatgttggcctgttggtatcctttatttttgccttctgtttaggtctgctcgttctacaccccacacccccaaaaagtcctttgtcctttacatatttgcccttctcagaatctggtcctagaggtattgcctgttcccctcttgggggttccatcactttttcctgctgagcctctgctcagtggaactccccatgggccagctccaagttggcaggggcaagtgggcacattggtaaagaggcccctcctagtggcgttttggccctaaccactgaccactgtgatcctccatgagacatctcttgatggtaggcccaatcactcctgattcagacattttctattttgagacatgattgaaataaacacagctataaaaggcgtagttattgtcttctacaataacctgtgtggcagtgtgtttttacaaataatcattgctgaaactgtggtgctctgggtgtcatatctgtattacgtgaacacatgtctgtattcacttttcattttttttttttacatcttacggtataattcatacatcatacattataccgtgtaaagtgtgcacttcagtgggcttcaggttcttttttattgttaaataatagttcattgtagaaatatgatacattttacttatcccttgatcagctgatggacatgtgggttgtttcaactttttggttattacgaacaaagctgctgttgacattgttgtacgacattttgtgtgggcctgtgtttttatttttcttggtagacacttaggaatggaattgctgggtcatatggtaaatccatgtttaagtcgaggaattgccaaactgttgttaaaactttcaatttgggggtattgccatcataacaatactaactcgatctatgaacatgggatgttttcccatttgttaagtcgtcctgaatttctttcaacgtctcatagttttcagagtacaagttttatatcggttaaatttatttctaagtattttattatttttggcactattataagtagagttttctaatttaatttttcagttgttcatggctagttaaaatttatatattgattttgttccctccaaccttacctcatttattcattctagtagttacttagtggattccttatcctatatcatgtctgttattcattttctcgcctacttgccctggctagaacctgcaaaacaatgtcaaatagaagtgaagagaatgaacattctttttttgtttgtgatcttaaggagaaggcattcagtctttccccattaaatatgatgttagttgtgggttttttaaataaatgttccttaccagtttgagaaagtttctttcttttcctagttttttgagtgtttttattatgaaaaggtattggattttgtcagatgatttttttttttttttttttttttttttgcatctatggttgggttgtttttgtcctttattcttttgttgttgttgttgttcgtttgttttttttgagatagagtctcattctttcacccaggtcagagtgcagtggcgtgatctcggctcacggcaacctgcgcctcccggtttcaagtgattctcctgcctcagcctcccaggtagctgggactacaggcgtgcaccaccactcctggctaatttttgtattgttagtagagatggggttttgctatgttggccaggctggtcttgaactgccgacctcaagtaatccttctgcctcagcctcccaaagtgctgggattacaggtgagagccaccgcgcctcaccccagattttgtttcttcttgagtcagtttcaacaatttgtgtctttctaggaattttggatatttcatcaagtgatataattggttggcatacaataactcataatatccttttgtaatcctttttattctgtagttagtaataatttcctttctttcactcctaactataataatttgaatcttcttttcttcccttagtcaatctagctaaacatttgtaaattttattgatcttttcaaataaccaacttttggtttcattgatttccctctattctgttctctgtttcattaaattactgttctaaacattattattatccgttttctgctttctttaggtttagtttgacctttttccggtgttatagcaaagtataaggctggattattgacttgagaactttttaaatacaggcttttatagctatccattttcgtataagcattgctttagttgtttcccataagtttttgtatgttgtgttttctttttcattcatctcagcatattttctaatttcccttgtgagttcttctttgacccattggttatttagaaatgtggtcttcagttttcacaaatttgtgacttctcaaatttcttattaatttctagtttcattccattatggtcggggaaattcattctattaatttgttactgatttctagtttcgttccattatagttggagaacatactttgcatgatttcaaactttgtgaatgtactgagacttgttttatcacctaacatatggtttatcctggagagtgttccatctgtttgagaagaatgtgtattctgctgttgttgggtggagtgttctgtagatttgctgttgggtctagtaggtttatagcattgttcaagtcttccatttccttattgatctccatttatttttatgtactctgccttgtaaggattgtataattattatcccattttgcaaatgaggaaaggactaaagtaatagacagtgctaagatttgaataaaggatatctggcttcagaggccatgcttttaactaccacagattgagtaccccatatccaaaatgcttgggaccagaagtgtttgggattttgatttgttgtttttttgttttgttttgtttttttggaatatttgcacatacataatgaggtatcttgaggatgggacacagatgcaggtctacacacaaaatttatatatgtttcatatacaccttatacacatagcctgaacataattgtatgcaatatttttgataactttgtgcatgaaacaaaattttgactgggacccatcacatgaagtaaggtgtggaattttcacttgtggcatcatgtcagcactcaaaaagttttgaatattgaaacatttcagatttcagattttctgattgggacgcacagactgtatgtgagaaataattgatgtagcttttgtgtcactttgcatattagaaaaaaagcactctttcactcttttcctcattctcaacacaattctgtgctgttatagaacgttattttcaatgttaaactatttctgtcatcccagtagcatattctatgtatagtgagcatgggatagttttgggggcagccattttgactgaattttattactctgtgttgtttgggtttacttggatagtcttagaaattattttgaattttttatagcatagcccttggtactattctaagatacatttctcatttatggtcattgtattttggagttgtttataaatatttttttaaaagcaggcattggccgggtacagtggatcacacctgtaatctcagcactttgggaggttgaggcaggcccatcacttgaggccaggagtttgagaccagcctggccaacataacaatatcatgtctctactaaaaatacaaaaaattagccgggtgtggtgatgtgtgcctgtagtcccagctcctcaggaggctgaggcacaagaatcgcttgaacccaggaggtggaagttgcagtgagccgagatcttgccactgcactccagcgtggggaacagaagaaaagcaggccttggtgctacttgtttgtgctaattgttggttttctggtactgattttccttattttgaggcaccttgaatcagaggagaggactaaattggggctaagttctaatcttagttctgcagaactttgtggaaatctcttaaatttttgacactttaacagaatggcttagtattacctcatattgaacttgggctcagatttaataatgtttgtaaaagggttctgaaggtttacagtgtactatggacatgccctaggtagagggagtttctgagtctgtattgttagagctgaaaccaccgtaatgacaatctaaggaagtgttccactactagctgtgtgatcccagacaagttacctgacacctctgtgtcctaattacttcatctgtaaaaggtagtattatccgtacctaccgcatgggaatgttgtgatgatcagtaaatactacatgcaaagcacttggggtagtgcttgttaaatggtacatatcagtaatggttactactcttttattgttgtatgtgccagagagggaaaatatattgagtaaacattcatataatgccagaaaataaattgagtaaattgagagtgatttcttttaagtgtgcttgttttactttttgctacacttaatctgtaatttaagtaataatatatttgaaatactagggattatcatactacatttattatgtctttgcagaaagttgcaaataatgagttaaaagaacatttgggttttggtaaatcacataaaagtcattaccatttcatttgttagcgaaactgtacttttgaaaaaaattataaaaatgtgagaacacttacaaaaatgtgccagagagaatggagttagatttatttgccccggtggatctgttccagaatctgagactctagtagtgagctgtgatctctcccaagcacatacctgtgggcctgtgttacgttaatcaggggccagaactgccctgggatgtgtgtgcaggaattaaaaagagtaatgcaacccaggtcctgagaagtatgaaaggaaatcagtcgatctgtgagagtttagtgcttaagatcaaagttctttttcttgtttcccttccgctaccactgcttcccaaggtctgttggcacctgctgggattgggtagtgcacaggaattccctcatggggtctccagagccgatgctaagctgagggatcagagaacctctgcctcagcttcccaggacacccacacccaggtgcctccgttccatcttgtttgtaacccgtttgaggccctccctcaactgtgccagtttcatctgacatggccctgtgctctgatttttgactcttcccctgaggggcacagattgggtgggccctctgctgcggcatgattctctgtagcgtggatttctggagtttcatttctctgaaggcttgattccacaaggctggtctgtgctctgctcctcaacagcacagttgacaactacacagcttacccttccccctcctcctgctcaccccctgctctgaaggctgtccacacgcacacgtgggatgcacacctccgtgtgtgtgcacactcttccagatgagcccagccctccggtgttgcctgcttgaggcagatctgggctccaccccaaagttcgttgttttttggttttttttttcgttttttttttttgtttttttttttttttgctgaaacactcggcctcacaacacagactctgaggactacatcctttcaagtttcaagttactcttagctgatattgaggtgcctttatagagcaactcactctatttcctttggcctgtggtcattttatgagtatttgttagttatctgtatttgtaatgctactcagtctttttgtagagtttcctttatcttagttttataagaggacactcagaattgttatattggtcaaataaagtaaacttcacagaatgaaggtagcatattaaattatgtgtagtcattgacagttgctttgtagcactgataaagcctataacttactatacttttttctagtaaataaatttacttgatcttttaaaagtaattatattttggcaagtagggagatgagagtgatgctaattccaacttattttgagaaaggttaggataaagacctttttaatttattacttatattattttaatttattttgagaaaggttagggtaaagacctttttaatttattactatatctggtacagctttgtgagctgccacttgcctgtatgcagattctcatgtgtttgaggtttgaaaatcctttgtcccaagcctttctaaccacagctcagttgctgagcagaagagtaggttaccatcaagtacaaaacatgtagcacggaaacatcactgtggatccagcttttaacttcccagaactctttatcagttgctcccacgttgaaaatttggattgagtggtgctcgtcttccaaaacaaacttgggaaactgagccagagcacgcctctgggagagctcaatgtaggaaaaagggcattgagctttgcagtttgcaaagcttgttccaggaagtgctgagctgcaaagctgtgaagaaatgatacttgaaacagaggatagaaatgtgcctcatttggaataaagcctgtctctaaaactggtattttccttttaaaattgccttgggaaaataggaaattaattttcactttgctccttattttacagactgtagacttttaattctaaagagttgtggagcatgtcttacatttaagggcatgcttaagaccctggcaggggcaagctttcatgactaacttcactgattctttgaagagtagggatgtgttctgatttcagctgtcattagaatggtgaagatgggccagtactttgggaggccaaggtgagtggatcacttgaggacaggagtttgagaacagcctggccaacatggcaaaaccccatctctactaaaaaaacaaaaattagccagattacccataatcccagctactcaggaagttgagttcacttgaactcatgaggcggaggctgcagtgagctgagatcacgccgctgcactccagcctgggcaacaaagcaagactttgcctcaaaaagaagggtgaagatgaagaagggaaatccttggaacatcatctagttgtttcgttgcaggcttttttcctgcagccataggcacgattttttctgttgccaagtatgggagacataggccctgaggatgcccctggacatcaggataggcttcaggaagaggcttatatgttcctattatgcttgaagaaaatattagctgcgcagaaatgtgacctgctccatgacaaatgagaccacgaaggctctgaatttagcatgctactctaagatgcttaggctaagccagcccttggcgcacaactgcagttgggtatctggaacaggtggccagtattaaatgagacaaggagcagaggtagcacagtgtctctgaaagcaggggacagtcacttctttaccctcagttccccgcaagaggaagggtcctgtgaacttccatcatggtcgtatcaagtttctgaggacaccctgtatgtagctcgttctggcgcttgctgcttctgaagggtggaggtgaccactcaaaggttcagtcagtcccatcttaaaattaatgtcataatcaccaggtccctgtccctcttgacatattcttctgcaggaaggaaagtatcaggacagttcacatgggaataaattatatatttatttgtaggataaaaatctgtgggtcaccctgccccggactgtgtgaatgttttgtttcccttgaaatacttctatggaaaagaaaatcttaaaagcatttcagttgtctacatccaagggggaaggacaaatcaaaagcaaatgtccttcagggatgctcagagatcttaacacatttaactccacttagaaggacataaatgttctgtgcaaagactgttgaggggttcgtgtaaatgtgattttaatgggatatacgtagtcagcatagttgtatgaactgtatatatctccttatatatgttgggcgtttagtgaatatttggtactgtagtttcattatgataatacttgggtatcaaagcagttttcagcatatgttagtactctgaacactaaaatagacatacttctggtataatttagaaagcttttctttaagaagggctgaaacttctcttttcaaccagattaaaaaaaaatatgtaagtgtaatatcccattccatgatcattccacttaatatgcttttcactcttgagagtgcaccttggtaagaggcccataatcttccctccagagtggagattttccactagataagacatggagaaaaagagcggatatttacaaatctgtttattgcagcagaatgtctgggctaccagttccccccagtagcattattaagctttcaccacataagcttattgattgattaaacaaatttagcctttctttacatctcgttggctggatttgaaacctgggtgcttttgtttttacttcagtagtggtttaaagaagggcgacattttctttggtgcttctgagtcctctgatagctccgcctaacttttctggccagggctgataaaggatactccctggaatggtcaagagcctcaatttcttcatctttagtgggggtaacgtttactcacaaaatccgttagaaggattaaatgctgtaacatatactcaagcctctggctcacgttaggtgctcaacaaattgtagttcaaggccttcctttctcctctcccttaagatatttaacccagcagttccttatacatactagttcagcagatggatttactaaagtgagaaaatagactcccagcttcttaacaattggggcaacgtagactgcattctaagaacccaagaacctggtaacagtgctgtgtatcatgtgctgaatttccatggccaagttgtgcaaatccttattatttgaacacttgcctttttttcttcttttttgattgcttgttctatgatgtttacatatatatgtgtgtgtgcttgggttttgtgtgtgtgtgtgatttttttgttttgttttgttttgttttgagacggggtctcactctgtctcccagggtggagtgcagtggtgccatcatagctcactgcaacctcaacctcccaggctcaagcgatcctcccaccttaccctcccgagtagctgggactacaggcacactccaccatgcctggcctatttttatactttcttagtgtggatttgcattaatactattagatgagattctgtggttctttccagaatttttactttgcattttagaaatctgtgaataatcgaaagctgccactatcctctgagaaaaagggtaggcaagtgtgatctgtcactgaattttattcttcaaattagataaaaagtgtaagaaaattatcaaagctaaaagttggccaattttaattgacagtctcttgtgtagcctgttttttatttgctagacttgaccttcctcaaaacatttttcccttttactttgtgtttttttcttttctaataccctttaacaatcagcacagcttattttatatatatgtgtgtgtgtatatatgtatgtatgtgtgtgtatatatatatatgtatgtgtgtatatgtgtgtgtgtgtgtgtgtgtgtgtgtgtgtgtgtatttttttttttttttcttttttgagatgaggtttcactcttgtcgcccaggctggagcgcaatggcacaatctctgcctcctgggttcaagcaattctcctgcttcagcctcccgagtagctgggataacaggcatgcgccaccatacccagctaattttgtatttttagtagagatggggtttcaccatgttggccaggcgggtctcaaactcctgacctcaggtgatccgaccacctcagcctcccaaagtgctgggattacaggcgtgagccaccatgcctggcctattttatatttttgaagaaatatttgaaaaacctcttgtggccgatgcttacttttgatttagaatttctctctgaattgaattgaccaagttcatgttcagttatgccaaagagcataacaatcataaaactgtccaagtggacactgtcccctcagtggacatgttaagcaacaatcaagcctttttcgtcctatcactggttctcaaatttatgatctggttcataattagttttttatcatttggccaactggatgctaatatttataacttaagttttcttctgttttagcagagttgttgtcagtttgtgttttggaaaggaaatgcaaaataaattttatctttaatgcaagcagtacagtatttttgacatatcttgttgaggtatttcagcagctcagtcttaccgggtaaaactggtggatggcagcagaatctggaacatcgtgcttgcccacacttgaacagcaggcagtggtgagagtgagaaattaggttagggaaggttagggatgggcttgctgggggtaggatgactagcagagagctggcctctgctccggaatgcaacatgcccaggtgtcctctcccaccatgcccctcgtctgatgcactgagaactttgaacaggtcctgagtgtgtgtccggtttagtttcataactcgaaagtagcaaagtcaagagggagcctgacttccagcattagatcacaaaatgaaacctgcagggagctggcagcatttccaccgtagcacttcacagggctttataccttacatttttccgcctttgtttaaatatccaacctgtccgacctgttcgggctgaacaagctggtgctagcaaacaccgaagcgtgcccactcactgtcaacctttttctgatgtgttaaggaaggtgattagtggcaacattgtcccccccccccaacccccatcccaccctccccactgaaacatgaacaggaagcactgaagtcttagcctgtgtattcatgacacggatcctcatctcacctttggcatgtctgtgtgcctgtgggccatcctcagcttctcttggggctctgggatgcttagtggaaaggttgttggccttcagtggagacagattttgtatttccttaaaccggagattcagttgcataatgggttcattggtcctgtggtgtcagcacttaattcttccttttcatgcttatataacccagcttgctcaagaggactgctgttccaagtttatgggtgggaaaactgaggtctgccatgctgcaggttcttctggggccctcctctccagtttctgttggtagatggtgtactgttcctccctcgacatctctggagaacagaggccatgtgtgcaccatgtccatccgttttagataaaagtggctatagacggccttggtcatacagaagggctctgtcgcctggttggtcttgggaggtgacatttctctttggattcatttatattcattctctctccaatcttggttcccctttccttgccagcagtttctcagtggcccgtaagtaatataacacaacatccccagagtgggtggctttcctttttcactacgctgcttcttgcactcgcccacggcaccttccacttcccttgtgggcgcatggccgaccatctgggatggccccacccgtgcatttcttgttcctcttttggaactggctgaggagtagcagtgacttagcactgccctatcatgaagatagtcatctcttcctcctgcacagaaagtgagtaagtaactaggtcctgccttcttgaagacacctcaagtgatcgcctttcaagctgaagtgggaaatggcccgtgacttcagcacttccctcctcctacagagcttaggtgtggggattggggtgtatgattttagtcgttgccctgggaagctggtctctggtggccggcgatggcttccctcagaggggacagctctgggctcttgagatcactttgggaatgatgacttcagttggggcaccatcacctcagactgtaatatggggatattcagcatccctgctgggagaggccagccatgagtgtggggatttggaccccaggctgcatgtaaatgttgaggaaactgagggaggttagcctggggaagaagaagaggccatggcaacacagcagctgccctgaggtatctaaggcctgtccgtgggaaatgagagccttccactgatgtctctggactcacccaggaaggtcctagctggccgattatagctctatgttaatgagagttctctttgggtgagaggaacatcaattcatccaacttctgaggtcttttgtttgtttttaagaatgtctgactttgtatggacatattactatgtatttttgtggattttgtaaatagatatggggaccaaataacatgaaaatttattttagcaaaacacaagcaggcaagggaaaaagacaagcacaggaggatgtagggtgttactgattcaagggtagggcagttaggaatcatgtctagagtaaaagatttttaaaaggttagtgctggttcatgtggactgccaacacctctctaccccctactggatctgaaagtcaggagaggaggaaggagctgtagaagcagcagagaagggccctcagttttctaagtagacagtcattagcaagagaatgtcatccctcaacccttggcccaggagtttgaggctgcactgagctaggattgcaccactgcactctagcctgggtggtgcagcaagattctatttccaaaaagaaaagaatacatatccttcaggcattataattctagctcaatgcatcattaaggaagtatctgtaccaagaatgcagaagggtctttacccaggaccaagatagaaaaggaactgctctctccaaatactgccaaggaacctgaggtaggagagcagagatggtggtccagcctggagaaccatgaccccatgcctgggtttggagagaagctctgggctgatgagccgtggagattgagagtccaccaaagcgtttgcttataaggaacatgaaaatgaacccctggtactcctggacttcaaattaagattccttaacttctgataaaatttaactatccttatactggctcccttggaataccatgctacagtcaacagatgagagacgttctctattctggggacgtattgccctagtattgcagggaaagtgggggcttgtagaagacatccatgctgtggagcatgtggtctttatagacacctcccagaatggaggcagtaggaataaacgtcagtatcagccgcaaagcttgactttgtcatggcctctgtgggccatattgcccacatcagagactgtgggatctaactggccagtggtggtggctgcagtgtccggtgcatttcaccaggagcatcctgcgagccctgggagctgcctggctgacggcattcccacagcgagcctacagactgtgggtttacacttcatgccaggctgactttagatttttctaagggctggctttggaggtcagcacaggtgcttacgcattgtctaaccttcctccacaccctgggagagctggtgtgacctgccttccggacaagcatgactgaacccatacaacacctgaattactagaaggtgcctctgtactttacaggtggggccacaccaggaattgctcagttgccgccttgctgtcctccccccgccccctccctctctgtgtctgctctccatcccccatttgtttgcatagaacttgattggcattacaagcatcatccacagccctccacactgaactcctaggcatttgttaggaaaacatacacacatctttctagaatcatactttggccagaaatgtaggttgtgcagctgtgggggttcttaatcttattcgttccctctttgtttatcacaaagctttgttggacaaaaaaaagcgagcaccaggtacggatggggatgtctctataaccaggctgctagaccctgtttgaacctgttgcctccagcttggcaggtcctgggccgtgctgtgtgtgctttgtatacagtgtcctgtgtcctgacggagtgactttccttacggtaccattcactcagagtatcaaagaagttggctccttcattaacagtcctaggaggaaattgagactgaaaagttagcaaatactggaagtgtctagatttctcctgaggtttaaccttcacatgcaaattacatacggggagcttgaagaatgtctgagacctgctctgagggcagctatgactaagtaatctttggtttggatcacatttaaacttgttgagagtttcccaaaggattttgcccccaaaagaattttaagaatgttaaatttcccaactttttggttaagcatttatgcctggtaaactgatggagagactgctggtatattggaagatgagtctgggagatgtttaatgctggtatccaaaaaatgtcagtgtcctggtcaaatggttgaccgaacctgcaaacggtgcagagagctggagaagttcactgtgatcccatggttctcacacttaagcaggcttcagtatcacctgcagggcttgtgcaagccagactgctgggccccgacccagcgctaccagtctgcaggcctgggatgggactcgggggtttttatttgcatgaagctcccaggtggtgcccatgctgctggtcagaagcctacagagtgaacactggtgttctaggagactgacaggattgtccccattttaccagtgtggaaactgaagctgaggtagcccaagattctctggagtctccgtaattactaggtggcagaacagagatcacacgtctcaaatgtgtcactgctcagagaccacccaaaagcttcattgcatcacatggtctctgtctacaccatctttccacccagattcctgattgctgctcagagcaagccagtgcttggatagctaagagctttaccccattcccaaatctaatgacttccatgcctaaggaaggtccgcagaaagttcctgtatttggaactggaaaggagaacattcagggaggcagggagggagggtcagcttttagggattggtctgtctccctggagttattgaccagccttcagcccttgcacagggtgtactctttggtttaactctgatgttttcaatattcttacagacaacctaccctgctaaaatggaccatctcaaattttagaaagcaaatgattacacttgtgggagaaaagccatttaagttgaaaatcagcatctactcctagattcaaagtaggctccagttgtgccaaaaagtgctcagatttgggggttttttccacgtttaaaaaacatctgctatatttgtgttcgttcatcactgtaaaagcctctttgggtgttatgaataggataaaacttctcttgactccaaaagttctgataaaattccttcctaagaccacagtgcggtaggattcctactgttaaagtgtcatgcttccaaaagaaaattacagaattttatggaaaggcagaactatacttggattttatattaacctctctctacaatgagtgtaggtattgttttgaatgaacaaacatatgaattccaatacgaaaacattaacacatgtcctcagtgttcattgttggagtgttttcgattgaagtcccttcagtgtggcactgttcataatctcgtgtcatgtttgctcacaccaaattctagcaaggcaagttataagatgtcctggaacctgagcgtgtatgtcatagtaatactctgagtgaagcaaacattttctacatatacttcattccttccttccttcatttgtccattcaggaattcaacaaatatttatttgtttgttcttccatccagcaatttagcagatacttactgaccaacacctatgtgccaccagggctcgtgcagagaacaacatagaccaggttcttgctgtaatggaacttactttcaactgagggtgaggggacagtcagacgagtaaaatacatgatatcttcagctactgctgtgtgctgtggaggaaggaacactgaattgtgggtgtaagagcatctgcacaagtagggtgtggggcctcagggaaggctttgcaggtgaggcgcgtggcacgaaacctggacggcaggagccaggcttgggaaggtctggggtgcagttttccaggcaggagcagcaagcatcttgagtcccagaggcgggaactagttggatgcatttgagggacccacaggggctagtctgtctgaaagagctttgggatggaagagggcagggtgctccactattgaagtctagcagataggtggaagccagatttattttaattctaagaatgggactgtcagaggaatttaagcaggggagtggtatgattggtcctgtgttttagatgctcagtctggctgctggatagaaaatggaaaataagagagcaagaggaagagcagaggggccagcttaagatactaagaccagctggtaggaattcctgccattgctagtgtttgtgcaatgtatccattgaaacatgaatccttatatatggatctttgcacatttgttcagttattagaccttaagacagatttctaggagtagaattactgaggcaaagagcatacatatttaaaattcatatctctagtgctcagccactttgcagaaaggcagtcactcatttctactctcaccaacgatgggagagtaccagtcttctgaaccacaccaacaccgcatattgttaatgtaagactttctcaccctcgccagtctggaaggtgaaaagatgcactgctcaggtgcagaatggaggagatgtggtttgatagcagtaaatgaaggaatcgtggggattgtgattgacaacaaacttggtaggaactgagggtataaacacacccaatggaacccacccaggctccctttatgtaccttctggaggtcatagtgccagccatgtgccctgagctgtcagatcacatccagactggagtttgcatctggatccagcatttcatgaaggatacctgtacgctggagagcattccaaggttacttaggaccagtataattccacagacttgcaagcagagcttgaggggggctgttcgcttttgaaaagagaacgcattacagaaacgcagtagtcctcttacactatttgaagagctgccacgcagatgagaacatggactgatgttataacacagcatctcccttgaggacagatagacagaatttctgactcaatgtgagggagatggttttaacaattagaacagccagtgaaaatggagaagtccttgttggtggaagtgtccaagcagaactaaatggtgatgcctccagtctgctgtggagagggactttctatgcagagtagagggctgaatcccatcccagctcccttccagttcatgggctccttgtcatttattgactctcaggatgcgtggaaattagacaaattagcccttgaaatcaaccctgagagaaagacaagacccaagccttctaaggattggaatactctctttcccaccacccctaatttgttttggccacagcttgagggaaggggtcattagtgtctcatcatgatgatcctggctgcacttcctgtgagcttttgggaggaaatgaacagctccagttgccactcctgttgttggaggctagggaagcagagcaggggtcagagcagtggggagaatctctcactacatcaaatccatcgtcagacctggccggacccctccaaccctgcagttcacccgtgggctgaattgaggttgtcagtgcagcttttgctcatcaagcggctggaaggacaaagcaggaacttcccatgttgtacccggtagctggggatttcaccctgaaatggagcggtgcttgtgcttttgcacctggggctccggggctcagtgggagaactggagtgagccgctgtctgtcagactgccttggcctgctttggtcactctgccacttctaggagtgatgcagttcaagggcagccctggttttccagactaagccagaggctctgcagtccttgagcaaaactggaggtgggaatgttctatgcctgagctgtgggctcctcaccctcttcactttggtagtaactgtgccaccttgggccacagtccaccagagaggaagtgtccaggttcaggttatatccttaagattccagctggtgatccagaacagagttaactgactggcgtggtcttgggagataggttgggtttgggggaagagcatgagctcagagttggtgcacataggtcggctcaagctctgaggctatgggcaggttggcctccctgcacctcagctgccacatctgcaaaatggaaatagtgatctgtctaaggttcctactaggccctcaactaagtgttggccccagtccctcctttatgaaaacagcttctttcataaatcccaagaacaaaataattaccattttgtatttctataaatattgtgtcatatgattcaaaagatatagcttgaaatgggctcatgaactgtttacagttgtcaacctctaatttttaatattctcatatcaactgtagaaaagggcgtggattttgttaattaaaattaattttgagtaatttattgaaagggcaggtttgatgctagtttacatctcttatactttctcaactcttagatgctttctttaaaatgagcatttctaaaattggagtgtgaaaaacttgccagcctttcttttttgctcctaatgctgatattgagggatggtgtcctcaaatcataatcactttggaatagaggtgcttagaacaaagctacttgttcccattaactttcacaaggctttaggaggccaagaactaaataatggttgtctgtgattcttaattattattctatttctttcctttttttttttttttttttgagaccggttctcagtctgtctcccaggctagagtgaaatgacatggtcatagctgactgcagccatgacctcttgagagccaataccgtgccactgcactccagcctgggcgacagagcaagactccatctcaacaacaaaaaaggagagtacagctaaaaagagagcagaacttcttttcagaaggttgacaggatagctcatgaaaattttgctgtctttccctactcctgagaatttctcaagcaagataatcctatagaatagttattcataaaaagctgtggctatggtcctaaatctggcacagttcaaccacggctacgtgatgagggtgatgatgattgtcattggcaaaactaaatcatttttatgttgcaaaattaggaaattaaaactcactattcatttgtaatgtcattcgtttcctgtatatcttgggaccttgttcttagaatgtttgttttagaactcaataaagtaaggtcacttaagttgaataacccataagactctctttttggagtagacatgcacatattttatgtaatacttaactatatgggtagcctagtcctgtagatattagagttaccacatgtaactttttcattccactgtccgagttaactcttgtgatctataaatccacataatactacgaacaacagggaactgctttcaggtcttaagcactctggacatttgctctgttagcatgtctcaaatttgaccaccaaaatgcttccaaagcagaaaagagagatgtgtacaacagatagatgggcagtgggttcttggggcaaggatagcattatcacttagtttatgaactagtggaacagtttaggtatctgggaattctttattctatagaattccatgtcctaaaatggtactttttgtctgcatgagtggaacaggtcaccagatagtttgtttcatcttgttaatgtcagttaagttcatgaatgtcttccagtgaacagcaagacattaagcaacgcttttggacagcacttgtaagagctttaagagaggttcaaggagattatagagttttaaaaagatagaagtcactgtataaattatacctcatatctcttaactaaagaaaatttaagtaccagtgcctaaatataaaatattaaaaacataaatgaactgacttctttgttagatcacattgtgtgtgtgtttgttcttttcagacatatgaagatccatgagaaggaccctaacagtgccacagccacagcccctccatctcctctgaaacgtaggcgattgtcctccaagaggaaactgagtcacgatgccgagtcagagagagaagacccagcaccagctaaaaaggtcctcttggctcccagtgcagattcacctgctcaggggacttctgtcagaaataccactaatctttattttctcagtgtggagacttggcagacatacatcctaagctcttaacgtgtgttttcccatactgtttctgtaaagtgtctaagaaaagagtaccagtgtgcacttcctcttgagcccctctgctgagcccagagatgaaatgaagagcttttacaattgtttccatgctttctacctgttttttctagctaaagcgcaagcttcataagcattcgggactcttttgtcctcacttttttattaccagtgcctggcagatacccggtgctgcaaaagtacttgtcaggtgggtgggagggtgggtggatggatggatggacagatggatggatggatggatggatggatggatggatggatggatggatggatggatggtagcgttctgggagtatttgttgtgtgaatgaatgaatggtcaggtccttaataatcaggattggataatgcaacccttgccttttattattgtaaatctctgaatttagcattggcctctcttccgaagccatcccatgtgggagaccttcatgacttcacttttttccttttccctcagatggtagaagacgggcagtcaggtgacttggagaagaaagctgatgaagtctttcactgcccagtatgtttcaaggagtttgtttgcaagtatggactggagacccacatggagacccattcagataacccactaaggtaggagaaagagtgaactagaccttgttcattcctgtttctcctggcatgtgacaatgttcttaagtcccgttactccacaccgggctccagtgattgaacttgggcacaacaacattagggaggcagttaagaaagtatcggtgtggggaaaaagttggctgagagttgtcagagggtggctgtatccacagggtgttcacatggttcactgtgccttctttctctcagcaaagccccttgagtagtcaccagtgagcccctgaacactggggagtctgctatcatgggtgttcttggacaacagatagattttcttcgcaaaagatgttgcaactcaaatgactattagcaatgcatgaatatgtggcccaaacagggacagcccacgtgttggatacccctggcacagcactggtccatcataggcactccgaagtgtttgaactgagctggacctgatagcacagaaacctgagaagccattttggggtcagagaaagttctacttagtgcaggacacttggccaaaaatggaacctgatatgtttcaataaaaaagtgacaggtgattgctctgccatccagcttcaattgtaggggcttcgcagctccagtgtttctgatcctcagccttgccaggcagaaaacacgggtagtgacaggacttcccacaagaattcaggggactcatctttctttctttaccttctctgataactcatcaggcaaccgttagttctgtattcttgatgagttgatagatttggaagttattcctagagaattgccactttaaaactgttaactgccagagattttaagcattggaaagaacaaagaactacttaggaacccctgttgtcgttgagagacttgaaagtagcccatcctggaagtcacacacagctgcagggtcacgagcacacagcagggccatacacgcgtgcagctttgggttttagaagacagcttgggaatgcaggaatttgggcatctgtttgcctgaatccctgatatatggaccagatttccttcttgaagacacatgtttagctgtgacttaggaatgggaaagtctgagcaagctgaagacttatgttatagggaaaatccaaattgtacagtaacttgatgccaggtcaaatatgattatccttaatcacattagcctgacatttttccattggtgagggaaaaaggaacttacgaagaatttaaactgctgaacaattgaagtgctataaaatgtctttacggaactccccagtctcaagaaattgcctgatcattgggttgggcacagactggttgtcaggcctagaccccactcctccctctgctcatacaggacctcagccagctacatctgaacctgttttctcatccttcaaattgaaggagggcaggaccagataatccttgtgttcctaaaaccttatttttatttatttatttatttttgggtttttttgagaaaagttttgctttgtcacccaggctggagtacactggcgcaatcttggctcactgcaacctctgcctcctgggttcaagtgattctcctgcctcagcctcccgagtagctgggattacaggtgtgtaccaccacacctggctaattttttgtgtttttggtagagatggggtttcaccattttggccaggcttgtctcaaactcctgacctctggtgatctgccccatcttggcctcctaaagtgctgggattataggcatgaaccaccatgctcagccccaaagcctgcctcttaacagttgttttattctgtctaccaggaaaaggcatatggcccctccctgtgtaggccctctagttctgagagatttgggaaacttcacaggttcaggaatgttcacagcatccccaggatgtgggcttgtggtgggtggcaaatactgaaatagttctctagatcaaggacctgagtgagcagagatgacattaccagctgaacctcccaaagagaatcatgagcagaggcagaaacagcacaggggaccccagctcctgctcacgttcctacccagcagccttcagagccagtgctgcagtgaatacaggctgtctctgagcccgtctgtatacttcatctcacttcatattttattctgtgatcagataccaccttagaaactattatttacccccttctagataattctgttctgcaggaaaaataatgtggctcccacaagagatttctgagcagtccaagcctgcatagcatggtgtgtggcagcgatagaggcagatcaggtgtctccttctgaaatgctgacctgggtgagggacgaggttctcctggagcaatcctctgaacaaggacctgctccagggagaggccaggcttcctctgcacagaggttggagatgggcattgcactggacgctcgtcatttttttcatagttgggatgggtaggatttggtgggtgattaatccacagtgatggtagggctggtgctgtagacaggctgtgaagttgaaccctcagtcctgcacgtccagctagccgacctagaggattttcctcacctgtttactaataatgccctgtgtttggtgaggggttggcttaacaattttgtaacctgacagggacttggcccctctgggcaggctctcacttcgctggccccacagctgtggctgaggggtggcccgtaagaagagagttgccaggcatcctttgtgggggcacacaggccacccctgccctgtgcctctatctataattgttgctagatggggtggggctggcatctggaaaccaaaaagagttgattacagaacatggttaatgtccctttgctcctctctgctctgccgatccccataataggctgctatcataggaggcctggggcagcctgcgccagcggggcctagccaggcggtgaactgggacagtagctagtgggagagacagcttgttaacccagaactaaaatagacaccagctccatttcaaatcccagaggcagcagaaccacagtgggatgctacccgcttagactgaaggtttgtaactcaaaacagctgttgccttctcactctcctgcacttatcccccttctccactccccaccaacactggcaaggtgcccattgttccttaataaaaagtgttggaaatccaaactcatataaatctcaactccatttccctccactccactgtgtttcaaatgaatgaagtgttgtcgtagaacaaaaggaagacacaaagctgcctgtagagatgccagctcttaggatcaggtgttagcttcaccctgacatgaccaatggtcagtcatcccccttcccccagggctccccagatgagggagagaaggcagaggaggaagcggagtcaggctatggcgagctggcgtttggaatcggaggtgagggacggagtgttcaagagagcaggcggctacacagaggacatcctttgtgtgaggatgttgctgggcattgaatgtccatcagaatagaactgagcaactggccataccctgctgtgaatgaagtcagctgggagaagcatccaggtcagcccggccagcaagagaatctgggccacgcacgtccttggaattttctagtagccgttttttatttcatttcatttcattttgaggatctcgttctgtcacccaggctggtgtccagtgacatgattatgactcactgcaccttgacctcccaggcttttaagtgacccttccacctcagcctcccaagtagctggaaccacaggcatgtgccgtcacatgcagctaatttttttgtatattttgcagagacagagtctccctttgttgcccaggctggtcttgaactcctgggctcaagtgatctgcccaccttagcctcccaaagtgctgggattgtaggcgtgagccaccctgcctggccctagtagtcatgttttaaaaagtaaaaagaaagagacaaaatgaataatgcttcatcgagtataccagtatcatcaaaatataatgtcaacacataatcaatagaaaaatggtgagtgatgtggttcacattcttgcttccatgtactgactctttgaaatctggtgtgtgtgacgtgaccccagcccgtcttggctgcaccacaccagccacatttcaggtgcttaacagcccacagagaggtttcagatgagccacctacggcagggagggctgcagctttgacgcggagccatgtcttgtgtgtgaagaaggcccaagggcggcagctggatggtcaccctgttggcacagccactgctgagggtgaaactcggccaaagttattgtgtaatcttagatggccccctgatgaaaggagttcgggtaataagtaacgttaacatcatttcagttaaaatgtacccagcaaatgattgagtttgtactgtgtgccaggcacttgcccaggcttgaaggaaagagtgatgtttgagacagggtacgggctaggcacaaaacaagctggttggttataaaacaaagttcaggggtgagttcagggcccaggagggcacatttccctcagattccaggcaggcagagggatctggtggatgcaaaacttctccttgggattttacatcagaggctgtggtgcttcacttaatttcctctgggtcagggcccaaccgggtctggtacttcattgaccctggtcatctctgagttcaaggtgatgacattaaatctctgttgggaattggtacatagggagcccaagggggctctgacaggaacctcggctccatgagtagtgagggcagctgagaccacccccttcctgtatcttagtagtggggccaccaaagggaaatgccttctttttcctgcattctccactgttccaaggaatgtttatctcccttcaccacacgcctaccacctacagagaccccaagactcctcatgtacccgggattgatcccacccttgtcaaatgtcatcctaaaaacagggaaaagataaaatatttgtcagcatcttctgttgaagagtctgtgagtctgaggcttgggcaggcagaaacagattttaaacacttccgggggctatgaacagaggtccctcaaggaggggaagactgcccccacccctcacctgacaggtacagaagccttggtcaggactaccctgtcccccacccaaggcccagagcaaggagtggcccacccagcttcggtagccactacacaccctttgtgaagtccctcagactctgcccagtgcttcacgccacgctggtttggttgaacagtcagagcggggcattgggttgctgtgtgcagcctgggcgggttcctgggtcatggggagggacggctgcctggccagggccctgtcacagggccatcactgttgctcgcagcaactgggagagattagtgcagctgtcggatgtcagttctctgccccgagatgggcaggggagggtgggctgaggagagaagaatgtgtgagttggttgggactctagaggagaggttgtttgcacttactccttctggcctctggagacagaacaggaaaaatgaagcatgaaatcccttttgagaaggaatgccagtctctccattaaaacacaataatgaggaaggaattcagtatctgaaggaaatggtcaagctgagtggcagcttctcggcaggtatttcgcaggttcttctgatgagggttgcagggagcagggagtgtcagcattaggaaatgctcccagctgagccagcgtccaggcattaaggatgtgtgggtcacataaggagccagggcatctgcaaatagctgtcctctgaacgcacagcctggcagagtggaacgaagccagccggctccgtcccagcctgccgcctggcagctctgtgacctcgggcaagtgctgacttggtttccctatctggaaaatagatttgaaggctgttgtgaggatgaagggagataatccacaatcctcagagtgtaacaaatactaaatgaaatttttcttctgatactattatttagaatgtattttttatataaaattttatataaaattaaaatttttagatattttaaaccttccaacatttacagttataggtgttgtggcactctatggctatcccattccaatggaattgaaaaggagtcaacttccaggtgcgattcacttggcagagaacatgaaagcaatttgtcctttactcttataaacagctgtttttatctagttttcgcttttgtaaagattgggaaatggagtggctctttaaatttggtttgagtcttgcttcccacgtttcttaatcccactgtgtgaaaagcagatatttagaaacgtgaaggaactcgacacctttatgtaacagaacaacacatcactttccttagattgttgggggaaccctagggttctaaggaagtgagtttcctgatgtttgaaatttgccaatgcagcctttcaaaaatatgcttagcatagtttaaaaaaaagaaaattcacccttcttgctgattgtgaggaggtcagatatctgtccctcagctgtcacaatggtagacttgatggagttacatgacagagaagagagcccaaggaagcacctgagtggtttctcatctctgggccactctgttaaggcctgtttgttgactttgggattttcatcttattctggagagttaaggtcgccagatgaataaaatactactgttagtgagcactgggggagctaatcccaaaactgtttagccacaaggttaagaagttaaaaaaaaaaaagagacttttggtgtccttgttttccatttctgtaaatcacattgctgataaatttgcctttgggcatgcaccctgcccattttaggtactaggctcagttactggctacagattgcagattcccttttcagggctgatgcttttaacagtgatagttattcctgataagtaccttaactctgctgtgaggtatcaaaactgctggatctatttttggctgcctctttaccattactccctctagagaatgtccataccataacaacatatttacatatttatcacactgcatttctatcccagctcagaattgtgcaactttctttaaaaaaaaaaaaaaaaaaaaaaggatatcctgtcttcttccaaggacatttgctgtcagaagaacagatatctgtgccctgcctaaataggcagactgtgtagcacagacagccattaattcaatgctttttaaaattttagggcctcacggtggctcatgtctgtaatctcagtactttgggaggccgaagcaaggggatcgcttgaggtgaggagttggagacccgtctggccaacacggcgaaactccatctctactaaaatacaaaaaaaaaaaaaaaaaaaaaaaaaaaagcccggcacggtgtctcaggcctgtaatcccacctactggggaggctgaggcatgaaaatcgcatgaatccgggaagtaaaggttgcagtgagctgaaatcgcaccactgcactccctcctggctgaccgagtgagacgctgtttctaaaataataaaaataaaataaaattttaatttacttttgttttcttaagacttagtgaatctgagtgtgaataagaacattatttgttgtattaaagtcccttgaggattgaaaggacaaaaccccagctagcaactgagtgtattttcttgacctgttggagctggttggtcccacccctcgccctatgtacctcctgcctttggtgactcaggcacgtggtcaggcagtggctggcgggttgggtctctgtgacttcaggacagcgtggagttcaccagctcgtgtgggagtcagacttctctgaccatgttagcgctgtgccctttccagcccagcaagggtcagagccagtatgctgtgggatttggcttgtctgtttgatttttggaaaagggacagtaagggctgtgacagtgcctgtgtagtcactgacaaccacaggcacttctctaagcacatatcagagactctctgtgatcgtggttcccggcccctggtgttggcagccaccttcctgccatctgtgcctttacataccaggggccatgtagaaagagcttaccttatgacctgggagtcgtcttcctccactgggacccccagcccttctctctacttcaccctacccagtgccgccagggacattacagttgatactaagggaggaaggaagggatggaggataagtgcaggcagctgcttcacctctgctgttccagggagccccaattccacacaccccaacaccacagccccctcctaccatctaccctgagaactgctagagcccctccaccccataataggaacctccacagtggagcagccccactggaggcaggacccacagttcagcgactggcgtgtcatacagggggtggggaatggtccaatctactccagcactctaaagtttcttatcctcttacagaaacactggccaacgtgtgctagaatgcaggtgttttctgggtgaaacaggctcttgtgcactgtcttggtacagaaacacttatttctgtgagcagtgatttggagttcacatatgctaagcagctcctgtaagttgaggtcaggctgaatgtccattttggattccgtgtgtaatctaaccttaatctgtcatttggagatttttccactgatgattttttttttcttcctaaaagtaatgtagtgtgattttaaaagaaaaagaaagttttgtttttgaaagggtcagtggggttttgttaattttctttaaattctacaaagagatacacttcccccaaatacatttactttactgacagcaaagttagtttccatttggaaaagttatcctgtttccaacatcgagttatctctgttgccagaaaatcaaaaggcagccaatccgatttgtaaacctttcctctggcacattgtcaagatctcttgcaaaacgaaattgtcctacagccctcccctctcctgtggctctaagtgcagttctgccccatctaaatattaatattttgcaatcgtgctctttatgagcccctggcagagtggagatacgccacagacgggttgaggagagagtcgtggggaccacctggccagtggctgtggtcttaatggagattgacaagcccaaaggaggtttgcaaataccctgatgcctgcagccggctttgcatccagcagctccctccacagatttacagtggcctctattgtccttgaagagctgcttagaaacaaggttgcaaagctttctccttggggccttgggaaggctggatgaaccctcgcgtctccacctgatagggctgatccaagtgtttctgggtggtggttttccacactggttttatttaaggtctatcaacaggtgctgagtgtgaggcagggaggcaagtgtttttctttttttttttttgagacggagtctcgctctgtcgcccaggccggactgcggactgcagtggcgcaatctcggctcactgcaagctccgcttcccgggttcacgccattctcctgcctcagcctcccgagtagctgggactacaggcgcccgccactgcgcccggctaattttttgtatttttttttagtagagacggggtttcaccttgttagccaggatggtctcgatctcctgacctcatgatccacccgcctcggcctcccaaagtgctgggattacaggcgtgagccaccgcgcccggccgcaagtgtttttctgtgggtgtttcttccttttaaccagctgcaccacatgcttctggtttcaaagcagaaatttcttctctgccactttcatgttttatgtcttttgacttataggagtgccttagttgaaattccatgaaaagggtgtgaagtgtggatcaccttgcttagactctgttaggaggttgagtgcttgtgcaggctgggagagcatgcacttcttttcaggaggcaggtgaagggagcaggtgggatgaggcagaagactggccagaaagaacacttttctccccatgagttttgcagttagacagaagtagtaaggacgattgtgaagttcttgaaagtgagaagagagaacatgttcctttgaaattaaaactcaggttttcctgatttttcacgttagctaaaacgtgccaggaaacgggcttttcctgatttctttttttccctagtacaataacataatgactaaatttggaaaagtactttgcagttttcaaagcactttgttattcacagtaactgcagagatccccccgttttagatgagaagggaaactgaggtgtgaagaaggaaaggaacaggagagaagtgacaaagatgagtaaagtattggtaatttcttttctctgggagttctaacattctaacaggcttgtagtttaagacgtttctagatagcagattctcacacctaactcactatattttccaaacttatctaactataagaatccgctggtgtgcttgttcatatacagattcttaggcccatcttctagttattctgatttcagttggtctggggtgatctaggagtctgctttttttaacaaggtcatgtggggattcttatctcttggcatgtttgggaaattttacatagccggcagctgaagtgcacatggaaataagttgtccaaggtcacgcaatctgaactccctgatccccacctggtgtctctggtccctgagcccacatccccctaccacccactgttccacagctgccttcccagggacacagagtttgtgatcaatactgaataattctgccacgtctttattgtcatgccttcatcacctactacgtatgaaggtgtccagaaacaggagggatttaagggtgagggagagaatgaagaagacagacacaggcataagagacaaaaagaaacctcaatgttattaaaaattcaagccaggtgtaggggtgcacacctgtagccctagttactagggaggctgagacgggaggattgcttgagcccaagagttcaaggccagtctgggcaacatagcgagcctgcctcaaaaaagaaaaaaaaatcactacaaccatagaggtgcagtaaattctaaatctaattgccatattaagaggcattcattctccattcccttcataaaacctacttattaatgccagtcacactaaatattcataaccaataggctgtgcactagtacagaagtctcaaaagtggagagtagccaagcacagtggctcacacctgtaatcccaacactttgggaggccaattcaggagcattgcttgagcccaggagttcgagaccagcctaggcaacatggtgacaccatgtctctacaaaaaattttaaaaattagccaggcatagtggcacatgcctatagtcccagctatgaagggaggctgaggtgggaggatcacttgcgcccaggagttcaaggctgcaatgagctatgatcatgccactgcactgcagcctgggcgacagagcaagactctctttttaaaaaaaaaaaaaaaaaaaaaaggccgggcacgatggctcacgcctgtaatcccagcagtttgggaggccgaggcgggcagatcagctgaggtcaggagttcaaggccagcctggccaacatggagaaaccccgtctctactaaaacacaaaaattagctgggcgtggtggcgcatgcctgtaatcctagctactcaggaggctgaagcgggagaatcacttgaaccggggaagcagaggttgcggtgaaccaagattgcgccattgcactccagcctgggcaacaaaacaaaactcttgtctcaaaaaaaaaaaaaaaaaaaaaaaaaaaggtgaagagtattcaggaagatctctaggatacaaggaaaaaaatatattttttatctcacccttttaaaatgtctatttggtaatgtgcctggcacattacatatatgcaaatacatatgtacataaatacatatactacctacgtacacacatacacattctcagctaaacaacaaacacatgtggagcacatacgaaaacttttttatagaagcggtacacatttcagaaagtttgcagccacctctcagtcctacctgcctgccttttgcagttgacttgtatgctacgaaaagtctcttcccaacctgtttatgtctgtaatacttgtaataatttcttataatttaattaaattttatataagctgatggaatgttgttttaataaaagaaaagaatagtctctgtggaaacttatgttggaaaggcttagttacagtgcagattggacagaatattttttttttagttgctgtcaaatttaggctaggtaagatacctgtgcacagttgaatgccataatcgtaaaaatctaggattctgctttagtttggcttgcaaaattctggtataataaactcgatgtacccttatccagtttcagggattatcaactcacagccaattttgttttctctcttccccaacccaggtaatttcaaaacaaatcccagatatcctatgttttatttataaatattgcattatatatctttttttaaaaggaacctttttaaaaagcatagccaaaatattatcataactaaaaaattcagtcacttgtgaatatatcaaatatctctgatcagagttagattttcccaattcagacatatctcttatcctttcagtccaatatagatctttcagccaagtggtggcgaggtgatggattggcgaccatggggagggtgcaattgaacttgagcatgggggaaatgaagtgggggtgggagaaggaaggagctctatctccaggacagaggctgttgttgcctccaagggtcactgtcctctctgtgtgcacagctcagagcttgaacgtatttcagccagaaagaacctcacccagaggggctgtgtccattctgcttccccgcaggatctgtctcatggcctgtgatttagaccgctgggtactttgacatctgggcccgcagtgtgaggacttccagcccctaaaggtgttcttcattatccagatctgtcccttccctgggccttgaccacagtggtgagctcagcagaattccctcaaaaggaactctgtgttttgagtggctcatgggaacccgggtttggggttccaaaggtagctgagcagtgacaggagagtgctcaggagaggcccttcctgaacaggggagccaggggaggagcatgcacagcaggaccgggttctgctgtgcccgctacagcgcgataaggcaagcagggcggcacatactggcacttcttcctttcagtgcttcctgaaagtgagcacagctgcttcgtggctgacttcgttatctctttatttccagagaagactctcaactcaaaaaagttttcactgatgtacatgcagtgtggacgtaagcaagtggctttgcctggctaaaacagtgataaaaggagctaccttagcggtggtgagggtcagatacgcttgcacacataaatacatggaatgatgctcggtatacagcattgtccaacagaatatcctgtgatcttggaaacatactgtgtctgtgcttcccgatgcagttgagcccttaaaagaaggctgaagtgactgaggaactttaatttaaatttgaatagctacatgtggctttggtggctactacattccatgcaagtctaggggatgttgataataccataacgatggtattttgtttttatccacccatctgcacactgatgtaaaatttttaatatggttctcagtgaagacctagaagacaatactggtctgaaaagcagagacaatattataaagtggtgtttgctatgcatctgtgtggcccagaacatttaggatgtcaaagatcatctctgaaatgaagggtcagattttgaagtggactgcctctgtgggagtctttcaaggaaggggagacagccttgtgataagcatgggtgggagcaggaactcaggctgacattttgtgtgtgcttcttactggctgtggggcctgagtcacatcgcttcgtatttttgatcaccggtgttcatctggaagatgagggtcatgatacgcacctgcctgctggggttgtcatatgtgctgagctgtcagggcgcctgggctcagtccatgaggaccatggttatcattcagataatgatgatgctaataccacaacttaatgcacaatcaccatcacttctaattagattggaaaatttaataatttttatccctatcagatgccaaggatgctgattgattgccctagatactacttaaatgtatgctcttctgacttttaaacatttacaataattagaatccagtgaactcagggagagagaaacctctgacatgatcccattaatgcctgatcgaggcgagagcgagcaggtcggccatggtggcttcaggatcccagctgtcttcttgtgctcagactgtgggtgtttaggtcgtacgtacaccttgtgctgcctgcaaagatttggtatccagaagttgatagaatacaacttttttaaaaggaagaggtttttggtgctaaccatgcagcctggcttcttgacatcatatcatttttattttactcaattgaaatgaatcaacaaaaacttaagtctggaagagtggaaactctgacttaactgcttcctcatatgctctccctttctgcctcatatgttctccctttcctctcctagatgtgacatttgttgtgtcacctttcgaacacatcgaggactgctgcgtcacaacgcgcttgtccacaaacaacttcccagggatgcaatgggcagacctttcatacagaacaacccttcaattcctgctggcttccacgacttaggattcacggacttctcctgtaggaagtttcctcgcatttctcaggtattctgatcagcccatggaagcaaccagcaactgccttccatggtccacacagttagaccatgggaacttcctctcctcagggtttctttccttaaaatgtcggttgggctttgtctttttttgtaacaccttttttcttaaaattattgttggccctttcggtctcccttgggttgttgggttgagaaggctgcataggcttgtttggggttgaatatcctatgaactgtgcatcagtctagctcttctgtgccttttgtccgttcttgggtctttgaggtttaagttgtcagttgtagaccaggccccagtggctcacacctgtaacgccagcactttgtgaggccaaggcaggaagatcatttgaggtcaggaggttgagacctgcctggacagcacagcaagactttatctctacaaaaaatttaaaaattagccaggcgtggtggtgtgcacctagtagtcccagctacttgggaggctgaggtgggaggatcacttgagcccaggaggttgaggctgcattgagccatgatcgtgccactgcactccagcgtgggtggcagagagagattgcctcaaaaataaaataaaattttagggccgggcgtggtggctcatgcctctaatcccagaactttgggaggccaaggcagtcggatcatgaggtcaggagttcaagaccagcctgaccaacatggtgaaaccctgtctacactaaaaatacaaaaattagccaggcgtggtagcatgcacctgtaatcccagctactcgggaggctgaggcagaagaatcgcttgaacccgggaggctgaggttgcagtgagtcgagatcgcgccactgcactccagcctgggcaacagagcgagactccgtctaagaaaaaaaaaattttttttttaaataaaataaaagtggtgaattgtaaaacaccccagtcctatgataatcggaattcgtgggattttaaaaaaaaatctttctttactatctgcattgcagctaaatattccagcgttgtggtttctattaaaaacaatttgggtcattattgacctgaataagaaaagagccatatatattcactgctaataaagcacctgctaaaactactttgaaactggctgggcacaatggctcatacctgtaactccagcactttgggaggccaaggcaagtggaacacttgaggccaggagttcaagaccagcctggccaacacagtgaaaccccgtctctactaaaagtataaaaaattagctgggcatagtggcacatgcctataatcccagctgctggggaggctgaggcatgacaatctcttgaacccgggaggtggaggtcgcagtgaacccagatcatgcctgggtgacagagcgagactcagtctcaaaaataaataaataaaactaaaactgccttgaaattatttttttccccattttaaaaagttgagatagaaggtatcaacagtgttgttgttcaagtgtacaaggtacaaactcaatggattgttccatatacacacacccatgtgtgtgcaccccccaggagacattcctcatagaccctcctaggcagcatcccccttccacaatcatagaggggtagggtagctgattctccaacatctctggacctcagttttgcaaggcacccacttttacaaagagaattaattctacccttgtggtattgttacttaactatacttcagaatctctagtgagataccctgtgggttgatatcagttatcacgcaaacatgattcttaagatgctttgtggatttccttattcagtccagtgtgttagcaagcaggagaaggtcaacttttttttttttttttttttttttttaaggcagagtcttgttctgttgcccaggctaaagtgcagtgtggcataatcatgtgtcacttcagactcaacctccttaagctcaggtgcttttcctgccttagcctcccaatagctaggacacaggcatgtaccaccacatctggctaattttcttatttttttttatagagacaaggtcttgctatgttgcccaggctagtcacaaactcctggcctcaagtgatcctcccgcctcagtctctggagtagctgggactagaggcatgagccaacacacctggctaatttttttttattttttgtagagatacgggatcttgctatattgcccaggctgggaactctttatgttatggggaaaggctgtgtactgggataaatgtacaacaaatactttgtgcatctccgtttagtgattattttttcaatcttcacatgtgttcccttgcttttaccggtgggttctatataggcctggtgcgaaacaaacctgcggaggtgcatcagcgagcaacaccgttttgtctgcgacacctgtgacaaggcgttccccatgctctgctcactggctctgcacaagcagacccatgtggcggcagaccagggtcaagaaaagccgcaggccacgcccctgcctggtgacgccctggaccagaagggcttcctggccttgcttggcctgcagcacaccaaagacgtcaggcctgcccccgccgaggagcccctgccggatgacaaccaggcaattcagctccagacactcaagtgtcagctacctcaggaccccggctgcaccaacctgctgagcctgtcacctttcgaagctgcttccctaggcggttctctcacagttctccccgcgaccaaggacagcataaagcacctgtccctgcagcccttccagaagggcttcatcatccagcctgacagcagcattgtggtcaagcccatctctggcgagtcggccatcgagctggcagacatccagcaaattctgaagatggcagcctcggctccccctcagatcagtcttccgcccttctccaaggcccctgccgccccactgcaggcgatcttcaagcacatgccccctctgaagccaaagcccctggtcacaccacggacggtggtggccacctccacgcccccgcctctcatcaacgcccagcaggcttccccgggctgtatcagccccagcctgccgccaccgcccctgaagctcctcaaaggctcagtggaggcggcctccaacgcccacctgctgcagtccaagtccgggacccagccccacgcggccacgcggctctccctgcagcagccgcgggcggagctgccgggccagcctgagatgaagacgcagctggagcaggacagcatcatcgaggccctgctgccgctgagcatggaggccaagatcaagcaggagatcacagagggggaactcaaggccttcatgacagcgcccggcggcaagaagacgcccgccatgcgcaaggtgctctacccctgccgcttctgcaaccaggtgtttgccttctcgggggtcttgcgtgcccacgtgcgctcccacctgggcatctcgccataccagtgcaacatctgcgactacatcgccgccgacaaggccgcgctcatccgccacctgcgcacgcacagtggggagcggccctacatttgcaagatctgccactaccccttcactgtcaaagccaactgcgagcggcacctgcgcaagaagcacctcaaggccacccgcaaggatatcgagaagaacatcgagtatgtgagtagcagcgcggccgagctggtggacgccttctgcgccccggacaccgtgtgccggctgtgcggcgaggacctcaagcactatcgtgccctgcgcatccacatgcgcacgcactgcggccgcggcctgggcgggggccacaagggccgcaagcccttcgagtgcaaggagtgcagcgccgcgttcgcggccaagcgcaactgcatccaccacatcctcaagcagcacctgcacgtgcccgagcaggacatcgagagctacgtgctggccgccgacggcctgggccccgcagaggcgccggccgctgaggcgtcggggcgcggggaggacagtggctgcgctgcccttggtgactgcaagcccctcactgccttcctggaaccccagaacggctttcttcacaggggccccacccagcctccacctccccatgtctcgatcaagttggagcccgccagtagctttgcggtggacttcaatgagcccctggacttctcgcagaagggcctggccctggtccaagtgaagcaggaaaacatctcctttctgagcccttcttccctggtcccctatgactgctccatggagcccatcgacctgtccatccccaagaacttcaggaaaggggacaaggatttggccactcccagcgaagccaagaagcctgaggaggaggcggggagcagcgagcagccctctccctgcccagcacccggcccttctcttcctgtaactttggggcccagcggaatcctggaaagccccatggcccctgctccggcggccaccccggaacccccagcacagcccctgcagggccctgttcagctggcggtcccaatctactcctcagccctggtcagcagccctccactcgtgggcagctcagccctcctgagtggcacagccttgctgcgtccactgcggcccaagcccccgctgcttttgccaaagccccccgtgacagaagagctgcccccgctggcctccattgcccagatcatctcatctgtatcctcggcccccaccctgctgaaaaccaaggtggcggacccagggcccgcaagcactggcagtaacaccacggcttcagacagcttaggaggttctgtccccaaagccgccaccaccgccacccccgctgccaccaccagcccaaaagagtctagtgagcctcccgctccagccagcagcccagaggctgcctctcccaccgagcagggcccagcgggcacgtcgaagaagaggggccggaaaagggggatgaggagccgaccccgcgccaacagcggcggggtggacctggactccagcggggagtttgccagcatcgagaagatgctggccaccacagacaccaacaagttcagtccgtttctgcagacagcggaggacaacactcaggatgaggtggccggagcccctgccgaccaccatgggcccagtgatgaagagcagggcagtcccccagaagacaagctgctgagggccaagcggaactcgtacaccaactgcctgcagaagatcacctgtccccactgtccccgggttttcccttgggccagctccctacagaggcacatgctcacacacactggtaagagggccaccgggctcccaggcagtgagtcctacttcctggtagggggagccacgagtgggggtcaaaagcgagacccatctcccacagttccagttattcctagcttggcttcttccccggtctccgaagccccgagcttgtctggtggtgctgtatttcctatgtgctctcagtacccacatggcctttgtgcaggggccgagccctccaagggcagcattctactaagtgttcatccggggcgttttgaggtgaaagtggtcacaggccctcagatcactcatggcgtcgcctcatcccttccggaggtggtagccagattatctgctgggttaaacagggaggcggctccacagacgtgagactttgtattaaggtattggggcataatgagctcggtgctttgacattccattccagtgtcctcaatgcagctttttaaattttgacaattttgtgaagtttttttggatgccatgtcttcttaaagagaaatatgacaaattgtgaggttggctgttttctttcagttcactaaggcagtcacatcttcccctgttgattgtgaaaatcagcaatgagtggtggtagaatgttttaaaatttctgtttatactacaattgtaagcctttctgagaaacttctctcagaagggcctggcgctggtccaggtgaagcaggaaaacaactccttcctgagcccttcttccttagccccctacgactgctccatggagcccatcaacctgtccatccccaagaactcacacccaagtgtgaaaaaattctaagtaacaaacttaaattgtcaaagtgataccccaaaagtatcttccttttttctttttcttttttttttttttttttaaataaaagagtctcactatattgctctcaaacttctgggctcaagcagttttcttgcctcttcctcccaaagtgctgggatcacaggcatgagcccccacacctggccccaaaagtatttttctttttttgagacggagtctcgctctgttacccaggctggagtggagtagtatgatctcagctcactgcaacctctgcctccctggttcaagcaattctccctgcctcagcctcccaagtagctgagattacaggcatgcgccaccatgcccagctaatttttgtatttttagtagagatggggtttcaccatgttggccagactggtctcaaactcctgacctcaggtgatctgcccaccttggcctctcaaagtgctgggattacaggcgtgagtcactgcacctggcctgcccaaaaatatttttcaaatgttagtttctagaagctgatttttaaagagaagtttagaataggaatatactttaaataattttgttatcaggtgcttctagtatataaatggccatacaactctcatctgaattataattttctaaattttctcagtgaacagtctcagtattcagtgatttgtgttattgaactaagcgcaaattagtgagatcctatctttttggagtttacaaccaaaatattaataaatagatagggcctaaaaccaaatggtactggattggtgaataaaatacagaacaccagttaaacttgaatttcagatagacaacaaataatttttagtataagtatttttatgtagttcttgggatttactaaaaaattatttgtttatccaaaattcaaatttagctctgggcatcctgggttttttttgtgggtttttctttttgcgctaaatatggtaacccaaggtagtcaggaggtttatgacaggatgttgagggtgggttgtgggaattggtgtgagctgtgctctgtgtccaggtggaaatgcattcacaaagctttggagaagctcgtggaaggatgtttctcctagatgaggtggaacagcaggagggaggtcatggagccaccgctggatacctgaacagtgtgcagaatggagcctggggagggagaggaatctgggagccagaggggagttgtggctgggagcgataggactctcagtggctgcactggtcaccagagcttgccacacagacacggcatttccttctgctgtggtgggtccttgaatccagggattgaggagtagcaagtcaggagtgcctatccagggaggactcaaggagaaccaggatttctagatttgtaaagtatgtactgccctttcataccactgtctccctgttaaaatagtttaagcctgacaagtaaagcaaccattctaatgatgacagcagttcagggaagaaaatgcatcttcaagagaaggtgccccttatagcaatgtcttttgctacccttttttgggtgccacctgtttatcgcctactgagagtttatggagaagtgagtctttctgttaccacttttcagaaagcagatggtctggatctgatgattggcttggctcgcccccttcctcggtgctcccacctccccctgctgtcacccaacctccccatcttcctcttctagtattttcttttttaagagttgtgcccatgtctttgcaggtgcctgatatgtgttcccatttgtgaatccagtcatgattgcctggcttttgaatgccaaaatgtcagtgttggtttaaaatttagtagcatctgaaactgagcaagaaagcaggaggtttgtttaagttaggatggggtagatataaatataaacattctgcctcttgtcccttaaaagttattgataaccttgatagatgtgtctgctttggcgcagtccctgtatcctaccataatatgttcttggtagagctagtcttcatgacaatcctgtgagggtgatgtcatccatgtgttgccacaaggaaattgaggtttacttttaaggagctaagtaacttgcctacagccatatggggaataagagatggagctactgttccaagccagggtccggttctgtgcaactgcccactggtcagggtgtgtgtgcccagtgtgtcctctgtgtgaaggcagaaggcgggcagagtgcaccttccatgtctccctgtgttcccacatgtccacattgcagaaggtttggaagtagtttgagataaggggggacaccactgtggatcagaatgttattagctaatttcagacttaatgactacagaatcgtgttagccacatgcatagacactgtatgaaggttggtgcccattgagctccattaatttcctttgctgggcttcactctcagcttccagggatgttcagcatcaccactgctaaatcatgttatatggagcacttggctacatccagtgtcgtgttagagcattttccattcacggagcattagagctggaaggagcctgggaagtcacctgatggcccctcagcccacagacctgatctttctcctggtaggcagctctgctgtcactcagaaccacatggatccttggctccctaggcttctgtgaggcgctgtctccaaaactttgaaaaaagtcttgagtgtacacatgttaaacattgactctgcagccaccctgcaaacaaaggtgttattcggagaagatgttctgtggggtatttttgttttttctagttttttgcttttgtacagacaaggtctcaccatgttacccaggctgttctcgaactcctcagctttgcaaagtattgggattttaggcgtgagccacggtgcctggccgttttgtgtttttgagtacagtgttaaaatctagctgagttccagccagaagcattgagcagcatctggttttggactgcatttaaacaaactgtctacaccttgaatgctggcctcctcctaccccctcagcagattactgtactgtctctactttgtctcaaaacacgtgttctccagtcctcccagtcctcaaaggggcagcaagaagcagatccggtgttcagtgtccaacgaggggtatacctgctggctgctggcaaggagcatgtggcctcagccttttcttgctcccggctcaggttccaggaactgtgtttgatgaggaagctggcagggctgtcatttttcataccccctggcacagtctccacacacacctgcctttcctccttccttccactcctctccagctctctcccagaccatactttcctgctgatgaggacagttcctggttccttacctttctctacctaaacgcgccactccataggagacaagagtgcactgttcctgcctttacccctcgggagcatctcgtgtgtttttaggccacaggtggaggagagggtgccaggaaacacagccagtctgttctagcctctgtcctcattttcttcccccttccctttgctccagttccttgtcccacagtgatgggcttgggactatggggtgtccattccgggcttccctggcttgcttactttctcatgggtgctttgagcgccttttttgagccggctcaggctttccccccacaccctttcctccctgctcctatctggcagtgagggtcagagcttcggtcagtgagtcatccaaacctgggtgtggaaagcacctgggacaccacttgtatttggctccttttagctttcttaaaagacagctttggccgtttgtacccagtcctgtgtacacttctgccaaatacagagagaaaataccaaaagaaagaaacctgcctgcaggggtggaggagcaatggagagaaggctgggctgctcaggctgtcatcttgttacaaaaagaaaagcaactgcaaggttttctatgctagttagaccccacctttctaaccctgattgtctttgaaaaatgaacagaaatgttttcagttctgtttttttttttttttatcttggaggccaaggccccaatctcctcatcaaactattctcactgttcactcttctcttgccccaatgtccttcttcgtttcttgactgttctgggagagtaaacactggctaattttttttgtttgtttttggaggtttttttttttttttttttttttttttgagacaagctctcaccctgtcacccaagctagagtgcctgtgtgcaccctggctagagtacagtggcatgatcacagctcactgcagccttgaactcctggctgagttcaagtgatcctcctgcctcagcttcccaagtagctgggactacaagtgcacatcaccatgcctggctaatttttttattttttgagacaaattcttgctctgtagctcaggctggagtgcagtggcgtgatcttggctcaccacaacctctgcctcccgggttcaagcgattctcctgcctcagcctccagagtagctgggattacaggcgcgcgccactgcacccaactaattttttgtatttttagtagagacagggtttcaccacattggccaggctggtcttgaactcccgatctcaggtaatccaccagcctcgacctcccaaagtgctaggattacaggtgtgagcctccgtgccggccttttttttttattattatttgttatagagacaaggtctcactgtgttgcccaagttggtcttaaactcctgggctcaagcgatccacctccgttggcctcccaaagtgctgggattataggcatgagccactctgcccagctggctgatggtttaagcgctcgcgttggggcttgcagaatgctgtaggtcctgagtgcgcaggtaactcactgtggttacaggtgcttttacaaatccccttctaaagcagttattcgtggcagctaccaaataaatagaatcatttgctactttctatatagatggctggccaacaagtgtttttgaaacctgcgttattataaaatactaaacgggcccgttttcctgcatccctgcaatccagagagcccaccactatgtaaaaatgtcagacttacgcagtgaaatgtgagcttctaatgactcacgtgagttgttatgtcactttgggagcctttgtagtttgatgcaatactttcacatcatggattgttttctgaatttagcattaatagggaccttctcatggggacgtcagcctggcagtcctaaccaactgtaaaggtgacgcacttaccagtgtgaaaattacagagtaaaccatgtgacaggggggagcgagaagccgattgttttctttgaaatcaagaatcctatcatagtagcttcttacttgttttcctcttggcccagttcttttctcaatctggccagactcagagaagcagcagtgttaccttttgacaataaaatgttaaaagtactttatttttacttgaaattattaaatactgtgttcaattttaaatgaaaaacaataagtaatttttttcattttattttatttttgagacagagtctgtctgtcgcccaggctagagtgcagtggcacaatctctgctcactgccacctccgcctcccaggctcaagcaatcctcccacctcagcctccccagtagctgggattaaggtgtgcaccaccatgcctagctaatttttgtatttttagtagagatggggtttcaccgtattggccaggctggtcttgaactcctggcctcaagtgatctgctcaccttggcctcccacagtgttgggattacaggcgtgagccaccgcacatgaccacaagaagtaatttggaagacgcaccatgaacactgacatactgtacaactagtcacactttttttttttaatgtggatgttttaaaaataaattttgcagaaaacacctgcagaatgatatgaggagaccctgaaaacagtcagtggggttctccacttttgttcaggttgccttgtggagctactcagaagcacacaggccggatttctgggtgtctgattctgccctttccgggtttctaattctgttgtctttgattgttgcatctttattcttaaaagcgcctgaggagatttgtaagcatcatcttaaagggtcttttagctcaggagggaatcaatgtcccctgtctctgattattactcctgatgtgaaattgtggccatgctgtcatgggggcggtgccaggtccacaccttcaggctctgtatgaatggcgccccctggagtcgtgtgacacagccagtgccggttaaggctagtccctccttcccctgggaaaacacgtggcccctctggctggtccccaggtgccaggcccttgctgtgcattcacaggggagtgcgtggccttgggcacctgcactagttcaggcttctatcgacattaatctaacgccagaggcccctgtgatctgtgtttccagggagctgtgtttaattgtggcaatcctagggttatgagacaaaagtactgggccccagctctgaagtcatgttggttaacacacaaaaccttttaccctgtaacattagcaactgggaccttggactccagcaacttgggggaaagggaggaattcagtgatacacaagtgatgcaccaccaacttccgcctcctgaaggcccctgatcccctccctcctcctctcttttcctctccacctcctttttcccttgtgctttctttctccctcacatgcatccgcacaaacccaggacaagttgtagaggagcttctattgcattttgaaacatgatgtttacagcacaaaaggaatccaagtaaaaggagagggtaggcagaccaaagcaggaggggactgtgcctctctcagtggctcacccatctgtgcgtttgggatgggtctaggggcgaggcagggctgccaaaatgtcctcttcacatgcacatctgttgagtggagcacatgatcaaatgcagacatagttacgtattggtcactcatttgcaaccaagcttggagcagggggaacaaagaacctttaatgagaagatctcctgactgttgccacctaggaccacagtgaacttgaacagaggtcactgcaggatgtctcggcaagtcagacaggagttgtcctgggaagtcagaactcactgctcccgttcccctgtgggagggacacagccaccaaggccaggaagggggactggccaccctggctgggggctgtccctgacttcttctcttcatgggcccccaaagatacccaggggttccccattggatttcctagtgtccatattacggtgtccttgccacactagaactcgttagagggcgtctttctctttgtgatagaatataggtgttttcttgctgtgctctaaaatctcttcattcgcttttttttgttgtcgttaatattttaattgtaataccgttgttttactttaaatgtatatttttcagtttcatttattttagtattttgaggacaaaaattcatattccattcaacttaggaaaagggagaatgatcattttagtcattgatggtttttttttttctaatgtgttttgttaattttcttgaagggatggaggaggggggaacaactgccaatgatcccaggagaataaacaaaagcgacttttctatttcattgcagtagaaagccagataaatatatattttttttcctgcttcaggtcagaaacccttcccttgtcaaaaatgcgatgccttcttttctaccaaatctaactgtgaacgccaccagttgcgcaaacacggagttaccacctgttccctgagaagaaacgggcttatcccccagtcaaaagagagtgatgttggatcccatgatagcacaggtagtgccgccaggtgaacaagaacccaggaagagggagagagaggagttcggttaagaattgtagcaaactccagtccgagctgtggaggggctgcttgttcacttctctgtaggattcagagcccacagcctgttaatagaaaggcaggccctgctgatgattgggagggagtataactcctgggtcagatcgcctagacagacagcagaaaacagtgacagtgcccctcggtgactctcggggctgctagggaagatctgtcaccctcttggcagaagaggcctttgttcccgatgttgggaggtgggatgtatgggaaggcttacaactttagccctgggtatgaactcatctaaaggggatgtgaaacctaaaggtttggggagccttagccgctgcagcctcctcgggagcaggcctgggctccctgggatatcagggtattgtaggaacgaggggtgcggtgttcttcttttcaataactctcttcccggtgtaagactgtccttgtttgaaaaagcactgtgcatgtcctttctttaatcacatctctgcttgacctgaatccgggtattattctcctgtgctgatgtgtgcttcctccctccagcacccacagagcaattaacggctgcccgatacgtcttgtgccaccttgtttcccttatagtttctgaatttactcatgtcctctatcagtacactccatccgctcggactgctggggttctccatcctcacccccaagagcaaacaaaacgaaagccagcctgctgcaggccacttagatatcccgccagttggcactgattagtaacagggacagcatcatggtgctgggtccagttttgcaagtcttgaaaacctgacactatcttgtggctgcgaagagatccccccagctgtgtttttttagggttgtatttgcgtcctgtggcttctattcctcagactagggtggagatggggtgccctgtagttacgaggcacccctgcctcaggagtcagtgtggaagagggttgggcattaatcttagccccttgtccttaccttggttacaggggtacagggtgtatctgaagtggagaggccaccctttgcccatctctacgcctcccactgagccctagtgaaaccaactgtgagtgctcttgactgcccaaccgccagtctagatcagatcctctgagggtatgaaagggtaagctggtttgttcactgcttccccagcttccacttccacataactcaccagtatctttgagtgaagaaagatgtgggtgcccacggaatcttagcctaacttggacccctgtgagccaaagatgacctggagttcagcccactggaagcgcacaccagtgctggcaggcacgcgtttgctgcagaccatcctgttaatgtttaaccatcagccgccacattacctgttagtctggaacattttctttcatcctggtttagaaagctgccctgtgatcttcccatagtggttccacagtagcgaaagcagccggtaactgagggagctgagggggagcccttgggtttccatgtttacaaataagtcttagtaactccgtgctggatgtgcattttgcattcagcttctttatcataagggaggaacaaagactggggctcctgctgacatctgcagacacaaagctgagtcggaatttgtggtcttagcttcggttcagcaccaagtgtatttataagtttgcagtcataggttttgttgtccaaatcccaacaaagccctttcccacctccaccccaccccggaagttatatagggttccttgaagggacaaagcctctagaaaaagaaaagtcactgaaagttgtaatgtgaaaccagcaaagagaaaatacatgtttggtttagttgtggtcacagtccatggtgagaaaagggactgagatttaagtgggagggaaaagtttagggaggcagagtttagtgatttcaaggaggattttaaaatgcagatgagcatgatggacatggggtgaagccttcattctgggttccccccccccagtgaagtttaaaaagtgaggctttgaaggaagaccacttaaaaaaaagggggggggggggaaggaaatgaccaaggaggtccttgaggggttttctaggcttgtatgcctaggtggcattttcttaaaattcctacacatgttttataatgtaggtctgacatttttcagtctcataaagtcccccaaaagaatgctaaaaatgccacagtgggggcagttctcccttaaaggtccattttgaatattcaaatttcaactgaaattcttcattcactgtcctggacagagaggcagcctggccccctctgcccttgagggatatgcccttggtccttcctccgatgatgccccgtctttgtgtttgtaggcacctacatagggctgtttttaattcgtataaacatgaaagtgtttaagctctcccttaatggtggccgcctttaccagcccagaagtcccacatgtcagcatggactacacctcaggaaaccctctccatcctcagatgctttgggtggagtgcagacacagcagcttcccctgcaaaggcacccctgccaggtcagataattacttaggttggtagtctgtcacagtggttgaggctcatttaatttttaggaagcaatagatctttaattgttgagctgactagggctgtctccacagtcctgtaggaggagctgcgggtttattatctaccaggattccttctgcttcctctaacagttttcttagttgttgaacaacacaaaccgagggactgatggggagagggaagaactgcatatttttaaggtagcattgcttataaaaagtcatcagctcagctacctgcatttgggagtctgggtgttgagggcggggatttatacagcacctggccttataagttgagtattcatgataggtgaagaggtgaagttttttgttcatgagaatcactaatgaaaatcagttgtttagaatgtgaagggcacagcctacactgctaaaacactccccctagtgggagtttggtagaatacaaccaagccccctgtgtccaaagagggagttggcctttcattgtactccgggtgatctctctccattatccgcgcaaaggaagggcccgagagcaggaacaatttgatcttatatttctttgggttttgtttcaaaatttattttactttctttaaagctctatcatgttaaatatgttctgtgcagttaaaataatgcatgttctttgctgaaaaaaaaaaaatagaagtgtagtctaggatatactggggacaaaggggaagtaaccagagattaaaccttcttttaaaaattaccagtcgggcgtggtggcgcatgcctgtaatcctagcccttttagaggccgaggaaggtggatcacctgaggtcaggagttctgagaccagcctggccaacatggtgaaaccctgtctccactaaaaatacaaaaattagctgggcatggtggctcacacctgtaatcccagctacttgggaggctgagacaggagaatcgcctgaacccaggaggcagaggttacggtgagctgagactgcaccactgcactccagcccgggtgacagagcaagactccatctcaaaaaaaaaaaaaaaaattacttacaaaggccagccacagttgcttatgcctataacctcagcactttgggaggccaaggcaggaggaccccttgagcccaggagttcgagaccagcctgggcaacatagggagaccctgactctagggagggaaattacccacaaagccagcaaacaaattgagcgttctgtatttttattgtagagtttataccaatatccattctatagatgctctctgttgaaatgattcaagaaaaacgaacatctagtttttccttggaatgtggcccagacattggtgtgcatatcccaggactcatattctttaagcttttggataattttgcaaaatcatttcttctttaaaatgttatattcacaccataatatttctttctgaaacctcttgagatacccaaacagtggctgccaaaaagtgcagtcagtgtaaaactaatgaaatgaaatgatgtaagtagccgcgttatgcagatggctgtgggtaaagcctaaagccccaagcaggtgtgaacagtaggtactgtctcctcagacctcaggacggggcagaaccagctccttaccccagccctcctgaccgccttgatggcaaatcatcaagcatgtgacattgaggaggtgtgatggatgcaggttgacattgtagttacacctgatcacgtcaagtgagaatccaggttaggtgcgtgaatctgctggctcaaggactgcaatcacatctggcctattgagggaggggcatctcgtacttgtgccataaaacaatgactttcatccacccaattatcagaggaacttgaatccctgcagtaataaatcagacagtggccgggcacggtggctcacgcctgtaatcccagcactttgggaggctgaggtgggtagatcgcctgaggtcaggagttcgagaccagcctggcgaacatgatgaaaccccatctctactaaaaatacaaaaatcagctgggcgtggtggtgggcgcctgtaatcccagctcttgggaggctgaggcaggagaattgcttgaacccgggaggtggaggttgcagtgagtggagatcacaccattgcactccagcctgggcgacaaggcgaaactccgtcttgaaaaaataataaaaactaaatcagacataggatctgcagctaaataataggtcccaccagcttccaatgtactgtcgtaatgcataattttaagaagttattaagtcttctttcaaccttagtaaagagaaggccttttgacactgtttgatgtgaatattgcagccgtgccatcccttaaaaggactgttgaaaactgataggctttccacatacagttttactgggtggaatggacagataggaacaaatcaagaggcaggaagtcagggtaggtgagatgcctggaacccagaaccccttgtcttcacaggcacccacagcccttcacagtccgctcccctcactgtgtgctgttgccaagcctggcatcaagggtgcccttcctttgaaagattccaccacccctgggaggctgacagctaggaagcctacaagcttgcctgcgcccccttgggtctctgcagcctccacctggagatgagcgtcaggcaagagtgtgcataccatacacacacaacgcaggcttggggtcgtttcctgtgaaactcatcaagaccatgctttggaggattaggggtaggggtggtcctgtgtatgttgcatgtttgtatgatctctttgcactggaaaaataacttataactcaagcttcctcaacttccctagcgctgcgagtctctggaatgcacccctctcctatctcgcagcccctgtctgccctgcctgagtcactcacaccttcctgggggcgggggcagtggaagccaggggttcaggggcacagccagccctgggaacacacctgaggtgatgtggaggctgcttttgcctttcttcacgtccccagggtcatcttggtcctcctgggggatgtaacaggtggtgaggatttgggccgaaagaagtcctcactggtttggggttcaggctgctggcgtgggtctagcccattcccggcgacatccctggcatgggcgtacctggtggtgcccctctgagccctccccgctgtgcttgccccacagacagtcagtcggatgcggagactgcagccgccgcgggcgaagtgctagacctcacctcacgggacagagagcagccgtcggagggcgccactgagctccgccaggtcgcaggggatgcgcctgtggagcaggccacggcggaaacggcctcgccggtgcaccgggaagagcacgggcgtggggagagccatgagccggaggaggagcatggcactgaggagagcactggggacgccgacggcgcggaagaggacgcgtcgagcaaccagagcctggacctggacttcgccaccaagctcatggacttcaagctggcggagggcgacggcgaggcaggcgccgggggcgcggcctcgcaggagcagaagctcgcctgcgacacctgtgggaagagcttcaagttcctgggcaccctgagccgccaccggaaggcgcacggccgccaggagcccaaggacgagaagggagatggcgccagcactgcagaggaggggccccagcccgcccctgaacaggaggagaagccccccgagaccccggcagaggtggtggagtcggccccgggtgccggggaggccccggcggaaaagctcgcggaggagacggagggcccctccgacggggagagcgcggccgagaaaaggtcctcagagaagagcgacgatgacaagaaaccaaagacagactcccccaaaagcgtggccagcaaggcagacaagaggaagaaggtctgcagcgtgtgcaacaagcggttctggtcgctgcaggacctgacccggcacatgcgctcccacacaggtaaccagggcaggccaggtccccggcccaacaagaggaggcgagccgggcacctctcctaggagctcccctgaagcggcgctggaggccaccgagagaacgtttgcttacgttgccggtgtgccctttaagcccgtgaactaggagttttaaggagttgtactctcagcccttgaagacggtgcaggcctcctgcagccaggcaggagagggtccttggccgttgtgtttttgagaacgctgtgatccgcctttagctctgctgcctccgcctccccatctgtagagtgggggtaacagctgccctgtttcatagaggtatctaggagagggtgcttgtgctgggcatttgggccacttagtcctgtctagtcctgtggcctggacgacaggcactgccccaggccgctgtggggcaggcaccctgggtgatccattagggtcaggagggccttttcctttcttagccgtgcagttcggctgagatgactgggacaggacccttagccactgcccttcacaccgttctagagttcacccaccacctgcagggtggaggctgcagaccccagagcaggggcgcttactttgacacaaagacctgaatatgctcatggagtccagagatatatccttcttctttccaaaataacctgtccctcctctcagccgcagcttccctccctgtcacagctgcagcccgcagtgaacacatgtgccccgacccagcgcagtcggctctgccctgcgcttgcccgtgtgaagggccagggtccttggctctcagaagagggatattcttgggctcccaacaagcgtggtgggccctgccctgggcctggcgtgtgagccatcaggaaagcccccgctgcaccacatcgcaatgcagagggtaactggtgcccccgacctaggtgctgctgtccatacagatccctgagagggtccactcctgtccccctctagattccttcccagtctctggtcgaggccagtctgcacatctcctgaggcttctgcttctgggacctgggttttctggatcagtatgtagagtgcctgggctgagagaggaaggagaggaaaggtctcagactgacagcttgaaccagcaaacagagcttgtccgtcctcagtttgctggttcaaggaagaggcctctggctgagtaggacggagtcctggccccccgcacatagcctgggagcctcattcttcctgtgcagagcagggtgcagtgggtactggtgccttttggttaatggaaattctttcttccattgttccaggggaaaggccatacaaatgtcagacctgcgagcgaaccttcaccttgaagcacagcctggttcgccaccagcggatccaccagaaagccaggcatgccaaacaccacgggaaggacagcgacaaggaagagcggggtgaggaggacagcgagaatgagtccacccacagcggcaacaacgccgtctcagagaacgaggctgagctggctcccaatgccagcaaccacatggctgtcacccggagccggaaggagggcttggccagtgccaccaaggactgcagccacagggaggagaaggtcacggcagggtggccgtctgagcctggccagggtgaccttaacccagagagcccggcggccctggggcaggacctgctggagccgcgcagcaagaggcctgcccacccaatcctggccacagctgatggcgcctcccagctcgtggggatggagtgacagcctcagtccccctcagcacagacaaaagccagcagagcaaagcgtctatacttcatggggtttcctcagtgccctttggctgttgaggagtgagagagagagagagagagagagagagagagacaagcaggagcgtggctgctcgctcagtgccatagccttaccgcagcctgcgcgggaggccacagcccgtgccgattccagtgccttaactacttaccggatccctccatattatcatgggtgttgtatttttccaaaatgacttcttaaacaaaacaaatattataatgaattgtctggagaggacctcttcatttgagcattagcgttattttgtattggtgtgtgtgagcttgttcttgtgaatctgtgatagcaccgtttgttctgtgagctggaaacagaaggaaaaaacatacccttgggtacccatagccaataactggaagaaaatgatgtgaatttcatgtaaatgaccagaggaaagatggataagatgataatttcttaaatagacattttccttttttctttgtgcttcatggtggagctgtcatctggtccttggtattacaggatgtggttgatgaaggtttccaatatggtttcaggccaaaaccagggaagattctagcttcagcctcatgtccatttccagtctgtcagcattagacatggtcactgttcaagtttcaagacatccattcttaactatagagaagagttactcccctggcgtcttaacctatggaaaacatgcacggataggatatatttgattgcctcctcttccctttcagtatatgtattattaatattattattattattattattattagttcatcagtttgctgttctctgcagtgagcagaatcaaatgggcaatatttgtcctgggagacctgtgccgcacccaggtccccgtgttaacgtgtgcctgcggttgtggttggcaccctcgggtggtagctcttctactgtaatgagacaagcctttcttctgtcactgcagaatttagaaggggccgtgagcagtcttcccaagcatggtccaggagcagctcagagagggtggagtgaggatgcatgcatccagggaacaggcatcaagaagccagggccgtgcctggagcactgcagagatgactttggagaaagcaaagcagtgacccagtgaccaggcacattactcgtgagcgaggtattcccagtcttcctgctaagcctaatccaagccttacccagctgtgctactgtcatttgcaaagcaaggaaatactactactggtaataaaactacacatgcaagatgtcagataagaaataggtttatatttaccttcctgcgatgtggggttggtgcttgaagataaatgtgctgtttctagtttcttaaatagcccacacccctggatgcaaaaaggcagggttatttttacccatgagcatcctgtgcaggcaatagacttccctcactgtctccgcctgcagggaggagaatgtaccccactgcacctgagctcctggtccctcagccaagacctcaggggtccccagccagcctgctgctggggacccctgtgcttgctgcagtgtatggagcctcttgccttcccctggggaggcacccctgtaccccagcttccttcccctggccttttctggccccagtgctcctcctttacatagacttgttcacacagaaacgtgcacgcccccttttctccgccacttcaccagtttctgaaatccaacctcccagacttcacaggaagatagatattcttgagataatgaaaagtgatatcttcgcatacgaaaggaaaaaaggttgaggtatatatgatttttaactgtattaggggtgtatgaaccagtttaaaaacgaggttttatttactgtagagatgaatgcaaatcagaaccaatgatcccttggcctacttagttaaaaccagttcatacatcccttagggtttttattattattattattattattacagttgttattgttgtttttgttgttattattatttggggtttcttgtgttttttctttgcgactctccacactaaacttgcaatattgtggggagaagctgtgactaaactctacgctgcggtgagatgtagcagtaatcagctcccagcgacgtgtgtagctggggctgccgctcgcaataatcactattgatttaaagctttacttagccttgatctgtaccctcgtagtcaataaggtcttgccacattttattagtgaggtggagaaacgtattatttgtttgttgtttttgcccttcccccaccccccaatattaaactgtgaaatttgtgatttgtttaaactctgggtgaatcatagcttagtttgcatgtccagctaatttgtttctatacattttgtttgattctctttctccttctctcagggcttttacaaaaaaatatatatatatggatcttctgaaaagttttttgaggtgcaagttttttctcttttttttttttttttttttttctcattgattaatggacatgatgctgagattcaatcactacatgaaacacctggctgtgaaaacaaaacaacccagagggctgtgttccaagcagcgctggggaagctacgtaacagtcggatgccagttttggaagattcaccatgcgttctgaccctctgttcgtctctttcctctcctctttcttcaagaaggaaattgatcctagtgatttcagcccatgcattaaacaggaaacaataataaatttgtagaattcatatttttctaaagggaacttaaaaactgctgctacatgttatgtacaaaactggtttatgccacatgaacagagaatcacaagtttggttttggtactttttgttcctctttgtattcagttgtatagaacttccaaattcagaatgagaagaaagctgttctgtatcaaaccatttaagcaataaatgttatattttaaaagctgcagattgccggtcacgtggccgtcctgtgatttgttgtgatcccatccccaaacccacagcccacttggggcaggtcccaggtgtgcagtaccattggggggagtcacaggtgcccaggaaagctcttgtcacccaggcagcatttttatttgcgctggaggctgtggcagtgactcttgcctatgctcccagcactttgggaagccaaagcaggagattcacttgaaaccagaagttcaagaccagcctgggcaaaatagtgagacccctatctctagaaaaaaatgtttaagaactagcttggcatggtggtacatgcctgttgtcccagctatttgggaggttgaggcaggaggatcgcttgagcccaggagtttgaggttgcaatgagctacgatcgttcctctgccctccagcctgggggacacagcaagaccctgctgtatgtaaaagcactcggctgcagttgtgagagctgctttgagagcatgtggaaagttaagtgcatggccactgtcagagcttcagagtggagatcttggtgttgggtgcacagggccaggaggctggacctaatgaggcaccacagtgcaggccactctgtcattggctaaagccagcatttttgtttcctgtgcaataatgcctaagaagtccgcctcgcctcttcttcctccaacccagtggtaagtgattgagtcagcacctagtggagggagaacaaaatctgttagtgtgaccagattttggtgagacgggaggggacagcaaccctagggctggggatggtgcaggttaaaactcacatttgggtaaaatagcaatcagcagagccccaactcctagcagagcctcaactcctataactagggagtggctctcaaaaagcaacactgggggctgggtgcggtgtctcacgcctgtaatcccagcactttgggaggccgaggtgggtggatcacaaggtcaggagattgagaccatcctggctaacacggtgaaacaccatctctactaaaaatacaaaaattagccaggcatggtggcaggtgcctatagtcccagctactcgggaggctgaggcaggagaatggtgtgaacccgcgaggcagagcttgtattaagccgagatcgcaccactgcactccagcctgggcgacagagtgagactccatctcaaaaaaacaaacactgggccgggagtggcggctcacacctgtaatcccagcactttgggaggccaaggcgggaggatcacttgaggtcaggagttcgagaccagcctggccaacatggtgaaactccatctctactaaaactgcaaaaaaatttgggtgtggtggtgtgtgcctgtaatcccagctactcgggaggctgaggcacgagactcccttggacccaggaggcagaggttgcagtgagccgagatgccgccactgcactccagcctgggccaacacagtgaaactgtctcaaaaaaaaaaaaaaaaaaaaaaacgaacactgaaagaagttggttgtggaggaggctgattgtggataatgctaaaatgcattgagtgcactgtaccatacactgctaagtgccacctccctgcaggaccagagctgtggctgtggtccttaagctttttcaggcccctctgttgaaagacgtagaatttaacacacatttatatgtgggagcttgggggatccgcatgcctgagtgggcggtggcaggtggagatgtactagccctgggtaagcggatctcaaacctcaggtcctccgcccaaagacatagccaaccacctgcgctgtgttagagatgcaggacaaagaagtggccacgagctgtgttgctggggacaagctggctggcatgacaatcccagttctgcctcttcgggctggtgaatggccttgtgcctcaatttcaccattcctaagaaagggatagcgatagtacctgcctcatgggcactgttgtgtggatgctatgagttaattacataaggtgcatgttaggggctctcgttattgtttctacagtcttctcatgggaatgcttccttggttgcctggtgaggaagtaggtagaacttcaccacacacattcatggcacagtgcggggaacagccagaggagggccttgtgggagatcaccaagatgcaggcactgtctttgaaccccagggagtcttgtcaccttctcctacctggcctcctctggccctgtaatcccactaccttcccgctcagcctgtgacctccccatggccccaggactctgcctgggccttggtgcttatccagcatccccaccctggaccaaagcctcctccactggaggagggcatggggcatggggatgggggagctggcggcatagacctagcacccaggatgaggcctagtcccttgttaccttactgctcagagtgtcgtctgaagacccaaagcatcagcatccctgggagcttgttagaaatggcaacctcaggttgacctggtgcggtggtgcatgcctgttgtcccagcactttgggaggctgaggcaagagaatcgcttgaggccaggagctcaaggctgcagtgagctatgttcacactccagcctgattgacagagcgagatcgcatcttcacaaaaataaaaacgtaaaccaaaaaataaaagaaatgagaacctctgacccacccagacctgctgagtcagaatttgcatgtgaacaagggccacagtggatatgtgcacacattgaagtttgagaagctccggtctagaccccaaagcttggttcagaataaggtggatggcggactcggcagctggctgcagagacggctgtggattctccccctcaaagacagaatccatctcagaatgagtgggcagaagccacatatggctttagagagtgccgatcttggccctccagaggttccttccacagtccctactccagccccagcacagactcagccactgcctaaacccgagtgccccaagagtcttgtttggggtttctgcctgtttgccatccttgtggattccaaaggctactttgaaagggctgaggagcgagtggggcctccaaccactggccaacagcgccagctgcctgcttgcctgtcctggtgttaagccttgggcctggagcgctcaggcctctccccttcataaccacctccctgaggaggacaggagtgagggaggatgactaggcttattttaagcttgtaattgaaggttgctctttagcaacaaaagagtcccctccaattctagactgccagagtcagtgtcctaaataagaaacaagcggtcactcctttcccgttttactgttaggggaaggaagccacagcccagtggggaagtgacatccctggcccttgccgttcaccacttcaagtcttgcccagctgtcagggcaggaattcatgtccccacggtggcatctgcttcccaggctgtggggccagcaaggggctcagctgctccccagccctgccttcctccatggatctgacatgactcttttatgggaatttacgtaaaagtaacgccttgctcagtgtggaaaatttaggagcttcaggaaaatataaagaaaattaaggaagtcatctcgcttctcaaataccgtgttaatttggtgagtgttgctcttttcattgggcctcacttttcccttcctcattctcagatgtgtttgtacaggactttgcacactgcagtgttttcctgtggtttttgtttcttttcttcacccaagtccagtgagctgtgaaggaaaaaaaatccttattccttcagagcagggacgagcattgaaatgatttgcccaggtcagctggctattgagtgcttttgttgggatgaaattctccaccagaaaaatcctaaaacagaagtccccaagaatgggtggtgtgtgtcgtccactgaaaagggagttactgaaaactaggaatgcgtggcctctaggaaacatggcactgttgtgatttggcacatagatatttggcatacatattcccagggtcactgagtaaattcccaactgttccagttctcttttgctgcatgacgaagaacaccaaaactttgggtcaggattcggtgggttgggcagggctctgcagggatggctcatctgtcctccatgaggcatcagctagggcagagcctccaagaccattttttctcgctcatatcaggtgcctctgtgtgtacaacccacccactcacctacccactaaaagaaccattctttgggttgcttgttaaaaattgcatttcaggccgggtgcagtggctcacacctgtaatcccagaactttgggaggccaaggtgggcagatcacctgaggtcaggagttcaagaccagcctggccaacatggtgaaactccatctctactaaaaatacaaaaattaggctggcatggtggcaggtgtctgtaatcctagctactcgggaggctgaggcgggagaatcacttgaacatgggaggcagatgttaccatgagccaagatcacgccactgcattccagcctgggtgacaagagtgagactctgtctcaaaaaaaaaaaaaaaattgcatttcagatctactaattcaggatctcaggagggaggacccagccatatacatttttagcaaattcctagagaatttgctaaagcccagaaaagtttgcaaaccagggctctgttaaagactgttccagattcctgcccctcagttgtacctctagttgcccctcaagctaacaccaaggcaaattgtttgcaatggagccattgtttggtctggggtaactctctgatatctaggatatgtactggaaacttccttcaagcctcctgcctggcctctttccctgcttttgcagccactcctctacatacattggcacaggtgctcccacccaactttaccacctaccccccaaaagggaacttctaagaacctgtggctgggctcgaccttggcactgagtctaggagcagttgcctccacctggcttacctccctgaagctttgggtccctggtctcctgatacgcacttgtcagggctggctcataatgctgggatccatatggataaatgaaaatgtggggccccactctgtcgcctgggctggagtgcaatggcacaatctcagctcactgcaaactccacctcctgggttcaagcagttctcgtgcttcagcctcctgagtagctgggactgtaggcatatgccaccacaattggctaattttttttgtatttttagtagagacaaggttttaccatgttgcccaggctggtctcgaacttctggctgcctcaagtgatctgccctcttggtctcccaaagtgctgagattacagacatgagccactgtgcccatcttgtgtttgtttttgttttgttttgttttttgttttttaagagacacggtctcactctgtcgcccagggtggagtgtagcgacgcaatctgagctcactgcagcctcaatctctcaggctcaagtgatcctcctgcctcagcttctcgagtagctaggaccaaggtgcacaccaccacacccggctaatttttttgtatgttttgtaggatggggtttcgccatgttgcccaggctggtctcaaattcctgggctcaagcaatcctcccaccgcggccttccaagtgttgggattacagcgtgagccactgtgcccggccaatgggctctccaaggccacattaccttagacattgggatacttacatgcaggtgtccacaggtgcctgagatctcacatccacccgaccctctctgcctccacacccaggcctccaccaggagccaagggggccgcaatcactaggcaagggcagggggttgagtggccaagagcccgtcccagggaggcaggagagagagggaggcaggaccacataggagccagggctcccggcagccagtgcacactccattgtcccatcagagttcactgacgaatctcagttcaaagatagtatcgtaaagagtttcaagatggggccctgggagcattgaactccaagcacaggccctcgcaggggtcccactgcaggaagccggccctgctgctgaccctgcccacctccctcagctccttggtcctgtcgggtctccctgctgaccccatggcactgctccacgctcctgtctgtggggcccccgtctgtccccacctagaattctgtttccataccaaggcctaaccaatggcccctgaccccgttcagtgttttgaaccagccactcctgtttttggcggccctgccctcccatgaatctcacgcccacggctgccctcggatctggagacagttgcacttgttatctggtatcagcactagggaggctcagtcaagccagcactaacggtgggtttggtgtccttgggacttctccacccagggcctgtgccaaggctggtcctcagtgcttggtcaagagtggctctggcggctctggggtggtggcctctgcagctcagtgcccctgccacccatgctcactggatgggggcaacacccttcctcccagttcagggtggatgggccccagagcaccacccagccagccaagcctccttgcccctgccctgccctccgaatggcccagatcatacctgctgcctttctttcctagctcactgcctccacccaagtcaccttctgtcctgactcccaaggacttgggtcccactggggaagtcgggaggaaatgggaagccttcctgactgtgagtgagggcaggaggggaggtggggtcagagagggcacctggagggtggcaggagagagcaggagagcgtgagagaggtggcagaggagggggtgcgagtaagaagagaacaccatcattgtttaccaaacctgaattacaccacaccaagttgtcctgttatttatttatttactcatttatgtattttagtgtgtttaattgaggttaaaaaaagaagcaagaaaagtgtttgcagattggctttatggcggtgagctttgcaatgatctctgaaaaagtccggggagtccggcaggcagatgagaatctaggcttgctggcgtatccagatgactcggaaggaggaccccagacggggaggggcagtgctgggagcaggaggcgtcctggtcaggctgtccatccatgtctacccagcaaatatttgcaggccctgagctcagcaggggaggaaatctcaggcaaatgagacacagactctgccctccagccgcttcggagaaaacagccgagaaggacactgttaaatggagtggcaagcccagagcatcaagggcatttggaggtggggggcactgctgcttggggacatgtagacagaatttatagaacgaggcccctggaaggatttctgcaggttgcagcagggtggaggagcgtcgccggcccggggccaggaagaagctcagggcacagggaagctggccacggggtgtcccatcacatcagagtggtgtgggctacggctggaaggggaggcaggccactggctgacacgccgcacagcagaccgtgaatagacgcatgagcgagtcagggagtcaggagagctctgaacacttgagttcatttcctgctggaggtgggagccgttgaaggttcttgagggcatccgtgaatgcaccggaactgtggtctagaaacgtcctagcaacagtgtgagacggggagccagcagagaaatcatcaaacagtctaggcagaaggtaacgagggccagatgtggtggtgtgcacctgtaatcccagctacttgggaggctgaggcaggaggatcacttgacctcaggagttcgagaccaacctggacaatgtagcaaggccctttcaaagaaaaaaaaaaaaggagttggggagagagagaaaaggtaatgagggtttgaagtgggctggggaggagaggagcactggagagatcgcatttggcagtacttgattaacgaagattgcaatgggggcgcactcaagctttcaacattgtcaccggaaattgggggaggtggtgccatgaaggatgccggggaagccaggtggagaagtcagtttgatggaacacagagatcatgggttccttcttgttggaggtgtctatcagaggtcttcaagtgacaaaaattcaactcagaggctgggtgcattgacttatgcctataatcccaacactttgggaggcagagacagaggcaggacttgagtccaggagttcgagactaccctgggcaacaaagtaagacccccatctctactataaataaataaataaataactcagatcagcctctacaaaaatgagaatgggttagcccacattgacaaaaagtccagaaagtgactttagttagatgcacgtccaccaaagctcatgttcgagcccaccatgtcccatctcctggttctgctttcttcctcagggagagcacctgccaggcagcagtgtcgctcagcttatgcgcagccagcttggggactacagcagctcatcctaacaagagaccagaacttcaggctggtctgaggcatgtgcccacctctgggtcacacgtcattcttgaagcagtgggcaagtcaaatatccccacccctcctgcacagaaaaggggaggatcccaagaagagaatgtgggggctgcctccaggaggagaagaaagacttgtgggtccactgcagacatccaggtggagatgtctggagcccaggggtcgggtaagagctacagccaggttggggttattgtgggaggagccgtaggagtgaatgagatcaggaaaggtggccggggtagacctaggacctagggacctaggaaagagacagacacgctggggaagaagcgtcagaggacagagggtgagacgcttgaaaaggaagtgggcgagaacagtgttgcctaaaaagagggagcccagttccctgaaggtgagggtgaagacaggccattgggctgagacgatgggcaaagggcagggtgtgggcagagctggtttgggacccagagcagtggaagggcagagcagcccttgccgagaccaagggacagcagggctgaatgaccgcaatgcagcacccgcttcgctttgcaaataaaatgcggactgcgcgagaaagcctggcttttagcgtccatgcgtgtccaggaacagcgaccagggcaagtgcttgagtgcgccaggctgggcgaggcagggagggactgagggctgggtccgggggagaggagtggccagggaggaggggcgacccaaaggcctccggtgatgcgctgacagaaggtaaaaacaaggaacaaagcaaaaccacacacaggacggcagcgcggagtccgggccctgccctctgcagcagcgcagcccggggactctggggctctccctgctgcctgtggaatttccaggccagcgcatctgattggcctggcctggggcagtgggtggggatttggatgtttccagagaagggaagatggcggtgagacagccgctcggcagctccagaggggtcgatcccgcgacaggggaagggggcgtgggcgtcacatggcagcgctgagacttgagtgctggaacagcccagcgaggaaggtcccaaagacagctcttttcaccaaagacaggccttgcgtttgcggtgcgggctccacccgcagttctgcttcaggtagaaaagggatgagggtgccgggccagcttgacccggtttccgcaggggcagaagcacttcctaccttcggcctgcagagcccctcaagcaacagggaaccacattctcctgcccttggaaaaagttgacccgcttcacagtgaagccagagaggcgaggtgggggcggcggggggatttggatgggacttccagacgcctttcttcttcccagtgcctacctagggatggggacgctaggacagctgaagctggcacatatctgatcactgttcctcaagcacctctttgtccatgcaccctccctgc

SEQ ID NO: 391 - DNA, 8083 bp, Homo sapiens
cttaaacccctgtcccaatgacgtcaagttcgcccgctggcttggaaggttcagacctatcttccatcaacaccatgatgtcggcggtcatgagtgtagggaaggtcacagagaatggcgggagcccccaggggatcaagtccccctcgaagcctccaggaccaaatcggattggcagaaggaaccaggaaacgaaagaggagaagtcttcctataactgccccctgtgtgagaagatttgcactacccagcaccagctgaccatgcacattcgccagcacaacacagacactggaggagccgaccactcatgcagcatctgcggaaagtcactgagctcggccagctccctcgatcgccacatgctggtgcactctggcgagaggccttacaagtgcactgtgtgtggccagtcatttaccaccaatgggaacatgcacagacatatgaagatccatgagaaggaccctaacagtgccacagccacagcccctccatctcctctgaaacgtaggcgattgtcctccaagaggaaactgagtcacgatgccgagtcagagagagaagacccagcaccagctaaaaagatggtagaagacgggcagtcaggtgacttggagaagaaagctgatgaagtctttcactgcccagtatgtttcaaggagtttgtttgcaagtatggactggagacccacatggagacccattcagataacccactaagatgtgacatttgttgtgtcacctttcgaacacatcgaggactgctgcgtcacaacgcgcttgtccacaaacaacttcccagggatgcaatgggcagacctttcatacagaacaacccttcaattcctgctggcttccacgacttaggattcacggacttctcctgtaggaagtttcctcgcatttctcaggcctggtgcgaaacaaacctgcggaggtgcatcagcgagcaacaccgttttgtctgcgacacctgtgacaaggcgttccccatgctctgctcactggctctgcacaagcagacccatgtggcggcagaccagggtcaagaaaagccgcaggccacgcccctgcctggtgacgccctggaccagaagggcttcctggccttgcttggcctgcagcacaccaaagacgtcaggcctgcccccgccgaggagcccctgccggatgacaaccaggcaattcagctccagacactcaagtgtcagctacctcaggaccccggctgcaccaacctgctgagcctgtcacctttcgaagctgcttccctaggcggttctctcacagttctccccgcgaccaaggacagcataaagcacctgtccctgcagcccttccagaagggcttcatcatccagcctgacagcagcattgtggtcaagcccatctctggcgagtcggccatcgagctggcagacatccagcaaattctgaagatggcagcctcggctccccctcagatcagtcttccgcccttctccaaggcccctgccgccccactgcaggcgatcttcaagcacatgccccctctgaagccaaagcccctggtcacaccacggacggtggtggccacctccacgcccccgcctctcatcaacgcccagcaggcttccccgggctgtatcagccccagcctgccgccaccgcccctgaagctcctcaaaggctcagtggaggcggcctccaacgcccacctgctgcagtccaagtccgggacccagccccacgcggccacgcggctctccctgcagcagccgcgggcggagctgccgggccagcctgagatgaagacgcagctggagcaggacagcatcatcgaggccctgctgccgctgagcatggaggccaagatcaagcaggagatcacagagggggaactcaaggccttcatgacagcgcccggcggcaagaagacgcccgccatgcgcaaggtgctctacccctgccgcttctgcaaccaggtgtttgccttctcgggggtcttgcgtgcccacgtgcgctcccacctgggcatctcgccataccagtgcaacatctgcgactacatcgccgccgacaaggccgcgctcatccgccacctgcgcacgcacagtggggagcggccctacatttgcaagatctgccactaccccttcactgtcaaagccaactgcgagcggcacctgcgcaagaagcacctcaaggccacccgcaaggatatcgagaagaacatcgagtatgtgagtagcagcgcggccgagctggtggacgccttctgcgccccggacaccgtgtgccggctgtgcggcgaggacctcaagcactatcgtgccctgcgcatccacatgcgcacgcactgcggccgcggcctgggcgggggccacaagggccgcaagcccttcgagtgcaaggagtgcagcgccgcgttcgcggccaagcgcaactgcatccaccacatcctcaagcagcacctgcacgtgcccgagcaggacatcgagagctacgtgctggccgccgacggcctgggccccgcagaggcgccggccgctgaggcgtcggggcgcggggaggacagtggctgcgctgcccttggtgactgcaagcccctcactgccttcctggaaccccagaacggctttcttcacaggggccccacccagcctccacctccccatgtctcgatcaagttggagcccgccagtagctttgcggtggacttcaatgagcccctggacttctcgcagaagggcctggccctggtccaagtgaagcaggaaaacatctcctttctgagcccttcttccctggtcccctatgactgctccatggagcccatcgacctgtccatccccaagaacttcaggaaaggggacaaggatttggccactcccagcgaagccaagaagcctgaggaggaggcggggagcagcgagcagccctctccctgcccagcacccggcccttctcttcctgtaactttggggcccagcggaatcctggaaagccccatggcccctgctccggcggccaccccggaacccccagcacagcccctgcagggccctgttcagctggcggtcccaatctactcctcagccctggtcagcagccctccactcgtgggcagctcagccctcctgagtggcacagccttgctgcgtccactgcggcccaagcccccgctgcttttgccaaagccccccgtgacagaagagctgcccccgctggcctccattgcccagatcatctcatctgtatcctcggcccccaccctgctgaaaaccaaggtggcggacccagggcccgcaagcactggcagtaacaccacggcttcagacagcttaggaggttctgtccccaaagccgccaccaccgccacccccgctgccaccaccagcccaaaagagtctagtgagcctcccgctccagccagcagcccagaggctgcctctcccaccgagcagggcccagcgggcacgtcgaagaagaggggccggaaaagggggatgaggagccgaccccgcgccaacagcggcggggtggacctggactccagcggggagtttgccagcatcgagaagatgctggccaccacagacaccaacaagttcagtccgtttctgcagacagcggaggacaacactcaggatgaggtggccggagcccctgccgaccaccatgggcccagtgatgaagagcagggcagtcccccagaagacaagctgctgagggccaagcggaactcgtacaccaactgcctgcagaagatcacctgtccccactgtccccgggttttcccttgggccagctccctacagaggcacatgctcacacacactgacagtcagtcggatgcggagactgcagccgccgcgggcgaagtgctagacctcacctcacgggacagagagcagccgtcggagggcgccactgagctccgccaggtcgcaggggatgcgcctgtggagcaggccacggcggaaacggcctcgccggtgcaccgggaagagcacgggcgtggggagagccatgagccggaggaggagcatggcactgaggagagcactggggacgccgacggcgcggaagaggacgcgtcgagcaaccagagcctggacctggacttcgccaccaagctcatggacttcaagctggcggagggcgacggcgaggcaggcgccgggggcgcggcctcgcaggagcagaagctcgcctgcgacacctgtgggaagagcttcaagttcctgggcaccctgagccgccaccggaaggcgcacggccgccaggagcccaaggacgagaagggagatggcgccagcactgcagaggaggggccccagcccgcccctgaacaggaggagaagccccccgagaccccggcagaggtggtggagtcggccccgggtgccggggaggccccggcggaaaagctcgcggaggagacggagggcccctccgacggggagagcgcggccgagaaaaggtcctcagagaagagcgacgatgacaagaaaccaaagacagactcccccaaaagcgtggccagcaaggcagacaagaggaagaaggtctgcagcgtgtgcaacaagcggttctggtcgctgcaggacctgacccggcacatgcgctcccacacaggggaaaggccatacaaatgtcagacctgcgagcgaaccttcaccttgaagcacagcctggttcgccaccagcggatccaccagaaagccaggcatgccaaacaccacgggaaggacagcgacaaggaagagcggggtgaggaggacagcgagaatgagtccacccacagcggcaacaacgccgtctcagagaacgaggctgagctggctcccaatgccagcaaccacatggctgtcacccggagccggaaggagggcttggccagtgccaccaaggactgcagccacagggaggagaaggtcacggcagggtggccgtctgagcctggccagggtgaccttaacccagagagcccggcggccctggggcaggacctgctggagccgcgcagcaagaggcctgcccacccaatcctggccacagctgatggcgcctcccagctcgtggggatggagtgacagcctcagtccccctcagcacagacaaaagccagcagagcaaagcgtctatacttcatggggtttcctcagtgccctttggctgttgaggagtgagagagagagagagagagagagagagagagacaagcaggagcgtggctgctcgctcagtgccatagccttaccgcagcctgcgcgggaggccacagcccgtgccgattccagtgccttaactacttaccggatccctccatattatcatgggtgttgtatttttccaaaatgacttcttaaacaaaacaaatattataatgaattgtctggagaggacctcttcatttgagcattagcgttattttgtattggtgtgtgtgagcttgttcttgtgaatctgtgatagcaccgtttgttctgtgagctggaaacagaaggaaaaaacatacccttgggtacccatagccaataactggaagaaaatgatgtgaatttcatgtaaatgaccagaggaaagatggataagatgataatttcttaaatagacattttccttttttctttgtgcttcatggtggagctgtcatctggtccttggtattacaggatgtggttgatgaaggtttccaatatggtttcaggccaaaaccagggaagattctagcttcagcctcatgtccatttccagtctgtcagcattagacatggtcactgttcaagtttcaagacatccattcttaactatagagaagagttactcccctggcgtcttaacctatggaaaacatgcacggataggatatatttgattgcctcctcttccctttcagtatatgtattattaatattattattattattattattattagttcatcagtttgctgttctctgcagtgagcagaatcaaatgggcaatatttgtcctgggagacctgtgccgcacccaggtccccgtgttaacgtgtgcctgcggttgtggttggcaccctcgggtggtagctcttctactgtaatgagacaagcctttcttctgtcactgcagaatttagaaggggccgtgagcagtcttcccaagcatggtccaggagcagctcagagagggtggagtgaggatgcatgcatccagggaacaggcatcaagaagccagggccgtgcctggagcactgcagagatgactttggagaaagcaaagcagtgacccagtgaccaggcacattactcgtgagcgaggtattcccagtcttcctgctaagcctaatccaagccttacccagctgtgctactgtcatttgcaaagcaaggaaatactactactggtaataaaactacacatgcaagatgtcagataagaaataggtttatatttaccttcctgcgatgtggggttggtgcttgaagataaatgtgctgtttctagtttcttaaatagcccacacccctggatgcaaaaaggcagggttatttttacccatgagcatcctgtgcaggcaatagacttccctcactgtctccgcctgcagggaggagaatgtaccccactgcacctgagctcctggtccctcagccaagacctcaggggtccccagccagcctgctgctggggacccctgtgcttgctgcagtgtatggagcctcttgccttcccctggggaggcacccctgtaccccagcttccttcccctggccttttctggccccagtgctcctcctttacatagacttgttcacacagaaacgtgcacgcccccttttctccgccacttcaccagtttctgaaatccaacctcccagacttcacaggaagatagatattcttgagataatgaaaagtgatatcttcgcatacgaaaggaaaaaaggttgaggtatatatgatttttaactgtattaggggtgtatgaaccagtttaaaaacgaggttttatttactgtagagatgaatgcaaatcagaaccaatgatcccttggcctacttagttaaaaccagttcatacatcccttagggtttttattattattattattattattacagttgttattgttgtttttgttgttattattatttggggtttcttgtgttttttctttgcgactctccacactaaacttgcaatattgtggggagaagctgtgactaaactctacgctgcggtgagatgtagcagtaatcagctcccagcgacgtgtgtagctggggctgccgctcgcaataatcactattgatttaaagctttacttagccttgatctgtaccctcgtagtcaataaggtcttgccacattttattagtgaggtggagaaacgtattatttgtttgttgtttttgcccttcccccaccccccaatattaaactgtgaaatttgtgatttgtttaaactctgggtgaatcatagcttagtttgcatgtccagctaatttgtttctatacattttgtttgattctctttctccttctctcagggcttttacaaaaaaatatatatatatggatcttctgaaaagttttttgaggtgcaagttttttctcttttttttttttttttttttttctcattgattaatggacatgatgctgagattcaatcactacatgaaacacctggctgtgaaaacaaaacaacccagagggctgtgttccaagcagcgctggggaagctacgtaacagtcggatgccagttttggaagattcaccatgcgttctgaccctctgttcgtctctttcctctcctctttcttcaagaaggaaattgatcctagtgatttcagcccatgcattaaacaggaaacaataataaatttgtagaattcatatttttctaaagggaacttaaaaactgctgctacatgttatgtacaaaactggtttatgccacatgaacagagaatcacaagtttggttttggtactttttgttcctctttgtattcagttgtatagaacttccaaattcagaatgagaagaaagctgttctgtatcaaaccatttaagcaataaatgttatattttaaaagctgca

SEQ ID NO: 392 - protein, 1669 aa, Homo sapiens
MTSSSPAGLEGSDLSSINTMMSAVMSVGKVTENGGSPQGIKSPSKPPGPNRIGRRNQETKEEKSSYNCPLCEKICTTQHQLTMHIRQHNTDTGGADHSCSICGKSLSSASSLDRHMLVHSGERPYKCTVCGQSFTTNGNMHRHMKIHEKDPNSATATAPPSPLKRRRLSSKRKLSHDAESEDPAPAKKMVEDGQSGDLEKKADEVFHCPVCFKEFVCKYGLETHMHSDNPLRCDICCVTFRTGLLRHNALVHKQLPRDAMGRPFIQNNPSIPAGFHDLGFTDFSCRKFPRISQAWCETNLRRCISEQHRFVCDTCDKAFPMLCSLALHKQTHVAADQGQEKPQATPLPGDALDQKGFLALLGLQHTKDVRPAPAEEPLPDDNQAIQLQTLKCQLPQDPGCTNLLSLSPFEAASLGGSLTVLPATKDSIKHLSLQPFQKGFIIQPDSSIVVKPISGESAIELADIQQILKMAASAPPQISLPPFSKAPAAPLQAIFKHMPPLKPKPLVTPRTVVATSTPPPLINAQQDGCISPSLPPPPLKLLKGSVEANAHLLQSKSGTQPHAATRLSLQQPRAELPGQPEMKTQLEQDSIIEALLPLSMEAKIKQEITEGELKAFMTAPGGKKTPAMRKVLYPCRFCNQVFAFSGVLRAHVRSHLGISPYQCNICDYIAADKAALIRHLRTHSGERPYICKICHYPFTVKANCERHLRKKHLKATRKDIEKNIEYVSSSAAELVDAFCAPDTVCRLCGEDLKHYRALRIHMRTHCGRGLGGGHKGRKPFECKECSAAFAAKRNCIHHILKQHLHVPEQDIESYVLAADGLGPAEAPAAEASGRGEDSGCAALGDCKPLTAFLEPQNGFLHRGPTQPPPPHVSIKLEPASSFAVDFNEPLDFSQKGLALVQVKQENISFLSPSSLVPYDCSMEPIDLSIPKNFRKGDKDLATPSEAKKPEEEAGSSEQPSPCPAPGPSLPVTLGPSGISPMAPAPAATPEPPAQPLQGPVQLAVPIYSSALVSSPPLVGSSALLSGTALLRPLRPKPPLLLPKPPVTEELPPLASIAQIISSVSSAPTLLKTKVADPGPASTGSNTTASDSLGGSVPKAATTATPAATTSPKESSEPPAPASSPEADTEQGPAGTSKKRGRKRGMRSRPRANSGGVDLDSSGEFASIEKMLATTDTNKFSPFLQTAEDNTQDEVAGAPADHHGPSDEEQGSPPEDKLLRAKRNSYTNCLQKITCPHCPRVFPWASSLQRHMLTHTDSQSDAETAAAAGEVLDLTSRDREQPSEGATELRQVAGDAPVEQATAETDVHREEHGRGESHEPEEEHGTEESTGDADGAEEDASSNQSLDLDFATKLMDFKLAEGDGEAGAGGAASQEQKLACDTCGKSFKFLGTLSRHRKAHGRQEPKDEKGDGASTAEEGPQPAPEQEEKPPETPAEVVESAPGAGEAPAEKLAEETEGPSDGESAAEKRSSEKSDDDKKPKTDSPKSVASKADKRKKVCSVCNKRFWSLQDLTRHMRSHTGERPYKCQTCERTFTLKHSLVRHQRIHQKARHAKHHGKDSDKEERGEEDSENESTHSGNNAVSENEAELAPNNHMAVTRSRKEGLASATKDCSHREEKVTAGWPSEPGQGDLNPESPAALGQDLLEPRSKRPAHPILATADGASQLVGME

SEQ ID NO: 393 - DNA, 5543 bp, Homo sapiens
gtggctgcgctgcccttggtgactgcaagcccctcactgccttcctggaaccccagaacggctttcttcacaggggccccacccagcctccacctccccatgtctcgatcaagttggagcccgccagtagctttgcggtggacttcaatgagcccctggacttctcgcagaagggcctggccctggtccaagtgaagcaggaaaacatctcctttctgagcccttcttccctggtcccctatgactgctccatggagcccatcgacctgtccatccccaagaacttcaggaaaggggacaaggatttggccactcccagcgaagccaagaagcctgaggaggaggcggggagcagcgagcagccctctccctgcccagcacccggcccttctcttcctgtaactttggggcccagcggaatcctggaaagccccatggcccctgctccggcggccaccccggaacccccagcacagcccctgcagggccctgttcagctggcggtcccaatctactcctcagccctggtcagcagccctccactcgtgggcagctcagccctcctgagtggcacagccttgctgcgtccactgcggcccaagcccccgctgcttttgccaaagccccccgtgacagaagagctgcccccgctggcctccattgcccagatcatctcatctgtatcctcggcccccaccctgctgaaaaccaaggtggcggacccagggcccgcaagcactggcagtaacaccacggcttcagacagcttaggaggttctgtccccaaagccgccaccaccgccacccccgctgccaccaccagcccaaaagagtctagtgagcctcccgctccagccagcagcccagaggctgcctctcccaccgagcagggcccagcgggcacgtcgaagaagaggggccggaaaagggggatgaggagccgaccccgcgccaacagcggcggggtggacctggactccagcggggagtttgccagcatcgagaagatgctggccaccacagacaccaacaagttcagtccgtttctgcagacagcggaggacaacactcaggatgaggtggccggagcccctgccgaccaccatgggcccagtgatgaagagcagggcagtcccccagaagacaagctgctgagggccaagcggaactcgtacaccaactgcctgcagaagatcacctgtccccactgtccccgggttttcccttgggccagctccctacagaggcacatgctcacacacactgacagtcagtcggatgcggagactgcagccgccgcgggcgaagtgctagacctcacctcacgggacagagagcagccgtcggagggcgccactgagctccgccaggtcgcaggggatgcgcctgtggagcaggccacggcggaaacggcctcgccggtgcaccgggaagagcacgggcgtggggagagccatgagccggaggaggagcatggcactgaggagagcactggggacgccgacggcgcggaagaggacgcgtcgagcaaccagagcctggacctggacttcgccaccaagctcatggacttcaagctggcggagggcgacggcgaggcaggcgccgggggcgcggcctcgcaggagcagaagctcgcctgcgacacctgtgggaagagcttcaagttcctgggcaccctgagccgccaccggaaggcgcacggccgccaggagcccaaggacgagaagggagatggcgccagcactgcagaggaggggccccagcccgcccctgaacaggaggagaagccccccgagaccccggcagaggtggtggagtcggccccgggtgccggggaggccccggcggaaaagctcgcggaggagacggagggcccctccgacggggagagcgcggccgagaaaaggtcctcagagaagagcgacgatgacaagaaaccaaagacagactcccccaaaagcgtggccagcaaggcagacaagaggaagaaggtctgcagcgtgtgcaacaagcggttctggtcgctgcaggacctgacccggcacatgcgctcccacacaggggaaaggccatacaaatgtcagacctgcgagcgaaccttcaccttgaagcacagcctggttcgccaccagcggatccaccagaaagccaggcatgccaaacaccacgggaaggacagcgacaaggaagagcggggtgaggaggacagcgagaatgagtccacccacagcggcaacaacgccgtctcagagaacgaggctgagctggctcccaatgccagcaaccacatggctgtcacccggagccggaaggagggcttggccagtgccaccaaggactgcagccacagggaggagaaggtcacggcagggtggccgtctgagcctggccagggtgaccttaacccagagagcccggcggccctggggcaggacctgctggagccgcgcagcaagaggcctgcccacccaatcctggccacagctgatggcgcctcccagctcgtggggatggagtgacagcctcagtccccctcagcacagacaaaagccagcagagcaaagcgtctatacttcatggggtttcctcagtgccctttggctgttgaggagtgagagagagagagagagagagagagagagagacaagcaggagcgtggctgctcgctcagtgccatagccttaccgcagcctgcgcgggaggccacagcccgtgccgattccagtgccttaactacttaccggatccctccatattatcatgggtgttgtatttttccaaaatgacttcttaaacaaaacaaatattataatgaattgtctggagaggacctcttcatttgagcattagcgttattttgtattggtgtgtgtgagcttgttcttgtgaatctgtgatagcaccgtttgttctgtgagctggaaacagaaggaaaaaacatacccttgggtacccatagccaataactggaagaaaatgatgtgaatttcatgtaaatgaccagaggaaagatggataagatgataatttcttaaatagacattttccttttttctttgtgcttcatggtggagctgtcatctggtccttggtattacaggatgtggttgatgaaggtttccaatatggtttcaggccaaaaccagggaagattctagcttcagcctcatgtccatttccagtctgtcagcattagacatggtcactgttcaagtttcaagacatccattcttaactatagagaagagttactcccctggcgtcttaacctatggaaaacatgcacggataggatatatttgattgcctcctcttccctttcagtatatgtattattaatattattattattattattattattagttcatcagtttgctgttctctgcagtgagcagaatcaaatgggcaatatttgtcctgggagacctgtgccgcacccaggtccccgtgttaacgtgtgcctgcggttgtggttggcaccctcgggtggtagctcttctactgtaatgagacaagcctttcttctgtcactgcagaatttagaaggggccgtgagcagtcttcccaagcatggtccaggagcagctcagagagggtggagtgaggatgcatgcatccagggaacaggcatcaagaagccagggccgtgcctggagcactgcagagatgactttggagaaagcaaagcagtgacccagtgaccaggcacattactcgtgagcgaggtattcccagtcttcctgctaagcctaatccaagccttacccagctgtgctactgtcatttgcaaagcaaggaaatactactactggtaataaaactacacatgcaagatgtcagataagaaataggtttatatttaccttcctgcgatgtggggttggtgcttgaagataaatgtgctgtttctagtttcttaaatagcccacacccctggatgcaaaaaggcagggttatttttacccatgagcatcctgtgcaggcaatagacttccctcactgtctccgcctgcagggaggagaatgtaccccactgcacctgagctcctggtccctcagccaagacctcaggggtccccagccagcctgctgctggggacccctgtgcttgctgcagtgtatggagcctcttgccttcccctggggaggcacccctgtaccccagcttccttcccctggccttttctggccccagtgctcctcctttacatagacttgttcacacagaaacgtgcacgcccccttttctccgccacttcaccagtttctgaaatccaacctcccagacttcacaggaagatagatattcttgagataatgaaaagtgatatcttcgcatacgaaaggaaaaaaggttgaggtatatatgatttttaactgtattaggggtgtatgaaccagtttaaaaacgaggttttatttactgtagagatgaatgcaaatcagaaccaatgatcccttggcctacttagttaaaaccagttcatacatcccttagggtttttattattattattattattattacagttgttattgttgtttttgttgttattattatttggggtttcttgtgttttttctttgcgactctccacactaaacttgcaatattgtggggagaagctgtgactaaactctacgctgcggtgagatgtagcagtaatcagctcccagcgacgtgtgtagctggggctgccgctcgcaataatcactattgatttaaagctttacttagccttgatctgtaccctcgtagtcaataaggtcttgccacattttattagtgaggtggagaaacgtattatttgtttgttgtttttgcccttcccccaccccccaatattaaactgtgaaatttgtgatttgtttaaactctgggtgaatcatagcttagtttgcatgtccagctaatttgtttctatacattttgtttgattctctttctccttctctcagggcttttacaaaaaaatatatatatatggatcttctgaaaagttttttgaggtgcaagttttttctcttttttttttttttttttttttctcattgattaatggacatgatgctgagattcaatcactacatgaaacacctggctgtgaaaacaaaacaacccagagggctgtgttccaagcagcgctggggaagctacgtaacagtcggatgccagttttggaagattcaccatgcgttctgaccctctgttcgtctctttcctctcctctttcttcaagaaggaaattgatcctagtgatttcagcccatgcattaaacaggaaacaataataaatttgtagaattcatatttttctaaagggaacttaaaaactgctgctacatgttatgtacaaaactggtttatgccacatgaacagagaatcacaagtttggttttggtactttttgttcctctttgtattcagttgtatagaacttccaaattcagaatgagaagaaagctgttctgtatcaaaccatttaagcaataaatgttatattttaaaagctgcagattgccggtcacgtggcc

SEQ ID NO: 394 - protein, 748 aa, Homo sapiens
MEPIDLSIPKNFRKGDKDLATPSEAKKPEEEAGSSEQPSPCPAPGPSLPVTLGPSGISPMAPAPAATPEPPAQPLQGPVQLAVPIYSSALVSSPPLVGSSALLSGTALLRPLRPKPPLLLPKPPVTEELPPLASIAQIISSVSSAPTLLKTKVADPGPASTGSNTTASDSLGGSVPKAATTATPAATTSPKESSEPPAPASSPEADTEQGPAGTSKKRGRKRGMRSRPRANSGGVDLDSSGEFASIEKMLATTDTNKFSPFLQTAEDNTQDEVAGAPADHHGPSDEEQGSPPEDKLLRAKRNSYTNCLQKITCPHCPRVFPWASSLQRHMLTHTDSQSDAETAAAAGEVLDLTSRDREQPSEGATELRQVAGDAPVEQATAETDVHREEHGRGESHEPEEEHGTEESTGDADGAEEDASSNQSLDLDFATKLMDFKLAEGDGEAGAGGAASQEQKLACDTCGKSFKFLGTLSRHRKAHGRQEPKDEKGDGASTAEEGPQPAPEQEEKPPETPAEVVESAPGAGEAPAEKLAEETEGPSDGESAAEKRSSEKSDDDKKPKTDSPKSVASKADKRKKVCSVCNKRFWSLQDLTRHMRSHTGERPYKCQTCERTFTLKHSLVRHQRIHQKARHAKHHGKDSDKEERGEEDSENESTHSGNNAVSENEAELAPNNHMAVTRSRKEGLASATKDCSHREEKVTAGWPSEPGQGDLNPESPAALGQDLLEPRSKRPAHPILATADGASQLVGME

SEQ ID NO: 395 - DNA, 194186 bp, Mus musculus
  misc_feature (1)...(194186): n = A,T,C or G
agaccaggctggccttgaactcagaaatccgcctgcctctgcctcccaagtgctgggattaaaggtgtgtgccactacgcccggctcaccactacttcttaatttgtcacatgcagttaattctatttgatctccatgatcctggctgctaggaccagaaaacctagttggttgtaaagacagctatccatgagtcagcccacagccaggtacataacccagtggactacttctacacagtaagaatattcaggacttctaactatgagctgactaaaccagatcctctcatcttccagtgtttacatctggaaggcttggtttaagttctttcaaacccactgctctcttctataacattcttcttttatcataagatgtcattggttaagagtctgattacaccagatattgccccgctcccccgagtttaacaaatgtgttgatcagctttgtaacctggaataactcacttaatctccaacaatattccttgtcttgtctccacatgtgacaggcagaatgatggccataaatgtgtccatgtcctgattcctgtaacatgcaaatatgtggagattttgcagttgtaactaaattagaaacctagagatgggcatctctgctattcatgttagtctggtatgatggcaaaggtccttaaaataagattcaaatttccccagctgtagtaaagaggagatgtggccagcaaaaggtggtgtgagaggcaatgtagagactagaggctatagagatggaggaagggaacattgagcgaagcaatgtggagaaagaggaggaaacagattatcccccatctagagtagaggagtcctgccacgtccacaccccaacttcactcagttagatttgtgttagacttctaaccctcagacatataagacaatgaatacgtgctgtgttaggctgctgtgtctatggtaactcgatataggagcattaaaaacctaaacattatattagatcacactgaatacacatgaggaaatgtctaaaggaatgtgtactttgatataatgttgaatacagcatcttttatggatgattaaggctctgtggtctcatcattaagaatatgttatttgagagatgaataaaaaatgaagatactaaagaatatgtaattcatactaaaacaagggcccctcatgctctgtttggctgctgcagcataatgaactatctaggaggtgatttaataaccattctgtattgatgtacagctctcaactattatacaaagggaaaacccagagtgatagcaagtcactcctactgtctccgtcttctgatccacctctcaggtctaaggtctgtattcacaacatctacgtgaggttctactgtattatatacttttattacatgtagtcattttttaatttcatcattgtatataactaataacagccatatataattatagtgatagtatggtgtggtatacaccatcctgtagaatgatatcaagccagttaccatactcattaccttgaatatttactgtatttacttatttttcctgttcatgactttctggtctttggacaacatcttcagccctgataagcaaccttcgaccttgtttctataagttcaatacatattaatgagaatgggtgggtttttggcctatgtctggcttatttcactgttgtaatattctccatccatgtcatcacaaaagaaagactcctccttctaggtctgtcactactacacagtgcataggtaccacttttcctctatctgttcacccactaatgattcttaggaaggtcccatacttttgctattgtgaaatatgttgcatgaatttgggagcagagaggactttctaacctagcgatgtcaggtcctttggttatatagccagaggtaggtgtgttgactcagtactgccttttaaaatagtttgcccctttgctaacaaaccagccttttaagtatcctttgtgccttcccaggtctttagcataacctaagttttgtgatgtttcttgacatggtgcattttacaacagtgtctcatggtgatgatagaggctaacattaaagggatacttcaaaaggcattagagatgctgtggccatgccttgtccatcctcacagttgctcgaaggcctcacctacaacctgaaaagctctccaaggcctattcacagcccaccagagtcaccaggaaaggactattaaccagaatagagttatcgttattgctgataagcacagtaaagagagctgactgttcattagaagacccttgtgaattacttaagaacatggcttggctgagctaaaaatctagagtatgctcacgaataccagtttcccaattgagcaagaatgtctgagtccttatcacagcctaccatcttctagactcaagtgaccctaaatgcaatttggcatttggacaggacattggaaactttgcatgactcagttagagaataatgcaaagctgtttcccaccaagccactttgatctatgtggagccaaatacctgggtctgtcatgtgataagctactaaaccagacagggggaaagagggtagatttttagtagagatcttagtagtttcaatcatggttctatttatcaaatgtttactagattccaaatatgtgttctccaacatgtgggaactgcccaagagcatcctgcaccccatgcaaacagatttagcaattccacagttcagccaaagggtctatagctgaccaggatactaggtaaatctaaggactgcattgtaaaacgttattcagtcaatgaggataaataagcaacagtttcttggccttagaagccttgcaaacaggagacaaaggcaccattgtgacattttgtgatgaatgaaatgaccgagatggaggaaaaagataattcttcgggacatgggatgttgaaggccatacacggccatgttgccagaaagagaaggatggagggcttttaaggccatgctataattatgagaggtcacagaatacatgagaacagtgtgttccatgttataggaagatgaaggctactggtgaatgtggacaaggctagtgagaacctaagcaaataacatgggtttggaggagctgagtcatttcagtttcatcttgtaaggagcaagggcctggtagacatctttaaagagggaggacatgtctgggaatatcgagcaccatggagatgcttcttcagttaatgtctcccaaaggcttgttgtcctgtcaagctgcacccatagcttagactgggaagtgtataaacagtaggaacttcatggtcatgatgctggctggtctggatagactcctggcatcacaggtgatactttccagtggcgtggccaccagttgtaagggcctaacaagctcctctggaactcttttatatgggcacaagagcagtcagaggggtgacaccttcatgccttaaccaccatccgtaacaaactttaatcacaatgaaaggtgcctttcaacaactgaagcttagagaaacacaaatatcccaggtcgttgtacctgctgcacgcccttctcagtatggacattagaaaatggccatcacagctaagaattgctgtagtagtccaagcaatacaagtgtaaactgagtggtggcacaggtgggcacagagaagcctaaggggttaatatggtttgaggtttatttatttattttttgacaaagcaactggaaacaacttttatttattatgacatgtatgaacttaagttagactttgtgttgccagtgccttgccctgcccagctcactggagtgcagggttttgcacctgagggcaaggctgtgaatggagatgggtgggaatggagaagggtgggaatggagagagcatgcagagaggctttttctggtctggataccatgagcacccccaccaagagcaggagaaacaatgaacatgttgggcctaacagtgaaacttaggcaacaggcaaaggaagagccttaactggcccaaggaggagaggaccaaggctgccaggtgtctataaaagaaagcagttcttggcccttcctttttgtttcagggctagggattgaactggggtgggggtgttggcatttagtctaggttgtgccccacagttatctggcaacatccaggtgtgcctggctcactataaaaggggctgcttgccccctcctctctctcttgctctcttgctcctgcccccccccatccccctccctcttctctctccacatgttcatggccagcctctactcatttactctctctttctgcctttctctgtctctactaccctctcaattccccccacccccaccccatgccctgaataaactttattctatactataccgtcatgtggcttgtccctcagggggaagggatgcatgtgcccacggaggcacccccttccccaacacctggctacacattcaccaaacatattcctcctctccttatatttttataaaatactcaggggggaagggatcttatgaatggtaggcaagtccttaaccactgacactgcccagcccttcatagtactgtataaacataaaccccctctagtatccccatcatcaggattaccaaggatgcaattaggaagaacacgggtgaagagccaggggttagaggcatggatccagatgaaaggagtgcactggggagaaagggggtggaaaagaagaagcagaggtacagaaaactggatataaagggagacgagaagacaaagccagcagagagtatgcaagggagggatacatacagggaggatgtagacaaagagctttgtttctgtgacagtgaagtgacagaaagaaaagaataggttggattctattgaaattgctattatcttattctaaatcactccatgcagactaaacagaataaacagatgctactggggttattagttaaaaatatctcaatttaaaagcggtaatcatttctcctgggatggtgatgacggagtcagagggatgagcgtgtcacatgaaaaggagaggggagagacggaggggaaagtagacatgtatgtccagcacagcagctggcagtccctttcggtgcctggagtggcaccagggattacagatgtgtgtggcagacaggaggtgtggtttgacactttttagttgcatagtcaagtaggcaaagcaggaaaatctatcaaatggttctatcagatgagggtgctcctcagtgctggatctgggcatctcttttcagagttgacacagatggattgccgtcttcatttctgagtagtcacaagacaaacgagcagaggccagggaaacagaggaactcaacctttcgagcccttgaaagcagctatgcagctctggcctttcctagtcttaagagtaagttgccttcaggtgactgctggtggaaccagaatggccgctgggttccctgctctcagaaatagggtgtgacggtttcatttcatgctctgtttgcatggcgcttcaagggcaagactgtacattgacactggatatgcacaagagtgtacatgcacgactgtaaattcacaatgctgcgtatgtttctataaatacgtggggagggtcccaggagattgtatctgaaacagaaagcaagggtttgttgtcagcaaaaggcacaagagaactgaaattagggccgatagtcagtggaactgaaacttggtttaccagattagcttgttacaagaggaatttattaagtgtgggatttaaaatttgatttaagaattatagaaaaataatcggtaataatatttttattttttttcagaagtcaaaaatgtttactattcagtaacgaagtgagtgattttaagaaaatttacagcattggtaaattttaaatgttggacttatatttcactggagaaggcctgtccatcagtagttggctttcaaatcccatacaaagtagaattacaacctagtaaaggctaattttagaatgaaagtgttcatatcatttctttttatcatgttaatgtgatgttgttggtttttttaaagaagcaaaaaaggtacagaaagatattaaaacaataaagcaaaatacaagttacaaagaaattagtgtttgctagaagtctaaaagcaaagagaagtgctctcaatgaatcagaatcctttagactcctacccattgtctcttataaagaagtcggtctcccctctgctctcttctgtgcccttgcttcctcacacactggcctctaagccaggacagtttcatctttgcaaatgccacctacctcctaataacctaataacctaataacctaataaccattcctgaaaatggtgaccactgatatccttctaaaggagtgatgtgtgatgctacagttgagaggagtacagactaggcagagtgattagtacaattcaagaaacagtgacattctccaaagccgtaaataagatttatagagaatagaagttgattggccagtgagtcttcagttgtaggtaattgctatgggaggcagaacacagtgctagcctgggcctctcctgtttttatgaagccattaacaccatcaaaggggacccttcctcaaagtctcatctaatctcaaccacctccaaatgaccaacactctgtgaggttgaggactgcgtttctaatacacaaatttgcagcagcacattcgggtaatggccttgctgagtctatgctgagtctatgtcttcactgaggtggagtcagggccgagtgaactaaggcatcacaaatgcgtatggaaggagcagggagcgtgcaggatcacatgggcccagaaggagcagggagcgtgcaggatcacatgggcacggaaggaggagagaagaggctagatcttgactttagttttctgcaactaaaaaggaacagcacaacactgtctcccatgcctgagcagggatcaggtaagaaaatgatggagaacttcgttgttaatgaatttgccaaaccaacacttgagcatacttatttgaattcttcagtggggagcagatttccagtggcttggaatgttttcaattgtggaaggaaaggagccaaacgagtgggaatcgtatgtgcacacacacatacgcctgcctacacggctacacctcaattagcccctttatctctagtgtttatctctgtccccttcctcctaattccgtacatttctcccttagaccaaacatccatgacaaagacagacctgctgtctgaggttagctgctatgtagcggagagttgtaaaccatttcatggtgttcactgagatgtcagccaacgggacagcaccaagaagccaattaaagcagccagagagcgtgcttaagcatggatggaaacgcaaacactgtcttcactgccccaagtggttagacatttcttgcttgtttatttttgtgagaaccatctgtagttcataattatttttgacaagcagcttgacctgccactaaccaaacagaagagaaacaacaaaacaaaacaaaaaaaaaagaaggtaaaaatccaagaacccaagtaagaaaccacatacagaaattctacatcttatcaactgtgaaaaaaaattgtttttctaaaataattctgatatggtttttttggaacaaattctcagttcatcagttgcctttaaagaagcatcctctctctctctggtctgagaggtatgtatggggattatatatgcctgtgtgtgtgtgcgtgtgcgtgtgcgtgtgcgtgtgtgtgtgtgttcaggtgtgcttcctcatgagtacatatgtggaggccagaggttgaagttgagtatattcctttatcactttccaacttatgttttgagacagggtctctcactgaacttattgctcaccagttcagctagactgactgaccagatgccaacccctgtccactagcctgtccactgttaagtatcagcgttacagacatgagctgccacatctggtttttatgtgggtgtcgtcacatctgcctggcaagcacgttccctactgagccagcacccacatatgtgtagcactgatttacaaggagactctgctgacatttgatatactataaatctgtaaattacatcctaatgttcagacatttaaattacacatcatgattaaatgtccaatgaaaaagtaatcctttaataacaagaaatgcatacagggatacttagacaaaatatgcacaggcctttttctctgtaccaccagctcattatgaaaactctgtgctattaaacaacaacaacaacttgccagatgagtaatctactcagaactcagatgaggtctggattcatagcttgtgctcaagaattatttgtaagaggaagttatctgattcacttcagacacatgtgggagaatagatggagatgtaggtgttggtgtgtttataaatcactctgcaagtctcgagctgagttgtatttctctattcgcccaaagtggtgtctgtttatgggtagaatatcttcagtgagaatttttgcaatcttagactgggctggttgactactgagtttccctcatagaaggtggaggatgggagagtcatgggatactcttgagtatctagttacttctcccaaccagtttcatgaaattcagtcctaactgcatatggttccaaaggtctcaagaaggggctagaacatacatgcaggtagagaaggactaggggaggggtctgtatccacacagccctgggatgaccatcatccatgttggatacagaccttcccgtgtggttgctttaagctcgcctacatgcctgcccctcacccctcttccatactctgtaagtaacccaaataaactctctggttccctagggttcactttggcttgccattagaacctcatgaggagggaaggtgggaggtccctcctcatggggggaaatctcaccatagcagcttggcaccaaagaggaacaccaggcatccatacatgtttaagagcatttgtcattcaaatactccttctcttttctctcaatctgctatctccccaagtaattccctaggcgactctcaggaataggaaacagggaagaagaaaatgaaaacccagatcaaaagatatagaattgaccctgataataacagcaagcactcatgtagtccttattttatgccagatgctaacccattcaatactcagaacactccacaatgtttcctgttgctcagaagaggacactgaggcacaaaagcgtgcaacataaaacatgactgatccagtggctcacttacctgctgcttagaagtagagaagaagaaaaggggttaggaccaggtggctttccacttccctcccactggttcaagtgtttttattcttacttcattgtaagttggaggttctccagtgaggatatagcccctaagtcattgcctactatatgccacaaataccataagtacttactatatgtcagaatgtcccatgtcaatttacagtagaaaccttcagaacaaatgtagtccatataaacaacaacaaaaaaataccaaaccaaatggctttttaaatagcctatattttcctgcaatgcaactccaaaaggccacttcaagtgaatttaaactcaacgtcaagatcactcctgtttcaaaccacagaaaagattacagaaaagaaatagttttgctacctactcaaaattataacatcttctcaacttattggacagtctgacagagaaagagaagtagaaaaatgaggagggagaaggaggacaaagagggggaagaggaggagggatgaagaagaggaggagggggaagagcaggaggagagggaggaggtggtggcagcagtacagagcggaaatgaattgagacaacatcgcctctcagcaaccggaaggaaaaaccccacacatgcacaggccacgaacatccgacgggtgtggttgctcagtagagaagagctgtcagctgcccttagatgcaaggaggggatctgcagagagagaagcataaggacacagagggacgagttcccatccctgcctgcctacctagaagagatcagggtgtccagggtcacaagatggtctgtccactgcggttctgcgttcaggtgagtgccagccccttgctgtggcttggggtgagggtagggctggcatgcattcagattcttacttcctgtgttggtgtcagacatccggccatgtctccagttaacaccccttaacagtggaagggagggttcagcctgccctggaggcagtttgacctggagcagacctggagtggctgtttctaggtcataaagagtctgatgatttctaccgtttaaaccttcctatttcagtgctgcttggtgtgtatgtatagggctcctcccttcgtgatgtcttcacagaacttaccctgaaggagataaagctctttgattatttcggtcctttaagcatagattacagttgtttgtgtcgtttgtggggggcggggctagaaattgtgactgcaagagtcctgccatatgtcatcagtaagttaatttatatgacaactatctagagagtgctcacaattgccagccctattttaagtcaaaacctagacaggaacgagcttatatagcaggagagaagtagacattaattaattcaaggaaggaagatttgctttcttctatacttcaaagttcttttcctgggtagtctgtgaattagcttggcctattagccagagaaaatagatttaattatatgttacataaagctagaagactcagagcatcagacaggtgactgaggctcatgtataatcagtccttaactgcagggagcaatctaggggtctggatttctagcaggtgctgggtcaataacatggcaatggagacaagcctgcatgtccttgatgtcctggagaatgccatttgcaatgacaggaaggcgatgttaactcagacgcaccaggtaccttctccatgggttagaatctctatggaagatgattaacatcttcctggtgcggacaatgacacgcactcataaatgagatttttttaaaagttgtagtttcttatatgaacaagcaagtgtcaatggttccatatctgtgatttcttaaaataaccccttaaaatatacaacatgtcataggggcatattttagatggcatattttggtggattcctacagtcacctttttgaggtattgtgttctgaaccccaaatgtgatgaaggccagaatatattctgggaaaaaatgaaccttccttggaatcagtaagggtccataaaaagcatggagataaaaactggattaaaaaggaggggttcaagtagcagtcggggggcagagagatcagccacacaaagctccgagaagagagatctgccgtcaaatgaagagagcacagagagatggaaaagacaagattgagcaggaatggggaaacggggaggcagcgtttaagatggtgtaagcaacagttctcaatccctttaggggttcaaacaaccctttcacagggtcatagcatatcagatatcctgcatatcagatatttacaatatgattcatagcagtagcaaaattccagttatgaagtagcacccaactcaattttatggttggggatcactacaacatgagaaactgcattaaagggtcacagcattaaggaagcttgagatccgctgctgtaggcgctctagggtatctgtgtggtacagcctcttgctcctgcagctatgatgaacaaattaacacaaaattacagcaagcactagagattgtatcaaggggttgcagggaacaaggaaggctgctgctggggtcatgtggtagaatattttgcagtcaaattgtattgtaacaatgagccttccaatgataaaaatgtacgggatagtcattgcctaaaccagcagcaggtaggtgacttgttattatcaggtaccacgtactgcactcaggttgggtatgccaggcttggatctgattggcagttgactcactcagtccctctctgcacagatgaaaaatgtggtataggatggcatggtgactgtgatctaaccaggagcaagactttttcagctccaccagaatgtgatgagacaggattgtatacttagcccatcactgacaaacattattcagcacatgactactatccagtggccaactgcccttgacttgaggcgttttggttctgagatctctcctatctattcaagggatgcagtcgtgggtaggggtgggtggcactcatcacccatctggtgtcattccggaaagagagcacatgaacaacctcaggaaaagctccttgtgacatgcatgacacatttctccaaaaggacatatcctgctacagatgctgcctttcctttgctggtgatcttgtccccccccccccccccccacaaatcacccggatgaaatttctagtgtggaacatagcatcgttttacatggtacaagatagcagcttgggtctgaatccagttgagtcatataaaaatttttattttgccatttcattgttttggtctattgattttagtctcagcaacaattttcagtgtgtatcagcatgatctgtgaggcctcattcaaaaatgttatccctgacccatctctctctttctttctctgtctctctatctctgtctctctgtctctgactctctctcatatgctgtctatttatggatagataaatagacagatgagaactgagaaaaataaagacttcaccctgcccaaccaatgcaggtttgaggaaagtacagcttttgctttttttttcatccacttctccatcacacaaaacccataaaccctcagtgaagggacccacgtaagtccctcccttctcaaagcccagggcctagagcagcagatcagatcagaagtgctggtcactttgcttgatgctagggagagccagatctcgtaaggtgctctcttgggagtttcccagtgatgtgttctctgcagttgcctatccctgctgcccagggtggctgctctgctaccacgccatcatccgaccgtatggcctgtgaagctctcataaccttccgactactttcaatgactctgaattccccacccacagcctcatttgcagtgagaggaaacatgtagaggaagcaagactgtgggtagctctgtgtggccctgccctgagaagcagagtggtgggccagagccttgggtcacaccaagggacacggcttcagcaagccatagtcatggactggccagaagctgtggctccctgctgctgcccagcatcacgagagcggatcggaacacacagagacaggcccaggatccacactcaaaagcccaagtgtggtttctactgagtgtgcatcactattaccccataagagagttaaaaaggcttcatttgggcctttgtaaattgaggaccatcttatatatacacaagtatatccagagtaaggtacctttaggatagccaagttgatgtataagatgatctgtctcagatactgttttgcttttcagaaacttggtattttcacagttgttgagggcctagtatgattcgagtaatgttctaggtcctgggaatgtagcatgaagttggcagacaagccccatcctcaagccaatcgtatatggaggcagaatagaaagtccaagaaaaagtaactgaaggatttatggtaaattgcacacctccgaaaatactgtgagttaggctaatgtcaatctcatttaaattttccctgtcaaaacagattagaatatactaagaaaaggagcaaagattttttttttaactttacagactttactatctatcaggggcaacaaatctaagggacttgatcatgggaaacacattctaacacctatacacagcatggtaaccattatatagctttcagtggtactggaacatataactcagctgtaggggaccagggcagtgaacaaattacatgcaattgtattcaaattaaaatggcagagtcatctgtgaacacttatttcgtgttcttcacaatctctctctctctctctctctctcatcatcatcatcagccagttaagagaaccacctcaaagtgacggctctcagaagacagaatcactggagagtgtgtgtaggtttctctgcatggctatttattttattaccctcatttcagtgcatgtgtgtgtgtgtgtgtgtgtgtgtgtgtgtgtgtgtgtgtgtatagagaacgggcatcagaaatggaggcattagcccatgttcttcagaactgggaatctatttgcttacaagagtgtgtctgtgctgccctgctgtgaaatgacacatgtgaccatgggcatggaaacagaacaaaagaggatcagcccttccttaaggaatgtagcagtcagaggcagcaggccaccatctgctctagtttagactgaccccaaaggtccctgtgttaaaggcattcattgtgccactgtgaaggtggaacctgcagggggtaagggttatcggagggaattaggtcactggatgcatgccccctgaagggaagttggggaccccaggcattccttttgtctcctgaccatgaggttggtggttttccttgccatatgcccacactattagatgcagccttgtcatgggcccaaagcagcagtgcgactaagcacgggcagtgctggttacttttctgattgctgtggcagaatactggacagaagcttatggttcaagagaggatgcagggcattggggtgaaggaggtttggcatcaaatgtgtctctagttgaggaggcaagggtgtgactggtcacattacatctgtagtgaggaatcagggaggtgaatgatgacatcagctggcttcctcctcttctcccattctcttcagtcttgtacctcggtccacagggtgtgcacttacattctggccgtgtcttttctccttagctaaactcagaaaagactaccacaggcagactcaaagatatatcacaggcagactcaaagacacatcacaggcacacacaaagacacatcacaggctcatgcaaaaaatgtatcataggcacaagctaagatatatcataggtgtacacaaagatatatcacaggcatatactaagatatattacaggcatacaaaacgatatatcacaggcacatactaagatatatcagtcacaaatgaagatatatcataagcacatgctagatatatcacaggtgcatcctaagatatgttacaggcacaaacaaagatatgccttgtaggtgattctagtgaagattagccatcacaagaactgaaaactctgaaacctgagccataataaacctttttttttctgtccagttggatgtctgaagcctttggttacagcgatgggaagctgaggggtgtttcaccccaaggtttcagtcagggctgggaagaccacaggggtggaactgcacactggcacacttcagagtggaattttagtaaagaaatcacggttaggacagactgctaattatctccaataagtaacccctactctcaagaatctctcctagttgagtggcgcagagaacacattttgatgagacaaaatcacattgaagacatacctaattatacaactaagtgaaagaagctagactgaagaagccctgtaatgtgtgattcccagatatggggcattctgggaaaggtgaaaccaccgagagatgaaagctcattggctgataatggctagcggggagaagaaggatgaggggacacagagggctttagaacagggcagtggcttcataggatgctacagctgtgaatgtttgatgttctacacttgaacaaaccagagtccccaacacttgagtataatccatgtactcattatttgtcgatgtaggtcaatcagtctaacaaatgcacaggtatggtgtgggatgctgacagtggggaagctatgcaccagtagggcagaaacacatggacatctccctacgttccttgcagttttgctctcagtcccagatttctattataaatagcttatatttttaaagagctaagcagcctcgttgacattctcaacaggggccaagaacatacgtaatcaggacctagcactcatgcttgggcccctattgtcccagctggtttggtttgatgaggtgccttgttgtttatttgtttgcaccaatgtgacacaagctagaggtatctgagaaggagaacaaaagtttgaggaaatgcccacactaaattcatatgtgggcaagcctatggtgcgttctcttcattgatgattgatgtgggagtctccaactcactgtgggcagtgctacctcggccctggtggtcctaggtgctataagaaagcaggttgaacaagccagtgagcgtctgctcctgcctccaggatcctatcccgtttaagttccagccctgattttcccaacaatggagtaagatgtggaagtgtgagcaggaatgaacccttttctctctaacttgcttttggtcctggtgttttacagcagcaatagaaaccttaactaaggcatctctacccagaaagacccttgggaaagagctgcaaagctttatcccttgctcacttcaccttgccaaggcagcctcctatcacagtgccattgtcaccccatcacacactcctcttgtaacctatttttcccagcaggagacacagtaagcacccacagtctgtttcctctgggctgtcagcagtcctatcctttttctctatacatcaacatataggaagtgctggagtgaaggaaggaaggagcaagttactgagtgtgtgagtgtcagaaactaggtctctgagacagggaaaagggctctctgctcttaagaaccagtccaaggtagccttgctccaatagaactcagagaggaaagcgtgaagaaagggggagggtagaaacggggggggggggggggggnnnnnnnnnnnnnnnnnnnnnnnnnnnnnnnnnnnnnnnnnnnnnnnnnnnnnnnnnnnnnnnnnnnnnnnnnnnnnnnnnnnnnnnnnnnnnnnnnnnnnnnnnnnnnnnnnnnnnnnnnnnnnnnnnnnnnnnnnnnnnnnnnnnnnnnnnnnnnnnnnnnnnnnnnnnnnnnnnnnnnnnnnnnnnnnnnnnnnnnnnnnnnnnnnnnnnnnnnnnnnnnnnnnnnnnnnnnnnnnnnnnnnnnnnnnnnnnnnnnnnnnnnnnnnnnnnnnnnnnnnnnnnnnnnnnnnnnnnnnnnnnnnnnnnnnnnnnnnnnnnnnnnnnnnnnnnnnnnnnnnnnnnnnnnnnnnnnnnnnnnnnnnnnnnnnnnnnnnnnnnnnnnnnnnnnnnnnnnnnnnnnnnnnnnnnnnnnnnnnnnnnnnnnnnnnnnnnnnnnnnnnnnnnnnnnnnnnnnnnnnnnnnnnnnnnnnnnnnnnnnnnnnnnnnnnnnnnnnnnnnnnnnnnncaggaagacagaggtggggtctgggatcgcccccttctgcacctcaccctggaggccaggcagttggctgaacgttgagtgcacctctctgtacagttgtgcacactgtcggcagagttagaattttcctcgggagaagccaaggtggccctcctccggtgctggagaacagcctgatggataaacaaagtttcaccaaagaatatctttggatggaacattttgcagagaaaatattgctggctgcttgctttgactttcatgcagcctcttactcaaacctgcctagcacccaggcctggccttctcggttgcccggagggatcggctagcagagagctctgtctcctgagctgagtttcacacctagtaccctggaagcgttccccaaatacttagagagatgctgggcctctctgtctcgtgctttctctctactggttgtttttctttctgagtagcatagcaggatgacttgaccctagcactctacatcctggcatgggnnnnnnnnnnnnnnnnnnnnnnnnnnnnnnnnnnnnnnnnnnnnnnnnnnnnnnnnnnnnnnnnnnnnnnnnnnnnnnnnnnnnnnnnnnnnnnnnnnnnnnnnnnnnnnnnnnnnnnnnnnnnnnnnnnnnnnnnnnnnnnnnnnnnnnnnnnnnnnnnnnnnnnnnnnnnnnnnnnnnnnnnnnnnnnnnnnnnnnnnnnnnnnnnnnnnnnnnnnnnnnnnnnnnnnnnnnnnnnnnnnnnnnnnnnnnnnnnnnnnnnnnnnnnnnnnnnnnnnnnnnnnnnnnnnnnnnnnnnnnnnnnnnnnnnnnnnnnnnnnnnnnnnnnnnnnnnnnnnnnnnnnnnnnnnnnnnnnnnnnnnnnnnnnnnnnnnnnnnnnnnnnnnnnnnnnnnnnnnnnnnnnnnnnnnnnnnnnnnnnnnnnnnnnnnnnnnnnnnnnnnnnnnnnnnnnnnnnnnnnnnnnnnnnnnnnnnnnnnnnnnnnnnnnnnnnnnnnnnnnnnnnnnnnnnnnnnnnnnnnnnnnnnnnnnnnnnnnnnnnnnnnnnnnnnnnnnnnnnnnnnnnnnnnnnnnnnnnnnnnnnnnnnnnnnnnnnnnnnnnnnnnnnnnnnnnnnnnnnnnnnnnnnnnnnnnnnnnnnnnnnnnnnnnnnnnnnnnnnnnnnnnnnnnnnnnnnnnnnnnnnnnnnnnnnnnnnnnnnnnnnnnnnnnnnnnnnnnnnnnnnnnnnnnnnnnnnnnnnnnnnnnnnnnnnnnnnnnnnnnnnnnnnnnnnnnnnnnnnnnnnnnnnnnnnnnnnnnnnnnnnnnnnnnnnnnnnnnnnnnnnnnnnnnnnnnnnnnnnnnnnnnnnnnnnnnnnnnnnnnnnnnnnnnnnnnnnnnnnnnnnnnnnnnnnnnnnnnnnnnnnnnnnnnnnnnnnnnnnnnnnnnnnnnnnnnnnnnnnnnnnnnnnnnnnnnnnnnnnnnnnnnnnnnnnnnnnnnnnnnnnnnnnnnnnnnnnnnnnnnnnnnnnnnnnnnnnnnnnnnnnnnnnnnnnnnnnnnnnnnnnnnnnnnnnnnnnnnnnnnnnnnnnnnnnnnnnnnnnnnnnnnnnnnnnnnnnnnnnnnnnnnnnnnnnnnnnnnnnnnnnnnnnnnnnnnnnnnnnnnnnnnnnnnnnnnnnnnnnnnnnnnnnnnnnnnnnnnnnnnnnnnnnnnnnnnnnnnnnnnnnnnnnnnnnnnnnnnnnnnnnnnnnnnnnnnnnnnnnnnnnnnnnnnnnnnnnnnnnnnnnnnnnnnnnnnnnnnnnnnnnnnnnnnnnnnnnnnnnnnnnnnnnnnnnnnnnnnnnnnnnnnnnnnnnnnnnnnnnnnnnnnnnnnnnnnnnnnnnnnnnnnnnnnnnnnnnnnnnnnnnnnnnnnnnnnnnnnnnnnnnnnnnnnnnnnnnnnnnnnnnnnnnnnnnnnnnnnnnnnnnnnnnnnnnnnnnnnnnnnnnttagttcaactcagcctcagtaaacaaaaacaagtggtgtctgaagctgctgagaggaggggctctcaaagccatttcactctcatatagaccaacttgtggatcagccactggtcaccaagcacatcccgggtccctgcagtgttctgagcccttgtgagcccaacacaaacatgatgaccaccagcatcgactttttcaaatggattctagttagaaaccttctgggctcattgactgtggtgttggcatgcccccaggttgtagtgtctgctgtgtggttcatgaataaagagaaagatttggcctcgtagactttcaacattcacagctccttaaaaatattgtgtccatcaagtgtgtctgttccctcatgtgcacgtgtatacatgccataacatgtgtgtggaagtcagagaataacctttgggtgtcagttttctctttttactatttgaggtttggggcttgaactcagttcatcaggcaccacggtgctaagtgcttttgccaactgagtcatctgatcaaccctcaacacggacaactcttgtgtgctaacgaagaatgacgagaataaaaagtgttactcaattatgtttattatctataaatccgacaggtcttcattactttgtccttctcaaatataaatgtacgcttctggctcacctccatccccatctgtctctccctctcaaagtgcaaacattcactaaggaccagaggaagggcttagtgccaggctgcccatgaagccattactctcatggcttccccttggctaacgccttgcctgtctcactcaccaaaatcctagggaattcacccccaagagtcagcagctactgcctctgacctcacctgggaaaagcccttggagaagccaagctgaagatcttcctgaactactgagaatcatgacagagatccgaacctcccacctctctgtggggctcatatgcagatgatgccaaaagaactagtagctacattacagaattctagtgagtcatttggtcagtgggtatcatacacacttcaaaacacattgccatagatggagctgagagtctggcctcctggggagagctaaaactcagactggatcatcgtaagaatttccatgggaaaccctctgagagaaagcacagcgacttgctaattgtagcttactctaaatctaagggcaatgtagcacttatgaagaaagatcagaaggtttgaatgccagtcattggtgggggaatctctgaatatggcaggcctgcctggtggactccttcagtgaggagatcagtcaaattgtctttctctgagatgctttccaacagtaaaaattgttaaaccatatttggcctggctgtctatttcaaaagttcaaccttataatcactttcacaggcgccccacactgccccgcctagatttccaacatttccttgatgccgtgtgattacaatggaaaggaatgccattcttctccagccgcagggaagtattgggcttcctttgtctcagaaaatagatgactgcttgtgtcagagaccttgacctaaatcttaattaatgcccatggcctgtttagaccagtgtgtgcaacttaaccagacagtcccaggagaaagaattagtgatcacagaaaggaaaaggtctatattttcgattgatcattcatggaatttattgcaatgcccattctgcctataatttagctttattaagtttggctcttggggtaatactttcttcttaatgttcagtagagtgaaaacttggtttctgttttattcttaaatgttctggttaatcctggctctaatacacagcattaatttagccaaaacattgatttagcatggcatggtggctcctgtccagtattttcaaatctgacttaggagggcttctgcaagttcaggtctagcctgggctacatactgaattctaggctatgcaaaacaagagtgagactctgtctcaagacaagaaaacaaaaataatagctgccaacattaatatactaattattgtagtattatttattatatattatatactaattaattaaattagcatatgttcagctcattaacccccatcgctgtattgaattttcacagtggacctagagattgttgattgtattcttctctttgatgataatgtgaccaaggagactgcagtgagaggccatttaggtaacactttgggcagctgatcaaatgatgtaggtgtgactagaacccagggcttctggctaaggaagagttcagccaatgacaaggtactacttttatcagggtctgggcatcatttatatcttcagtgtgaagacactggttttctttagactaactcccttttattttcagtcagggaggtcttccatggctgatattccaccttttccccctgtattggctacaagaattaacaggcgtggaaagcttccctatgtgtgaagtatcccttggagactgctggcttttcttcctaaatcctacatcatttgcccctccctttttgtcactcggcatggtgaaggtgtctcctcaagtacccatcatccatagatttcctcaaatttactttatcagaactggactagcagcgatggatttgaccccactactgttaatcactgtatctcaaagctcctggactttccattcaaagtcgtgatttacagcgtgaatgagatctgttttctagaagagagaatttcaaggagcagacagagctgaaggcatctgtctttactcatcccagctgcctacccctcagacagcctgggttatcaaaagcccatctctcactacagtgtcatcattatcatcaactcaatatgggccctcacataaagacctgcaacagaactagtttccctttgggggggaaaaaaagcaaggataagtccttgggaggctgaggtcatttggttttcctccatggaaacagggtatctctttattaatcagaaggcttaatctgattaatcagaggtaggaggggaaattgagaaaaacctgatttcagtagactgtacctttgtggtaagaaagtgtgcccaactgtgagtgggcaatagaagatttggtcaccataaactgccccctttgaaatatccagcttgtcacttactgctccttacagacccgctaagctgggtacagaagtcaagagacaggaaattcaggaatttcttatgtgtcagaaagaatccgccataatagatatcattgcaaaataaataatcagggattgggaggagttccatactatggctctcccttttcttcaaagttgttttcatttctcaggggcattctattggccaagtgggatattcagtgaggaggtggaagagattaggggtgtgcagaatgacataataataggccatccggtgctctgcatgtttaagcaaacagacattctctgattcgcagccatcctctgagggaggtagcgttcctacagctgtagagtatacataggggttaaaaaaaaaccattctgcatgggtccatatactggttaggtcaaaggcttgtgtgtagtatcttaacctctttgtgagttagctttctcaccgttaaataataataatgctatgattatttaaatcaccttatataataaggccatacacatgtggggaagtacacgctgagggaccaccctgaggtacagtgactggttggaaagtgcacaggcttcagcatgcagttacacctacagttaagtcctgctatatcaaaaggacacatgccaggatacacgagcgaggagacctggcatcctctactgggagtcctgagctgaaggaccatgcaggatgcacgtgcctcttccagcaatgacttatgtaggatatggaatgctgactacccgagaagctcattagagactcagtgccagagtattggttggggctggtcatttagacagtctctgtcttaaacaccacaatcccagactcctgggagaaaagcagatttttggtataaaacacatttttttttgaacccatagctgagtatgtatggaatgacaggagccttctatgagtccccagatgtaagccaagggccagccttacaagcagggctttctgaagacaggggtttcaggtctctctgtgttcattgcctcattggtttgttgggaaattagatgagtgtgcgcccttacgacactaccttatagttgagaaactctgaaaccgttttagtcatgactagtaaacacaacagatctatggagactttaaattgccacagggccacacttaactaactagaactcgaattctcatctgtctgactaaaacccacccaaccatgcatcaacttacttcactctaacaagaaaaaaaatggcctccttcttcgaaccaccacggaatggagttggtcgcagactcccctctcaggcttttagtggaaggagattttaaatatgagtgatagtgttgaatgcatagctttcttgtgctataagcaatatcacgttgtggtgcagagtcctcattggttaaacctattcagagtatgtcctggattgatttctttttgctctgatagcatcacagcctaaagcaacttggaggaggaaaggcttacacgtccaggtacaatccatcattgagggatgtctgggaaagaaccaaagcagaaagcatgatgggatgctgcttactactcggcttgcccactaactcatgctcagccagctttcttatacaacccaggacatcctgcccaggcgtggtatgatccacatcaatcaacagcaagaaaatgtgccacagacatgtctacagcctgtctgatccaggcaatcttccaattaagactccctcagatgactctaagctgtgtcaagttgacagctggagctaactagaagagagtaaatctatgggccacaactttaacgaaccaagaaagcatattttggactctgtaccatctttcctgctcagttagtgatgctttcttgatgtcccttccttttgaaagtatgtatcacagatgccccaagaatttctattagtaagatctggatagtagatcttgctgtgataatcagaaatcattcagctataaagcatttaggcctaaaaattccttcttcacttcttcccctgtggaagccatcatcaatttcacttattatggaatggcttctgtctcatgtttctccaggtttgagggcagcagaaatacctgtcttagtcagagtctcaagaaaaacagaacggatagaataaattacctttcctcccctgcctacatatatatatgggacacacacacacacacacacacacacacacacaggatttattagaatgacttacaagctgtgattcgacaacagccatctaccagtggaagcccaggaattcagtagctgttcagtccacgtcagaattccaaaggagtgtgctctaatgtcagtgaagcaatggacttgccaataagagggagggcaagcaggcaaagagagaacttcttttatataagctaccatgggaagatgtggcccagattaaaggtggatctctccacctcaaaagattgggattaaaagtgggttttccccacttcagacaacttaagaaaaattcttcataggtgtggccagatgcttgggtttctgctaaatccagatagagtaaaattgacatgcaagaatagccaccacagtatgcaacagctatcttaaatgtattctaggctgtcccacagaagtgtcctcactaaaacgatcacagtcaattgagagagaacttttgattaagagcctaggaagctagaaagaggaaaagggctagaaggagcctttagaaggaaagttaaaacttttctataagttacttcattaatggatcattgatatctgaacacagagtaggaaaaagcaacttcagattaataatttaatgttgccattgttaatcgctatgcagctatgtttttaataagcagagattttgtaaacctcttagtcatttttattttttagagtctagatttatacatagtgaatattcagtaaaaatcagttccatcaacacacaagcctcaaagcattcatctttgggttctgtggtagatgatgtcccaagtgaacaggtatctatttcctggatagctgtagtcagcccagaaccagatcttgacacctctataaatcacttcctctggtaaggaaagtgtgatggtttgaatgagaatggctcatatatttgaattcttactcaccggtagagttgtttgggaagaattaggaggcgtggccttgttggaggagctgtgtcactgggaatgggctttcaagactccaccacaggtacagtgtctctctgctactgtctgtgaatgtgaagctctcagatcctgctcctgtgccatgcctaactgcttcccaccatgatgatcatggacttaccctccaaaactgtaaatgatcccccaaatatatgctttctctcattagagttgccttgatcatggtgtcttttcagagcaataggactaagacaaagagtaagcaaaagaatagagttttcacaaaacaattcaagtggaatggtcccaatatataattagaatgaatacatgcatttgaactcatgggatacagtggtcaaaggactggttgttcatatctgggcgcatgggtgctcctgaatgatttaagatgtgtcaagtcaaagtaagatggataacaaaccagaagcagagaaaaggagagaaataagagttgaaaatgagatgatgctggtgtaatttcagattactatagcagagagtcacagatttatttttggaggtcagaagtacatgatccagaggccactgtggttgaggtcctgctcctgggtagcaggggttaccttcttgtggttgtactctcgcgtcttaaaaaataacaagacagatgagaggtctctattttagtcttgcgatcaaggcacaaatccattcatgaggattgtagccccattatgtaacacttctcaaaacctccacctcctaacatcagtatgttaatggctaggtttcaatgcatgaatttgagagattcagtctattaaagccagtgcaatgcagattattgagattcatttttcctaatgtgcctcccaaatattccctgggtatctatgactttgcctttgcttgggtagatttttatctagtatatcaggcttagcatttagcatacatgcgtatgtacatacatacacatgtacacacacacacacacacacacacacccatacatccatatacacacagagagagactgaaagagagagagagagagagagagagagagagagagagagagagagggagggagggagggggagagaggagagagagagagagagagagagagagagagagagagagagagagagagagagagagcacttgtgacttctgaatatcatttcttggactctccagtccagtctaagcaccaacggcctggccttccatatgttatagctcttctccctaagtgggtatgctagaacaatctactcccaaagtatgggaaatggcagaaaggtgctttgggagcaaagaaaagaggttcatagatctagtattgcatagtgcaatttattgatcaacttactgagagaaatatggtcatagtgtacagcaatgtcaggtagatctctactatttgagtcagaagaagatgtctgtgtatgcatattggttaggataacttcagtgacttcaggcaagccagattgtacctactctattttaagaaaacatcaatgttgaatacatcccagaagccaggattcaattgaaatacatttaatgacactctaatcatttaacctacttatatttctctaagagacagtgcagaaaacataaaaaccaactctgacatctctaggataattgtggtgattatgacacaagatagctgtcctcatgtcaaattcaatccagtttctttgtgaatctcccctgactgtgttgctatcttctcttctgggtgttgtgagggactgaagtttgttccattggcagtgtcattaaaccacagaattcagagctggaaagtgacatcacttctctatccagtgacactttagcaaataaaacctactgccttcagtacatcagcatgactcagtgtggttactacatatcaatctgccatgttgcatggaaagtcttgttgtcctttggtgatatgaaatgaatctcaagttatcaaggaacaaagtgggcgaatcatcatctctaccctgaaaatatgttcaaggtcaagaacatgtttagtgaagtgtatggccacctcatacaacagatctccctgaagtccaagataaatggctcaggtgatttggaacgtcatatgaaagagaagatttttcaagtctgcctgacagtggatgaagcaatatatattttttaaagatgtacttattattatatctaagtacactgtaactatcttcatatagcaccagaagagggtgtcagatctcattacagatggttgtgagccaccatgtggttgctgggatttgaactccggaccttcggaagaacagtcagtgctcttaaccgctgagccatctctccagtccagatgaagcaatatttgtgggactgatgtaattattccagtctgcaagaacatgagaaaaaggtaaaatttgcagagttagaacttaacgatcactctatcctgacttatatatagtttttttttctatgtatgaatttgtcaagggaaaattcatacatacacacacacacacacacacacacacacacacacacacacacacatacacccatacacacacacacacacacacacacacacacacacacacacacacacacatacccatacacccatacacacacacacacacacacacacacatagcttatgtcttctggatacaagaaagaaagggagtttgttctttcaaaccagttggaaatgtcttcaccatgtctgaaagataaacagaagcttccccagccccttcctcagggaaatccgagcacagaaaatgctgctgttggactcctcagcaaaacccatttgcttttgaactctttcgagtatagacaggaaggctttatggaacagcccagcttgcttctctagccgtttttctgcgcagagatcaatacgatttctttcttcctagtcccctcacacctgcctcggctgaaacactgattgttgacctctcagcaatgcataggactttgagattcttagggcctgccactccacgctgtgagacttttctgttctctctgtgttgcaagcagaagctctttaagcattttggacacaatacacgtaagagatgtgttgcaactgcagatggcccttacaaaaacatttggtcctacaccactactagaatgacgatctgcaagttctgcctccttctgccctacaaatggcaatgtgtactgtaaattacaagaattcagcctttcttactctctgttgtatgaatgtgacccttgcttttggtatctggcttttctcaggctctttcagagagaacaactgttcctgatctctcctcacaataccttttcctccatcagtacatcgtctctcacacatagcaatgcccacactttaagtcagagaaaaagagtactcatatcaagagatgatttaaaacacatatctgtatgtgctttgtgcttatgttcccttacacacaccacagcatgaatgtcggaggacagccttggatgttggtccagcacttccatcttgcttgaggcagggtctctcttcctgccactgttttgcgttctcccggctagctggcccacaggtctccaagagtcttctgtttttacctcctctcttgcaataggagtgttgcaactgcagacatgtgctacgttgttcttttacatggactctaggagttcaaacttagcttatcaggctgttgaccagagctttcacctcctaggacatctcttctgctcaagaggcagttattaagagtgccgtgaaggtcacattcctgctctctcctaagcacctgttctaccatccgccatgctcatgaaatcccatgagattccccactagaaaactatacgttttccctggaggatgactggtctctctaaatggcttccaaggagaaaaaaaaattcccaaattaaacttttaaaaatctaacataacattttcctgtcagcatatttggagatgattcttgagacataaagattgtaaacacagaaccataaaggctttggtagaactgggcatgttataagcatgtatcaacaatcccaggactcaagaattggagacagggggtatcatgaattcaagaccaaactgaggtacctaacgaaaccttgcctcaacaacaaaaatccaccctcctagagtttacaaagccaagccaactggcccacttatagcattaaggggaagtgcattggtcgcccaaccactaagtggctgtcccttagctgttgaaatgtcacatctggaggtggaatgcggaagccatggtgactgtctgggttaaagggcagagaaggctgggtgttgcttctggtcacagactctgcccttcccttaggcagattttatagaactaatttagaaaggatcacaaggatcctcacaagtagaggctctggttagagccaaaacccttctccagagaggaaccagatggacccctgttccttagggatcattaaactatgcaccaacaaatttactgtcagggaagcaggatgaaagagaaagactctgtttgaaattgttcttactgttatttgtgtttatttgggggatgccgtttcttatttcaacccgttacgtaaaagctacaaaagccacatgagcaccattccagcgttcctctaaagcttggatctcaggctccttatttagtggttaataatggtcagtggtttcacttcctttttaactttatttggggtgtgtctagccttgaggtctgggatgtggccatgagtagttctctgtagtccaagaagcattgcttgccctaatggagacagttagagagacagtattatgctgcctgcagccttctccacactgagaacaaaaacaactgatgggatatgagatgctcagagtccctggtgcaaccattgtaggagattcagtgatcattcaggaagatcattgtaagcttaggaacaggaatgaagagaaacagcgatgagaatgtgcctgtgtaatcaccctacaaatatatttaaaaaccaaaacactacaagaagattttttttaaaaaaggtcagaaatgaactggtgggcaaggcataaatagaaagtaataaagcaaaatggaatttgtagaagattaggcaggattggccaggggccccagaataggacacagccgctgttggtacattgtgctcagtgcaaagttcctaatgttgaaagcaggaaatcctgttgttcccacccatatcctcagccaaggtcccatgagactgcctcagagccaacagaatcagttctcctgtggtaaaggatatagtccatagtcttcaagcagctgactgcaaagaaaagatagattcttgaggtgatgggtataccagttatctggtttgatcattatatcacatgttttaaaatatctcactgtattccacaaatatacatttagtattaaagccagggcttctttgtgttaagcaaatattcaaccactgaactatacctccaatcttttccattcttcaccagaaatttactaattactgtactaggttgaggtccaaaggcaatggtatgaacgacgtaaagagaccacactagatactcaactgaatttaggatctaaaatggtgctcctaatggcaggtgacagcttctgaaaacagtttctatgtctgcatatatctggtcttgcctggttctactctaacagaaataggggtggatgaggcagcaatccctcttctcacaagccctcagggtgcatggaaagttcaagatgtaccaaacatggagtcaaacaatggtttctgttggtcgtttttgaaatgcgaggaaagcaatctatcattgatgagagttgatgaactgacattcgtgaataatttatattcatgtcaccttcaaagattttaaaaaacaacaacacagatctctggctccaaccaattcttgtaaagcccaaattcacagatgtgtgaagccagtactgtgtttctaaagcaccctaggtggtgttaggagccaccaggtgcaggaacactggcctataggaaccccttgcctcaaaaacaaaaggaaatcatggaattctagagggaggtcccacaaagaccagaagttccctcaatttaaatatgtaagtcccatttttaaaaagacccttctctggttgtgacaggagaggttattctctatactgcctttctgcagcagtccctgtagccctttatggaagtctgcatctccaaaggcctgcttgaaacaccctgagggctctgttgttacccctccatagacccttatacattaatgatgaaactagtctcaaaaaaagcaacattacctgattatgggccaaaaacatgtgaccagccttccagatttgctggggactagcatttccaagacatagtaatatattgggtttttaatctatctatcatctatttgtttgtctgtcggttgcctgtgccctgaactactcactgtctgaccctacctgcccttaaggactggaggtgaggtggcacagagtcaacgacacagactctgaacactgctgcaagctcctttaatacccttcacccacatcccattggtcccaagaaagcatctcttctaaacagcagttcctgattggctggccttgtctgcattagcaattcttggtctctcaggcagtcctcaattagatcctcctgcaggagatgcttttgtggctgtgccgggcatgggggtagtttttacatagaggcagcctctatctatctatctatctatctatctatctatctatctatctatctatctatctatctgtctatctatctatctatctatgatgtgtgtgcatgtactgtatggtagcagtggaagtcagaggacagctttcaggagttggttctctttccactatgttggccccagggaatcaaactcaagtcatccagcttagaaactaatgccttgacccacttgagccatcttgctttaaactagagatactctaggacaaatcagggtgaacgggccacttcagatcataacatctaccaagcccatagttcttgcctttaggaaagttctttattgtactgtgtcttagttagggttttactgctgtgaactgacaccattaccaaggcaactcttataaggacaacatttaattggggctggattacaggttcagtccattatcatcaaggcagaaagcatggcagcatccaggcagacaaggtgcaggaggagctgagagctctacatcttcatctaaggctgctagtggaagactggcttctaggcagctaggatgagggtcttaaagcccacaccaacagtgacacacctactccaacagggacacaccttctaatagtgccactccctgggccaagcatatacaaaccatcacaccatgttactggaaaaagagttgagattactgttcctttccttcgtaaaacttgattctctgctttgaaagatcaatgctgccaatggctttcaaaaacattctctgttgtcccattatgcctgcattcatgtcttctctgcctctcaagtcattccatccaatgatatgacaagtatacaaatttgtgacatatggcattgtgatggattgtatattctcggaccatggagtggtaccatctggaggtgtggcctggttggaataggtgtgtcactgtgggtgtgggcttaagagtcatcctagttgcctggaagtcagtcttccactagcagcctttggataaagacgtagaactctcagctcctcctgcaccatgcctgcctggatgctgccatgctcccaccttgatggtaatgaactgaacctctgaatctgtaagccagcccaattaaatgttttttttataagacttgccgtggtcatggtgtctgttcacagcagtaaaaccgtaactaatacagtcattatactttataaaactctgtgtattatataccctgagttgccagtaaaagacatctagtagccaatgccctaaataaacaagagaagtacagtagttagaacagaaaggaggggttgtaaacagccacaagaggtcaaatgcagacaactgactgtggggcccagccctagctgataactctgtagcacaactccagcacctaaggctcaagaaatctcacagaaaacgaagtagaaggactctaaaagtcagaggattgggaggtttgctttctttccttcttcaatagaggaaccagattgttttctgtattggatgagaatctgtacctgtgagctctcaacagtaggcttggttagatggggcataaacggtgacaataccagttgacctgggaaatgtcataaggccccactcctagatgaccagctataggcaattaacgactactaagagagggagaatcagggtcatctgctggtatccaataccaagtggtcagccctaaacacagatataagcaagcaacactgaagggattcaaaaggctctatttataaatttctgtgtatgtagatgtgaaacggtaataaatgtttttaagttcctggcactgttgggcataggtttatcttgtcgagacttggtctcttccacctctgttcactgacatggttttccccacactggcagcaatatggcagctgcagttgtgtgcatccacaatcctcccccaaacccaaccaacttcatcttactcccaattccttttataaacttgcctaaggtcatcttcctggggtaggataaaaccaacctagccaagagcaagtacaattacatttgtttggggtctcataatagtggcaatccatgaaaagagagactcccacagaattgaagatgtgctcacaggttttacaagatggcagctgtacttacagctttaagctacaatgggatcagtaattccattggttgctattctgaaatggtaagcaaagctggctgaagtgtccctgacagcatctagtagataaaagaggggactttgtcataggtcaacagagactacgaatcttacaaaaccacctcatgtgctacatccatctgtagctcaatgcaaggtttcagctcagaggtatctgactgacaaggcttctcagagagagagatgaggtgacatacccagcagtccagcactgaggggtctgaggagagaggatcttcaaagcaggcaaacctgggatacaaatgaagacccttttcatactacctcatcataaatattgacttcctaactccactttaagtcccccaaacaaatgtcatttcattttagtttatcttgttcttggcaaaccttctttgagttgacttgtaccctttgcctgtttctaaagcacatactgatgttgggacaatataatatcctgatgcactgcactatagccttgtgccaacaccgtcaggcatagacttggaacaccgagttacatttcccaaaggcagtcagagtatgttctagaaaggagggaagatggaagttggttaggtataaacaattggtgccggggagtcttgggtggacttcaatggagcaacaagccaaccccatgagggtgattttgccacagtgtgaagcttcatttctttgtctttcgccccactgagatctaagtgttagccaaataccagggtctgtgactccagggctgtcgtcatcaggtctaattttaaagatgtgcccagcatttagttgaaactggagaagtcccagggtcaatgtgacttcatcaggataatgaggtccttaaaaattggggacaggagactcatactccttgtctttctttggtcggtttcagaagggtctatgacacatgggatttggtttctttcttcagtgtgtcccataggcaaaagaagaaatagctgcacagcactgttttgttttgtttgtttttttccctcttccttcctgtaagtcatacacaggccaagtctgctttgttcaaaccactggcttttgagttgctagacaagttcagacggagctgtttgtgttattcttctagtctgcagctaagccagagggaaagtaatccttgtggctaattttcagtctagatttatcccttgttactgctgaaaccttggatcaagccagtgtgaaaatattggctccctgagaccctcaaattatggctccgtgttattcttcctgcctcaacatttcaggccgttccaccttgtcaggttgttctctcttctcctgtaggaaggtttaagcattttttctttccttccatgccaccgtggctctcttccagcttgccttctgccttcccagtgctgagcatgaaaacctcacacatactgggcagatgctgtgttacatagctgtcacccagccttcattcctggaagctcatctatttgaaaggttaacatcagaaatgttatctctccaattaaggaacatctcagtcatttggactctggagaataatgggaccactgtgaccacgtttttagatttctttaatgaagtcccatggctcgggaggacagaagtctgagcccagtcagcagacagggccattttcccacagagctttagggagtctccactcccttctgtctcctagaggtccccaaattctgtggcctgtggcagcatcattctgacctctgcctctgcctttccagagctacctcctcagtttctgtcctcatctactgttgacccgtaaggacaatgactaacgtattagagctggctttaatgaccttctcttacctggatgagatctgagagctgtgtccaaatagggtcatattcctaggaatttgggattaaagcttcaatatacccctttgcaggatggggcacagatgaaaccttcacagtgtagccgtgaggataatgacagaaatccaagagacagagctctgactcctcagtctcagggaagggatggattttgatagtggcaactgttttccagtgtagacttttagcaaaatgtgcagttgtatgccttaaatatctacaaattttatgtgtcaatttttcttcaggaaaggtggagttggggaatggatttcacttctcctatgaaggttttatgattccctgggtaacatcccttcccctaacacattctctctctactcacaaatacactatactttgctgtgcatcctaaccacatatttaactatctccttcctagataacttcctgggtaacaagatattgcttgatatcttggtcatgtccctccatcacccactagggcacctggcacacagtaggaactcactaagtcaataatctaaggaatgtgttactccaatgaccttgctaactgactgaaggcctggacagaaatggcaggcttcggatccttaagattcccttgctctctgaggatctgtgagcccatctttcttttcccacggccagtcacagaggaagttgccaaagccagatgatgacacttctgcttgggctacccaggtctacaatttcaaatcagggaatttgaaagagaaactaaaccaggagaaaaacatagcttggatgagccaagaacggcaaaataccaagttgtgcaatagtaatggtgggccccagggaccacttggcttgcccagactatcagatgctatatatgtcaaccttgtacttgggcttgggacaaatttgtggcttaagtatcatctgatgccttgcccttaagtctggcctctagaggtcaggctgacacctgacatcctcatcttcactaattttgagatacaaaaatgctggacaggagtgagcccttgtttcccaaaatggtggaacccttgaactcattgaccacacagacctagctgccaactcatgtattgttaattagataaagcttcagcctgaaatatcaaggtgagtttgctcacatcttccacacacttgtcagtctagaaccaggaaggatccttggttgaagcgatctagcccatgcatacacagaaagggacagagtattcatccccaaagttgcagctggaagaaaccacgaaaggccaggcgtcatgatccttgtgccttggggttcctaacctcggccttgcttggggtaacacaggagtcctacgatgagctgtggctttgaggaagatatgggggaggaactaaaacagcctgggtgaggttggtccatggagatgcaggcaggacaagaaaagagaatgggacaaggaaatggggtttattctgaagaaccagcaacagggacatctgactgaccttctccttacagctcacaggccactgttcacgggatgacactggctgagcacagacttctatgctgaagagagctcactctctcagtgtgctcagacgagagctgagaccctaccaagtattaaccctggcccgtcacctacagcagccactggttgagtaatcaaagcaagtctaatagggcttgaaaagctagtctctgatactccagggctcctcagttcctctctccactctctggagagacctgttagccacaaacagaggaccatctctatggagatatgtcaaagaagagactcaagtgctctgtgcttgtgaattctagtgtgtccattataacaagattgactccgttctgtaaacagaggggactttgaactcacctgggggcccctgagtctttttatagccatacaacaaaagtggagttcaggtatttacttccctgctaaagagcattgctctgctggggtgtgtccctaatggctaacactggtctcccttgttctgtgcgtttccaaggttgtccccattatcacttaaaacagtagggctggggagtctgctgagccagggcctattacagaaagctcccttctgtgcaacataaaagatataaatcctgggacaacaggcatgtctgctcattgaatgaacattaactgaggagtattcacatttcaaggatggagagataaataggccaaagcaatatttagatacagtagattgtgttaagcagtgattggggctctagaggaaggacgaagctgtaagttggtgttatgtaagaaactttaaacaaggagatcctggtacccctgcaggtatgggtcagaaccaccactaaagagagcaggtgctgaagttgtatttgagcaatagcgaagaggccagtatagtggcaggtgacaaaccagggacaatgctatgagattaaccttgagattttctccattccttctatctagtgtggtcttctgagttttgctaaaagcaccttccaccaaggcagtcctttcacatgtctgctatatccaaacatcctttcccctgcgtctgcttcaggaaaagtctttcacgtgtctgctttagcaaggcatcctttcacctgtgtgctccagcaaaacatcatttgacgtaattaactttccaaagaaactagaagtttccacttcaggtgggtggctccccagaagaacatacaggtatgcactcatgcatgcgcgcgcgcacacacacacacacacacacacacacacacacaccgtgtttattatgctcgcacctgctgtcttgttgtccagtctctatatactcctctactgtcctgaacaccaaggtcacctcttacacaaataactttaggaaaccctaaagtcccatcccatcgtgtgaaactgcatactgtcagcacaagtcacaaatggcatggtctctccctgtgcagttttcttggctcaggttgaaagcattaatcagcctgtcttctctggctgtcatccccctcctgactcctccctgtgaagtcttagaagttcccccactgggtttcctcgttctcttccctcagaaccttcaagttaacattaatctcgctcccagctcctaacagtgctccctgaccctcttcccaggctctcttctccagtcaccctctttcagtcagtcaggaagaacctttgaaaaactttatctgtcctcattaatatcacccccacttccaggagaattccccagattccttttctacagacagagctggctgctggcatttataactctagagtcaaaaggccttggaatgagaagtatgggaactccccctcctcccactctgtgcctcaatccctggggttttcttaaacactgaatctttaccaggaaggagcaagaatttgtacaaggattgtgagtaaaagtgaagaaaagaaagtgtgtgtgtgtgtgtgtgtgtgtgtgtgtgtgtgtgtaaatggacgtgtaacttgtgtaggtgcacatgtgtgtggagaccagatgtcaaccttgggtgttgttgtttaggcctcatgtctcactaagatctggggttcacccagctaggctaggctagctactccctgggattcccctgtctccacctctccaggcctgggactagaagcacgtgccaccgtctccagctttctacctgagtgctaagggactgaaccttggtcctcatgtttgtgtaagaaaacgcgtcactaactgagctgtctgtccagcaccaagagtgggggtttttgagggagaggggagcatgttgaatgactatcatgaaataaataagaggcaaagtctctattttctgagcttccgaaccaggagataaggctgaggagaagggagctgtggactgcctgacaagaaggccttggttctaagcaagagtgggattgcaagtcacaagtggaaatttactgtctatgtgaggtagagatcagaaacagcaggtgtctggcagcagataaaactgaagccatccacaccaggctcccgcatgtgaccttgaaggttgtattcattttgccaacagtttgaccggaacagacctgccctcacctaaacccggagattcaatatgctcttttgtttgaggcgtgtgccactcaggatgggagcgagtctccacaagcagccgtggctatgttgtctctgccctcttctgagcttctccccaccttgaaggctcccactctccctgataaccatcttcaatgggctgtgcttcaaggagagtgggccaggtggattgtttttccatctgtctggaattcagtgctaaatgaggtgctgaactccaaggccccccttcataatcgcgtgtgtgcattacaagggcttatcacacgttttagagccagagacgtgcccggcttaagtgtcaggagataatgcacttgagcgtttaaacatattaatggccttcaagaaccagaagtggggctgtgggcagtggtggctgggtaacagatggcattgtgttcacccccacctcctgccacttaactccacttctcggccttttgatactctacctcccagattccctcctttcttctaaagaataaagcccagaaaagtatctgtgaacatttactgtaaatacccacactcatagcagaggccagctgaagcatctaacaaaggcactgtcccctgccctgtagcttgtctctgtgtggcctttgacttgcccccttgcttcctgactttgaattgggcaaaaactggtttcctaaattttgctatacatgaatgaatattctgtaactttagagtgtgccctcaaattggcatatagtaatagtaaaaaaaaattatgcattttgctcatgtgagatttactgagtaacttgtatatggcaggcacttaatattataacaatgagtataacaggccaaagccttgtccacatgaaagtcacatcctgaactgggtatggtgctgagtgcctgtaattccacacttgggaggctgaaacgtggactgcatgggctgcatcgcatcaccaccaccaacaaagtcaacagaaagaaaaaaaaaaaaaaaaaaagaattgttctgggttatttggcatacaattttacttccagctctccagaggctgagaccggaggattgcagaagttgaacttcaaggcaagcctagatcacagcttggggtacatgatgagaccctatttcaaaaacaaacaaacaaacaaacaaattaaatactgttgtatagtgatatgtcctagtgaggaaattaaagatagaaaatactcaaactagaattccccctcttagaagggaattctataaagtttactttttaaagtcaaacttaatttatgtgctgtaaaattcacacatgtgaagtatccaggcaagtgtgtatgtatgtatgtatgtatgtatgtatgatgtatgtatagcataagctgtgaacttttgacctagtttccagtaacatgttccaggaacatggagcaggcttcaaatccaatcggagagggtttggttgcttccatagccttcacaccactctcacaccagtggtcattttgcctggcaggttggtgttgtagcattcagggtccaacactgagtaagaccaccgttgtcttttctccctctgtggcctacataacaccttccattcctatggaaactaaccagaaggggggacagtttcctgtttgctccagcctggtttctccatgctctgaagccaaagtgtgttgtgtcttcagcactgggtataaccagccaaaagtaatgccaactgtctatattgtctggggacacctctgagatctcccagaccaacaactcccaaggaagtatctcagacctaggacatttggaccagcagagaaccagtttcttttgactgtattcatttttttccacttgggaatatactctccaagtttattatttgttaagtcccatgatttaagactgaattctggacattgcttccgggatctgtcacttggcatttccctgtaggacgtcctcatgcctcctctttacaaatcatagagtcctgcactggctgttcattttccatattcccttatatatagtcatttcagtgtgtgtgcaggtatgtaccacaataccggtatggaggccggaggatgattttctagagttgcttcctcctacttacaggtaccggggatcgaacttagcaagcaccctcaccccctgagccctgccattggttctgcttcccattttttcccaacgctatgttgccttgtgtgccttgaccagctttgtaatagtttgtggggatggacgggtgtgacaccagtgacctctgccacaggcagccatctgaggagattcccttcacatagcaggctgttttggtttgggttttcctctttcacataagatatgagggatctatctaggaaaaggattccaagcagagcgtcagtgggaagggctggaggtaggaggagccttagccccttagcagaacagcagggaagaaggcagggaacagagcgagcgaaagaaacagctttatgtgaaaagaacagaaccaaaatgcctccttgatgccacactaagagaaagcattattatttctctgtatcttttcaaaaccagacagatagaaacattattgcttgtttttaaacagctttcccccctccccctgccaactttatgtattgtattttcctaccctaccaaggagctttgtaaaacttgcttttcaagccatgggctggctgcatttattttgcagacccaggggacagatgtggaaagaacaacagaatgatacatagcgggaggtggccagcggttggatgaccagttactagaaaagaaagaagctacaacatgcagaagctaattgtccttacagtattggctcacatgtggcacgactgactgattcatccaatagatgggtgaagaagttgtaaagtctcaacaatggcgacaataaccactgtttggagtgtacaggccaggcatagccccaaacgccacaactgcctgagcagtcatcaaagtggataacgtggcccttaatgagatcctcaaaggatgtggtaggtgagcagaaagcttcactaaatacagctgcaggctgtcaaaatccccagcctggctgatgagcaagctggggagaggcaagcagagactacgtgctcagtagggaaggaaaaggtctccaggctgtgggaggctggccacctgcccacttctgcacctgccgtcttccccacatcctggaagggcatgttggtcctccctctgactccctccacctttccatagtgaatgtagcagcagagagtgggtgttttccagtgtagtcatcgatacctgtgctgtggcgacagcacaaaagtccatcggaggtgaataacgaaacttagtcatttctaaaacatctaaaggcattgttgggggggggggggtgttggaaatggactaattaactggggcccttcatgttaggtttggtttgatttccattgcccggtgcagctttcctatgccccgaagcctgtgtacaaatagactggagttgaaacgcaagttgggtgggttattgttgctttaaaatggggtctcaagtgacctatgcttccttcagctttgctctgtagttatgaatggacttgaacttgtcaacctcctacctctctctatctctccggtgcctgcattacagatgtgcaccaccacaggctgtttttaagtggaagtcaatgtgtttcacggactttccttttactcatggaggaagtctcagaacaatctacggctgtctcttccctttcacacatctgtctcttcttcccttaattctcttccttttccttgccttcttctttcctcttctcaaactatagggatcatttctgccattgctcatgtggttatttgatttgttttgttttcattaagattaactacagagtctgttttatagtatttgattagaattggcattcagttcccttatataagacggcattttcataaaatttaatacatccttctgagcagtgtaagtactctctaaattactcttaatacctaatacaatgtttactggctagttttgtgtcaacttgacacaggctggagttatcacagagaaaggagcttcagttgaggaaatgcctccatgagatccagctgtggggcattttctcaattggtgatcaagcggggagggccccttgtgggtaatgccatccctgggctggtagtcttgggttctataagagagcaggctgagcaagccaggggaagcaagccagtaaagaacatccctccatggcctctgcatcagctcctgctttctgacctgcttgagttccagtcctgacttccttggtgaacagcagcatggaagtgtaagctgaataaaacctttcctccccaacttgcttcttggtcatgatgtttgtgcaggaatagaaaccctgactaagacacaatgtaagtgaatttgaaagagttgatacaactgtggtgtttagggaatggtgacaagagagaagtctggcatgtcagcacacaggtaggacattttcagagtgtccacccatggtctcttaaatcaaggggcatggaaccccagccaagaaggtcagacagagctcttacatttattctgccaaacagaaattaagggatgtggcttggttgaaaacggccccattccccagacattgacagtactgaaactccatccctgcctgaagcaaggatgttattgtctatacgcctggcttaggggtgcttaaagcacagcacgtatgccctggcctctgtaacctcacagtgtagctgagaagtctgttaaggagggtgtgaggtgtgctacagtcaagttagtcacggagcttggggaacattgagatggtctctcagagaaggatgcacgattttaaaagcaagaccaactttgcaagggtatgccgctataagaagacctgggtgtagctaagtgttatgggacaggtatgagcagtacctatccaacaaggaggcctcctctgtcctaggggcaacagggagacatcaacacgttttcaggatagcaggtgtgagaatagttcatagttaaagaggtgttcctgaaaggctgggctacaagtctgagacaagcctgggctagcatatgagaccatgtcgagagggagggagggagggagggagggagagagagagagagagacacacacacacacacacacacacacacacacacacacacagagagagagagagagagagagagagagaaagagagacagagacacagacacagacacagagacacagagagagacagagagtagaaaggtggtttcgtgtgccatcagtccctgtaccccagcatagttagagccttcttaacctctgagttggaagtctgactgcaaaccagcccttccatcttccaacatgaaggtaaaaggacttacaactctggtggaagcaagatcaaaggcagctcccagatctcagtgctgtggtctctgaggaccaaacacacattaagccgacttgtgaaatggtggccactgatatcaaatggtttttgtttatcacatttacgtctttcatcctaaaggctcacgaaagacacactgcttctgcttcttactgggccagtgacaaggcttttcatgtgtgtcaacctaacagtcagccattacaccctgagacttagacctgagcagctggaaaacagctattacagggtttgaactagagctctgttccagcgctgcccccctcctcagcctgcgtgcctggacttgccaccgccacaggaagaaagcccctgctacccatggggatattgtgtttctctgtctgcttcaacagcagcacgtaaaagatctcaggtcaaacaccaatacattacagactcacacacactgtccaatagccccatattgcacagaagagtagccctgtgagagaaactcacagacgtaggttcagacctgcctggcactccatgtaaagactgggacaggggcatactacgaagaacaggaaggagatgaagcttgctagactcttttcacgagactggttttgagcttgcttattttggcattcagtatcatgagctgtcactatccagaaacatctgtaggctctttaagttgtatagcttttaacgctggggtaagaggtttctaagtcacacctcccaaacactaccaccacattgcattaagtagacttatatgtccctactctacctccaactccccaaaaaagaaatcctaaatttcatcaatgatatcagacgtagcagccctcattgtcagaaacactccacaagatagggtggcagctctctcccctccagcctcgctctgtacagactgagggtcactgttgctacccactcctgtgacagaagattatactaccgttcactccttcgggaaaggagccaaattcacattttcatgcatgacctctattcattgcacatggttttcttcctggtgtaactcttcccccaatcactgcatgcagttatcattaggtgtaagaccactgtatgcttctttccctctcctgagtgcacttatctaccatcctcgcttgactcacccttgccacgacagacttgagagtttggaaatgaattctctcaccatcgattttgtaagccctatattaatcacgactttgtcttcctagtggggagggtaaagcatctttcgtgaagttctcatatcttatgccttcagcccagtctccatccatcgttcatatcagtcagtcaattcagccctcccaggagctctagtgtgaggcagcacagaaaacacctagggaggagaggttgggttttaattcagttttgtgtggcctagtattcgttctccgttgctggaaatgagtagatgaggctcaccagtgtgattagcggtttctctctgaaaatctttgggcatcgtatcttcacaaggattcgcctgtaaagatttgcataactgcctgtctatctgatggactggggagaaaacaggcactcaacatcagttccagaaggaatgctaggttgccaaggaggcaccagcaaaccccagaatagcctggagagtgactcagtaataaagtacataccagaccctatggagcaccctcagtatcaaaagcataaataaccataggctttgatgcaccgacctggccctttataaataatgagagaaagaaatggggcttacataccaggaggcaccatgacatctcagtgttggaggatctggcctgagagctacaggcagatagatcaagaataggaaacaggtcttctttgtttctgcttctctttggcttccatagacatgcctctgagtaatagtgttgcaattctaacttctgttcgcagaagagtttgtacaatgaaagcaagaacagattgtcttttgactctggagtacagctggcgctcctccagcctattctaggtgcttatcccctgcctttgtgatagttcatctttggttatcaattgcaggagattagcatcacctaggagacacacattttagtgtgtatattaggatgttttcaaagaggttcagctggggagggaagcaccctaaatgtgaatgtcactcccccatgggctagggtcctggaacagatttaaaagaggacatgagttcatctctttatccagactggttagcccatccccaccatgaaggtctgtatccttaaaccatgagcccaaggcaaccttccttccttaagctgcttttgttgggtactttgacagggatatttgaaatatccctatccttcagcatgcttcttgctcaatctcataagaccctttcattcatttccaagttcccagcactctcggctccggtcgaatagctttctgatccattatctctattgatttagctccttctgtatatgtgtcaaaggccttctttctcccaaagttaaagtcccatcaacatggacaaaaatcttatctgtagaactagtatagaattaaatacaatttcaattctaaatgagaggaaaagctgaccagaagtaggttatctctgtatgcctgtctcttatatagactttcacagtttaacagagaagccactaggtatttgccatgaataagatttcatgaattaaaatcacataaggttaaaacccagctcttcagtcacacttgccatattggaaaaagttgttagccatatgtctagtgcctacaatactgataagactagttagtgaacatttcttatgtcagagagagttctgctaggaagtgcatatggagacaatggccttcttggtctaggcagaaaccagtcctacctcttagccacagtatagtgcatctcaacttttgctgaatagtttgaactagatctttctttgtcataggaggctacagtgcagtgtaggacattctgaagcatgcgtgacatctatccctccccagttgcagctcttgaaaaatggctccatatcccctagagggctgaactgaccccagcttagcaactctgctaagatggcagaggcaagagaggccagggaggactttacaaacatgcttaggagtgagatgggttcaggttcgtgaacactaagaggtagagacatggcaggagatgggtcaggctcactatgggtgctcctagaatgtaacagagaaaagtttcagaatgatagttatagtcagaaagaaattcttcccttgactttgggacttttcttgatactaaaatgtcatgtatgccaaagctcccccaaaagacagggaaaactgtaaatacaaagaaaggcagcaaagaaggtggcccaaggggcagattgcagggtgagtccatttattccagtgaaggtaaagggctatgtcctgtatcactctgagatttctactgctgggttgagctctcatatccccaaatggccatttgcatactaaatggccattactgcctcatctgctacataagggctataaattccaatcccgaaatggtctctcttcccaggaacagagttataaaaacgtttgcccttccataggtctttgacatatgctggaccacatttgtgtatttgtcccttggccctctggagagcttagcacttctccctgacccaggcaagatttttatgtgctatgcattcctttccgtcgtgacatcatgcgtgtatctcgccatgggatgctgaatcaaggcacagggaagacttagccgtctccaacgagcaactggttttcattattttaaggaaatcaggttctgaaatatttatggtcagagaccccttcgtggttccttcctgacctctcctttcaggagcaatcttgtagagaaggagaaccctctgcctgctccgcatgggaccactaactcacagcagagctgagccagccatgccgtgggaagaccacaaggaggcttatttgctagacactccaagctgaaatgaatggaactgaagccagaacagggccaagacttaaaaaggctgaaggcccaccctggcagcaacgtgcctgcatcagagctttaactcatgttcttttcatttggaggatgatggcaatgatctcacaagaaaataaagaccgtgagtcagctgttgtgatggtactgagataaaagagaagccaccccacagcagacagtgtgtgcctgagcctgcggtaggatgagttgctggatgccttcagcagagacttctacttagccctttttcaaacagttgtgggaatcaacatgctcgttggccaaaggggccagcatcatacaaagttgtcctatataatctgagccagtttcaaatggccaaatagttccttctatggaacaactaaaggcgattcttagatttttgttctttttctcatagaaggtgcttttgacatttttgaatggataagtcttcattataagggtgtcatttagcatccctagatactgagcagaagttgctaagtgatgtccttgacacacacccacacacccacacccacccatatttcccaatacactgggtggatagtatatcacaaagtttgttgcctttgaaactagaatcttagtgcaagtcatagggcatttagcaagaggcatgtccttttttttttttctggctttctgctattgtgaatgtgtggagatgcccctccaggctgctcattccttgccccatagtgagatcttaggggtggaaaagaggaggcgggaatgagcaattgcacagatatttccatttcctctccctgatcatatcctaatgtgaatacaccctaatgaattcccccaggggtggggcaagaaaccttacctaggagggaaactgccccaaggcaaagcctcctctgccgccgcaggcaccttgtccgggtgcttctgctgccgtgctggctctttcctttttagctcccctttacggctatatgtcacagaggcaggaaggatgctagagttgtcagggggtcacagagattagaactggatctgggtaaaaagcgtgacatccattaatgtggttttcatcctcaagactgggaggtcgtttggttgcaaatatcctgggaaggatctcaaaactgcccacaccttccagaaggataacagaactagattgacttcaataaaagagaccatgtaataaaagtgccaggtttctatgtgttggcttggtatggataggtttgtttgacctaaaactacatcagcattgggcagtgtcgatcgattcatgctgactaaggttctgattaagacaacttctacttgttggaagtcatccagccttacttgatgtgattgtcctgaagcaccaagaactgtgtgaggaccttacagcgatgacagaaaggctggggaagtctcagtctttttcttcaaaagaagttgagacccagcagcactgactggcttgttggaggtcatacaagtggtgtcttttggctgccgtgaccatgccatgaccaggacagttcccaccgtaccctgttgtcttggcataattatcactctaaatccttgttgttctagaaggagttctagtttggaggaagagtttgatgtccctctgtctcaaacacaatgccttctagctatgaattcatcacttttccccttacacaactccatcccttctttctttttttgtggttctcaaaatggcccctcctgtctgaggccatctgtcatgcttttgcaaattagtcattctcaaagtttgggtgactgtaagtgacaatccaagtccagatttcctaaaccatgggtccctttgttctcaagaggataaaacaagataaccacaggggtgggatcagccaggcacccagcagcccaagccttgacaaccttagacaaccatctctgtgctcctaggttcttggtgacaaaggctggggtaagtagatggtagcacaaatgagacttttatacggcttttattttgttttgtttttaatgaaatacacacagggttgaagagaaattcactataaaatcccacccattgggctctgaaagtcccatatgtccgatgactcaacatgaaactcataggctggtaatactttgaaatcctctgtgaacaataaaagctaagcatgagaaaggaagggtttcacatatacacaaggaaaaggaagacaaaaagaaagaaaaaaatcaaagatcctttctcatctgcccagtggagtggaagacaccagtgtcctgaatctatttattaatgccaccctcatgaatgtcctacatgtaatataacttggcgaagtttctataataatgagccaggaagagccagctgtgagctgggaacacccacagctgtgtgcttggctcactgcagttgtagtgccgatgaagcagaacttctgataaccaaggtctatgggacgtgggagcaacgtgttaaaacgaaaacccattctatatagaatgggaagataaaaatgaatcctttatagcctaagggtcttggtaatgctgcttaattaaaagggtgatgtacagatgaatctcttcctaatgagcagccttcctgacagccttggaaataattacacagcaaacattatttaatccaggctcaacaacacagtctttgctgccagcaaacttgggtttgaccagtgtctactgacagcgaggaggtgagaccttgagtgaacctctaaacctcagttagcttcatctttccaactgcacaataaagacactggtccttaccaatagatcctactgttattgaaagggcgaagggataaatagtacatacataaagtgcgcagcattgagtctagctcaggcgcaccactcttattatttaaacaaccataactttggagatcaagtgccaagtattgcataagacaatggggcctcacaaatgagtcaaaaggtctgtctgcaggcaggatcttgtagcccggggcagtggctgataaacacgtggatattaatatggggattctaaagtagaataaggtagaaaagatcaatgtgtagatgctgatttactgatttgtttactgacttacttaaagctcggcctatctgctgagcatgatgtcacctgctacctgaaacagaatggcctggagaaatagctgagacagtgggtcattgtccttaagctgctgaccgccatgtccgagtctgtaaaacctcacctgcttggcctccccaccttgtgttttagagtataaaatgagaatacagactggacccaggattgaagcatctccgttctgccactctctcgggtcccagagcatatggtcttgaaagatccccccaacagttccccccaacaggcagaggggaaagtgtatttagaatggtgatgctgacgtttcttagcggttgctacttgggttcacttttgaaagaaacatggataaagattctccacatacagagaaagatgattgtaagatctgtgctactgacggacttttcgctaagtggatggaaaaggcaatggacagctaggctccggctcagctcttgaacacattgtgactcactctaagaggggaaataaagcttactattgcttagttttatctaccagccccccccccccccacagagctggggacaccatggaattgggaagcatgagtttctgaggtccaagcagctgatctgtgctcactcggtcattagtggtcatgatctaccgagaacattgcccatgatggaggaggagctgcctcttcaggcttctcccagaattcctgcttttctgaaagcagagattgttcttttggaagtttcagtacacactttaaccacccccattgtgtgtgtgtgtgtgtgtgtgtgtgtgtctgtctgtctgtctgtctgtgtgtgtctgtctgtgtgtgtgtgtctgcctgactataactgtctctgtgtgtgtctttctgtctgtctgtctgtttctgtgtgtctgcacatgtgtctgtctgtgtttctgtgtgtctgtgtgtctgtgtgtctgtctgtctctctctctctctctctttcgtgtgtgtgtgtgtgtgctgggaattgaacccagagcattttgtatgcatgttcagcaagagttctagtactgaactattacttggcccttttagtactttacatgtttgagacaaggtcttgctaagttatgcaggatgccatggaacttgttggcctctattttgtgatcttcctgcctcaggctcttgagtagctggacttacaggtatgcatcactaagcttagataaagcccagatttcatgtaagaatctcttcctgctgaggtttctgccccataagttgatctttatttacattgactgcttctatataacaactgtcttggtagaaacgggtcgtagaacttggcaggatgacatgtttgtttggagcatcactaaaaaaatcagtccatgagctggggccctggacctctgaatagtttagggttaaagaatctggttgttcaggagacaggtgaagagtgaggaattgagatcaggctgggaaggagctggagaaggcagagcaggcagttacagaagtgatttggggccaattcaatgggaaacttgaagccaaagaggcagcacctggtgctggctgtcctggtgagagacacaggggctgaaggacttacacctccgcatctgcttcctcatgtgctccgcatgtgctttgcccacagtctcctgacatgctattttttaaaattatttgtgatctaattactgccactctaagtaaaagaaaattcaaaaacgttgttagtgtgaacctttcctttcctttctgcagcattggttcaaatgcagacaaagaagcattgaacccatatgctaaagggccaaaaaagatacgtgatttgcatattccattctaactggaacaatagaaactgcgcagaaccaatcccactgcttttgcttcacttctgttgtttttaattgaaaattcatgcactctattctgatcatggtttccccttccccatctcctccaggatcctttctacctccccagccatccagctccatgccttctctctctctctctctctctctctctctctctctctctctctctctctctaacacacaagtcaataaaatatttcttcttgatctaagcaagcgctacccaccacctctgccactggcttctcaaatgtaaagaagaataaacagcaaaatggatgaagctgcctgattcttagaaaaccactggcttccatattggaggtcagtttttatccctgaacggaaagtctggcctcctctccctccacagcgaattgtgatgtagacaaaacatacttctctcgactactcctggaagtccatagatccccacacatggtggacgcacagaatatgttgctcaaaatgaatgctttctgtaaatgagacagcaagggagcacaggcatgtatccttgtacacgttccctgtttctgcacatgttgccttgttccaaattcacttactacatacaagttcaaatagaagaatggtgctttctttctagcttttccaaaaacgtgtgtgtgtgtgtgtgtgtgtgtgtgtgtgtgtgtgtgtgtgtgtgtatgtgttgttgcatgcatgtctctgtgtgtgtgtgtgtgcacagattcccatgcatggtcttaagctagtccttgatgtgggtgagtcagctccaaatgtatagagatacctttcttgtgtgcccagaccaagggctgtgtgagcaaccaaagtatcctagtcataccaccattgaacttcccagtcatcagtatatggccatagaggccagagaaggataaccctggaactggaattatatgtggctatgagctttggttctctggaagattgggcagtgctcttaactgcagagccaattctccagctcccaaaataagacttattacgaaggcagaaaatcctcaagcctgctcaagggcccttatggaacagcacaggtggcctgctttgaggttggctctgcccacaggaaggatgcatgcatggaaataggaaatggatcatggaatgtgtgagatgcacttgggaggaacactaatggccggccacctttcacagggagggatacaaacaggaggagtctgtgcagccagctccattgactacaagaggaacagctccccagtacaggccatgccagtagaaaggacacatgcagaggtgaggagaccaaagtgaatgaagagctagaggtttaattaatgctctatcctggaaattccagggaaaattgattaaatacagataaggatcaggagaaagaaagatgctgtacatatttatgtaatggagtgtctctggatgtgggacccaagtccaaacaacaaattcattaatgttttctatactctttcaactcatagcctgaggggtagctttatacaatgttttaaataatttcatgaaacatgaaacaaaaaaaaaaaaaaaaacatacagcatgggatattttagcccctcagacgtttcgagatttgggcctttgggttcaaatgcaagatgtccctcctggactggccagtgattttcagcagttcatggctatttggatgtgttttcaggcactgaagaccctgtaccacttcaaaacccctgaggtgagctggtacggatgtggctcttcaaagtatcaatcctgctggataattctgctgctttccctcttctatccttagtaagaaagcaaaataatatcaataacatggcagccttcttcccttgtaaagactcctacctctgctctccaagagttttcaatacagaaacagacaggaaacaggttacagagacagcagctaatggaaggccaccaacttaccagacaccaaaacctaccatgtatctgtgaggttttgcaatatagtaactctaggctgtcctggggaatgtttcacaactctgtgactctatccctcattgccccgcacaagaacacaagtcttttatgttaacttagaacagactttctcagcctcagccctgctaacagttcatgtgagataactgttgacaaacaccatcctgtgaaatgcaagtttatatagcactgttggtttctgtgctgattagggagggcttgtttgtttgtttgtttgtttgtttccaacttgacagaagctggagtcttctgggaagggagaatctcaacctaaaaatgctttaagcgttatagacagaatctcttgtgtactctatggctatatcacctgtcaataaaaaaaaaacttatggtccataggaagtggtagaatagaaggtaggacatggggtagagccaggcatgagaggattcgccacccacgtccatgaaggaggacagagtggagcagaggtaaacaggcatgtggcagaagttagaatagaataatggcatgattagcttatgaactagtcagggaacagccaaagcttgtagacaatataactgagtctcagaggcattattctgggagtttggagttctcagtaggcaagcttgtggtgcattttcttaatggatgtggtggggtcccacccactatgggaggtactacccctagatagcagttgtaggtcatatcaaaaagaaagttcagcaaaccatgaaaagtaagccagtgggcagcaatcctctgagggctcttcttcagtgcctgcctctagcttcctgtcctgcttgggttcctgccctgacttcccttgacaatagacaatcatcagaataagccaaataaagtctttttttcctatatgttggttttgatcacagtcttcatcactgcaatagaaagcaagtaagaacagaggctacccacagataccaatagcaatcctttagtccactgcacaacaatcatgccagatgccaccctatgtgaaacccacagacaagtgtctatgctgttcaggaacatagctgaacacagcaatgcttcttacattagccagtgtctgctttctgaaagcatctctttattacctctagtccccggctactactgagtggcaagtctcctcttttaaaaaagcatttgatcaagggctgtgtacagctacagagattcagtccattatcatcatgacactggagcagtagctgagaactacatctgatcagagagaaagaaaataagagagggaaaaagagagagagagagggagagagagagggagagagagagatacagttcataagttaatcatgccattattctattctaacttctgccacatggctgtttacctctgctccactctgtcctccttcatggacatgggtggcgaatcctctcatgcctggctctaccccatgtcccaccttctattctaccacttccagacactggacttaccatggacctttgaaaccttgaagtgacaattttcctctagtaaggccacgcctcctgatccttctgatcctttcaaatagtcactccttgttgactaagcattcaaatatatgagtctatgggggtcattcttaccattcttattcaaatcaacacacacacacacacacacacacacacacacacacacaccctgcttgaagtctacaaaggtgtttgttaacatactatcccttttctagctctctacagtagtgtatattaatatttgacaatagcttgatattaatcaaccttatcacatgtctcgtatcatttaattctcaaggagaaaaagataatttcaataaagtagtattccacttttttttttttccgagacagtttctctgtgtagccctggctgtccaggaactcactctgtagaccaggctggcctcaaactcagaaattcgcctgcctctgcctcccaagtgctgggattaaaggcgtgcgccaccacgcctggcagtatgtccatttttacatatgggaaaggaagccgagaattgataattaacttgtccaagatcaccaaggtagaaatggatttgaacttgaattttaatttttctcagttttattttatatgtatgggtattttaccagcatatctatctgtacctagtgcatgcctggaacccacagggggaagaggaaggcatcagagtacctgagctagagttatagatagttgtgtcctgaggatagaacctggatcctctcgtaaaactgccagtggacttaactgctgagccacctctccagcctcttgaacttgaaatttttagctgctaatctaagaccctttcacttctgtggacatttctgaagttgagtgtatttgaatagcatctaagggttcattttgtgtacaatgcacattcctaggtctcactcctaggtactgggtcagcaggggtataacaacaacacctaaaaatcaagacatcagcacacctatcctttgattctggtccatctggtctgcagaggctatgtaatagttggaaaccaaactccatttcactacataatatggcaactttttgaagagccattggcagacaaaggattgagggagaggagagaagattgaagaaggcaggatcactatggcaatttggagttaatgaaaagagttgatactctcctttctgctccatcctggcagtcctagtcaattgtctgacagtggcaatgccttaccacaagtgctgctactcccagagatagatgcccctggctttttcctgctcttgtgtaaccaagcacatgtggtccgctggctggttctccagcaggaactagggcttctgtcagctccctgacagttcctcctaaggcactttctttggcttactttcattactggacacagcgccatagcaatgcatttatccaaagatgctttaagaaatccttggccttccatagagcctttttccctggaatcttgacttctgtttggactctaagagccctggatgagccccaaagtctggtctggtctctttagcttttaagtagtaaggcaaagccagggctgggagatactctgcagcaatgtgccttccaatgaagaatattagaacccaatattcttgaagctcagagtccattaaaattcaatagatcatctagggactctctcaagctttagatctagccaagggaaaagaatgtccgaggcaggcttgtgtttcaaactctagcccttccaagtctcccaagaggcataaaataaaacctacagataaagccctttgctcagtgtacccattacttgtttgcaagcaattgtatgtctgccctgcaaccctccccagggtcatggcacttttaaataagcatctgtaatatgacacacccagcctttcacccacccagcttgctgggagttgagtgtctctgacttgagattgcatcgctcttctctctccagcccagccactgctgctggtgagtctgtctctcctttgatgagttgcagcttctgggataggtctgtggccactcctgtgacccagaatggagcacagctgctctacttaattgttctgccacgagttcaccatttgcagagagccaaatcttgttcaagaccgtgctcctaacccagccaggcgggtcagatggaaagacagaccgttgactccctcagagctagagccctggagattgaagttctgaagagacaatcccatcctctgtgacatctacatatctcctctttccctgggaggtagggaactgggaacttgagttcttcgccattatgcccctggttgctgaattataatcagaacctgctggttgcaactaggaccccacctagctctaggataaacgttccaagaagcctttgagaaattgagatctcccttcctcagcttcttgcttctcttttgtcccctccgtcttctcctcctggactgcagatcaaacctagagcctctcacatgccagacaagcacagttttcttctttaaagaagaaggaaacctgagacactgtaaagccacgatgtgtgtcttaaatctatgtaggccaggcaaagagctgacttgtctacgtagcctggctcactcccctgctccccccacccctttctgaccaagtcacaggtcacttatgcagaccatttcacagaccatttcataatcaagaggatggctctatcagacttctctccttgatcaccacatggccatcttcaccctataatttgcatggctgaggcaggaggattgctgagactttgaaaccaccctgggcaatagtgagactctgtcttaaaaagagggaggaggaagaggaggaggaggaggaggaggaggaggagnnnnnnnnnnnnnnnnnnnngaaggaggagaaggagaaggagaaggagaaggagaaggagaaggagaaggagaaggagaaggagaaggagaaggagaaggagaaggagaaggagaaggaagaagctcacactcacagtatgtttcttgacattggccacagcctggaatgagacctggaatggggtggtctccttgtgtagtgaccaaaggcatcatggtagctgaccatcagggcactggtctggcctttggaggggaggatgctagagtattgtttctttggaatgacaagaacaaaggagccttccaataaggacttcaatcttttgaagtcagaccctagagccagagtgactggatttagcaaaatgtgaatagtgtttgttttttgtttgttttattttgttttgttttgtttttttaagacagggtttctctgtgtagacttggctgtcctggaactcactcactcactcaggctggcctcaaactcagaaatccgcctgcctctgcctcccaagtgctgggattaaaggcatgtgccaccacccccggcgtgaatagtgtttcttaaatgtacttaacatataaaatatttgctgcttctctgaaattcacattttactgggtgccttgtgttttatctgccaacgctctggacaatcctcagtaaacatgacttttttttccttcaagtttgtatttggtgatgaaggtgagaaacacaggctatggaaatatctcttaagagaaggagcaaccagaggccttgaaccttagcgagttgtgagcccattttccctttcacaggcaggttgagttgctctccacagaggaatatgaggagggatggctctccctaaagtcagggcaagaatgtctgacctcgtggccaatactccacaaaaggttggcttggcttccttcctgcctcaagaagttgttagttgctggctgatgtggatggagttggtgatgcttgggaactgcctgatacttgcatagaggatttatgaggtagtagtagcagagcaggacacttttgtagttacctgtatgtgctcagggagaagcaatctcacaagctttcttgatttagactcatcagctgatgaactacatttctaagaaaagaaaggcaccaactctggtagaagccattggttaccccactctttctttctcttccttcttcaacactgtgctccctaacccacttctctgtggtgttttgttgttgttgttgttgttgttgttttgttttctgtgtatggatggttttgcatacatttcatctgtgtactgtgtgcttgcctggtgcctacccaggacagaagaggaagtcagatctcctagaactcgagtcacagacagttgtgagctgccatgtgggtgttgggaattgaacccaggtcctctggaagagtagccagtgctctcaatgtataatcctgattgacaggaacgcactgcttgctgtgggcatagcactgaccagacttttcactggcaatctgacagggtgtggccatccccaatgggactgattcctgagcctttcctgggctgaggagggaatgagagtgtgtgcaagtttgtttaatgagaaggtgggtttccctgttgctgttactgtcaaaatccttaatcagagttgttaagttacaacccaaataggaatttagagatgttagagatggagtccaggaacttgtgcatgctaggcaagtgttctgcctctgtgcttcacacacagctgtttgaatttgtgacatcaatagaatatcttaagattgttttggcttcaaataataaaagagacttaactcaacttgttactgggtaagagggaaaggaggagaggggagaggtagtaaatgtagggacaagaatacatcttgtggtgccacagtaggatggtcagacagtaaggatagcactcaagagccaggggaccagaagtctacagaattctgttccctagcttgcttactcctaacattttcctctccctttggttcaacctttggcaccaataacagatgctagctcacacccaccaaggtcatgttggagacgaaatgagtgaaaggctgtgtgtgtgtgtacatgcacctacaaacctaagaccttcttatgacaactccccacctctagggaaaggctttggccatgaaagtggagctagtgcccatccctggccagaggacttggaagagtagagttcagtaagattttcaggttgaaatgagaaacccctcaactcgatgtaagccaggtgaaccttcgtaatgtgggtcaatcttccaaatggcgcctgtgcaggtaaacggggttgtttatctttgctactttggtatgaggacaggagagagataataaaaacagcacagaaacaaaatgcagcttaactgcccaataaacctatctgttagtcagtcttctattgctgggaagagttgctatcaccacggcaactcttataaaacatttcactcaggaaaacatttcactgggactggcttacagtttcagaagtttcagccattatcatcatggcggcaagcatggtagtgtgcaggcagaagacaatactgattacataacaggtacgagtcccccatgtcgtcaggtcgcagacagttgagcaacaacccgccttcccctgcttcccaaagccagtgagctcctgacctcagccccacactccttcctgtcacccacccttccttctttgatgagctgtagttttaagtttctgacctatgccacacttggcaatggggtccatatttctctcatctctctcactgttaacccagaggcatctggtgactgtccccaccatcccactgaaaggacctctccaagaacacccatagcctaactgtaggattctccctccttgtgatttataaaataccatgacggtctgaaccccgtcctgctcctccgaccctttctgcactatgccttcttggaactgattcagacttctgccaagtttatcaggctttttatctccttaggaaattgaattttcataaggaaccagacaaacaacaacaaccaaaaaaaaaaaaaaaaaaacaaaccatttttctaagctttatctcaacattatacaaaaacccctccctttctctttaaaatagtgagaaagtcctgctggttgttcaccggccaaggcttggtgcccaagaccaatgtggatacaatggctgaagggatacccaatattttaactcttgttctttttatcagctggggcccaggagatgacaggaccttctgagaaagctctgtaatggattgtccccttcattactttacaagctcttctggggacatcatgagcactcttccttcagcagcagcatcactaagctccatgactccaaagtctgcatctccactggtcacatctctctagatcccagacgcaggtacataacctcttagactctccacggtgacatccccacgtgacaccagaatgtcccgtgtcccattaaatctaccactgtttcataggcttgtttattagtttcccttttcacaatgacaccagacttcacccagtctcccgaggttcctcttgagagcccttccctatctttctaatcacatgcagactctggtcttttctcttttacttattaacaccttcctcctttctcatctggaagaaagctgtccccatggagaaagtctttcaaaacttctagtagatgcctgataccatggatggtaggtaccaagtctcatacatactgtgtttgttcttacacacacacacacacacacacacacacacacacacacacacacatacacacacacacacatgcctatgctaacactcagttcacaagccggacatagtaggagatgaacaacagcaactaaaaataaaaagattctgctgtgatgggacttgcctaagacacatgaattgtctatttctggaattttccatttaacattttagtgccttaattgacagcatgggtgaaggaggacagctgcacttgcatgggtttgtaatggatatctctcagcctccactcctggagctgagtactgaatgaggcacacatctggagtagctgggacttcaggaaacccaaaggtctcggcaaagatgagtcagaggcccagtcaagaaaaaaaaaaaataaaaattaatagcagatgaatgagggaggtgatggttagcatccaagaactagactggaatgcaaggtgccatcgtgtcttctcttctgcaagattcctgaaaagaccaggaaaagagcccgaatccagcacccagtaggacaccacctcagaaccttaacagcgaactttgacctccacccacccgattttcacgaccaccgtgactttctgcttgcctgcactttggcaccagtttagaatattttgctgtttgtagagaatgttaaaacgtttgttgctatgcctccaggctgcaaattccggtgcccaggcagagccccctctactttgctttctctattaagtcttccccagtgaaaacaaagggaacccttgttttgaagacatttaaaacatacctgaggatttccatttcgctggaaagccaagcatctccaaggacccatctctaagagctgaggtcatttgaagagctggataccaacaagatctaagctcggttaaatggagccaaaccacccattttgactgtttagccaaattcaagtatgtccaatgcattagaatactaaatcctcaacaaattctcctttggcgtgacctgacaagatccctggtatttatttattatttttatataaatggaaaaaattatagcagaactgggaaacttccacaggtaactaggttagagcactgaatgagacccaagagagtgctgtacagggatcttccctgccaaagagcaacaaaagacttgactttctgctctgcatgcaggtggctgatggactgttttacgatggggataattatctctgtctttctctcttagttacctaccaaaataaactgcaaatcccaacatattagaaagactccatcatcagctggcaggcaaaaccttagcagggctccctagccctgggagatgaaattgctaaggaagagaagtcagtccatctatggttcaaagggccagtgttaggtacagtggggagctttgggagccgattcttcctcctttcctgggggggggggggcactactgactcccagatgatggtctttccggacatctttgatgtaaatgtggcaaaggtctgtctttatttcctcatagtaccaattctttaaaggcaggtcaagcagagagctgcattcgatttatgatgttcaactgggaatgtcccatgatacaacaggattggaaagagcgagaaagagagggactcttggctaaagatacttttgctagtatttcaacaattacatatccagatagaggcttgaaaacagattttcctttccttcccttccctttcctttcctttcctttcctttcctttcctttcctttcctttcctttcctttcctttcctttcctttcctttctcttttcttcttttccatttccttccttccttccttccttccttccttccttccttccttccttccttcctttcctctctctctctctctctctctctctctctctctctctctctctctttttctggcagataattgtattttaattatattcatccacactccccacccttcccttttgcatcccctctcccaattacttcccttggtcctttaaacagtttgcttctactgtcaggacacatgcacatgcaggtttgtatgtgtttatatgaaatctaaaaagcacaagtgagagatgtgggagtcaagtccacggtgggtggtgcctactccctaggcagttggtcctgggctgtatcagagagcaggatgagtaagccatagagagccatatattctcccatggtttctgcttcagtccttgcctccaggttcctgccttgagttcctgccctgatttccctcagtgtcagactgtgacatggaagtataaaccaaacacacccttccttcctcatgctgctataggtcatggtattttatcagagcaatagacacctccatacttatttccatggtggagagactagtttgtgttccatcggcagtggataacaattccttttgtctttctcctccccagcccagtgtgatcacaattatcatgatgctctaggattggcacatagctacagagtatgtcgggttcatgcttctacagtgagatgcatgaggcagggtgtttataaagacaagagggtctatttacctcacagttgtagagtacagagtctaagatcagtcagctcaactggagaccagcctgcaattccccaaagagccccactgacttggtgagggtgcacatcacaaccagaattgggttggagtaagcgctcacatctctagccagcgagcagcaaggaaggttaccacaatccccctctagagcactcccaataacttaaggacctcccataagctgccctcaccttccagaggttcccccctctctcccagtagcacagcattgggaaccaagcccttctatgggaacctttggggagcatttaacattcaagtctgcaccagtcctctgcttatctgcacagtggcttatcccctagatccatgtgctatgctctgtggtaccttaaaaatcacagtaccagctgaattagagctcggactttatcccctggatcttccaaaactctacatcttcccttgactgccattcttcaaatagccatggctattagcataaatacggtcattgctatttcatatcacacggacactatgagcagtaactctgtgactcctagttattccaatcacagtgtgtacagagtgtatctggaaatgaatgaggagcctagaaacttttcagaaaaaggaatgatgacatactatagttattcccagtacaaagtgactaaagctaaaaagaaatatatgccgatataaataccatcccatgctggcaggaacatgcactgtcctggaaaacattcacattaaagttaaaaatgtacgcatagatcatgtagctagtgcatctatctctcggtttttgcacaatacaaataggcctccaagtgcaatgcaaaatggcgaagcactagagaagatttcactgtgtatcagaagcaacgtggacagacacagctgctgtgtgcgcacactagaataacacatacaacaaaggcaggtacgagctatagccatcagaaatagcatcaatgaatctcatcaacccgatccatgtgatgtgtggtctgtttctgccaactacacaaagagaaaggcagggaagagacctcaagctgggagagatagctttcagtgggtcctactactgagagaaactggggacccaacagtttatttttgatactattttgtttatgtgtagatacaagatttgtgacagttattatatgtaattagtttccctttccactttcactgtgcttatgtgcatttgatgtatgtgttgcatgcatgcatgtgtgtgtatgtgtgtgtgtgtgtgtgtatgtttctgacagacattgttggaaactagaaaataaaatcacacaagatagtgcatttttttccaataataaatctggaacatccctccactccccaaaaatgaggtgtttaagataagagtacacattatagtcctatatatttaagaactatagcttacaccaagaagctagtaaataaaacttctctctggcttcaggactattggggcagttgcagcctcacattggactatgtaacaccaatggtccccggtccagcctcccatccgagccttccatcccatgtttcaagagctttggtaccctggccatgcacctcccagccctctagtctacttttaccttataaccctctgccccaggaaggtgagccagtggtaaagagctggaagtaggcgaggatcactgcgctggaatgactaatgtcctattactccgcacatggtctttaagagaaagcatgatcaatacattgacactacctcttggccacagactcattcagaaagtgctagaagaaattcagaatccaaaccctaagaccctatccagagtcatcctggcctggacgtaagggcagcactgccttttaagtgtaaagaaaagacagcagagaacctagtcgtacgtggctacagtctcagctgggcctggggctgagggagacagacaataagctccaggccagcaagccctaggaacttagtgaggactgattcagaaagaaggaaagatgactggaaataggacgtatttgtaaaacattcccctagaatgcacgaggcccaaggtttaatctccagtgctagaaggagaattttaaaagtacgtgcaggggggatttcattttaaacacccagagtgccagcatcactgcatgccttcatttgggtgtcaagtatgtttcttacaatttaggaagctctacttttgttctgtatcgacatatgtattttgcatttacacacacacacacacacacacacacccctacacatacaaatataattatataattcctagcactgtatactatgacttcccccaagcacagctcaaccctaaatgattgccttgtaaacacagtttggcagttgaagtccttgcagatgtgaggatctacaggggaatgaacaggatgctgggaacctacctgcaactccccgctgggtatcagctcccttggggtagagaagcttggttgatcatgcatggggtctgcagaacacaggagtcatgggctcttgtccccttgccttgcaagtgtctcagaggaaaattccctccccacctcctcgccaagacgagaaaatactgtgctaagaaatccaaaattacaggaggctgttcccacccatggagaagcagtagggaccaactcccattgccctctgcttggattggaaagcttgtcttcctccttcgagaagctgggtggggttaggagaaagttggcttaccaactactgtgtgccagacccattcctcctcaactttctgctctaacgcctacttcattttgattttgttcttgacaggggaacctctttttaatattttccataaatacaaacagagagagagagacagagagtgtgtgtgagacacacacagagacagacagacagacacacacacacacaaattaaaactgatacctacagctgtgaggaaatgagagaaaaaaagtgaagtattggccagcaccagccctctgaatgcccagttcattcttccaaataaaaaaaataataaaataaaattcaagctttgcatctcagctattttaaaaaccacatttccaaaatattgcttttccctctttgtgagggaaatatgaaaaacacatggcttgagtgatccttgcaagctactagcaacaggtaaaacaggaactgggggtggcttcaaatagataaacacagaaatatgctaagttggtttaaaggaggatcgcaagatgaggaggaaggtgtgaaagagcggaaagcaagtctaaagccctggattatagatggcgtagagcccttgatgagaaaacttataatgtgcctactactcaagccacacctaatttccatcttctttcttcttttgttctctcttggcatactgcatatgtggccaaggtacctatcactacacaactcactttgcacaactagactgtgagctgcctaagggcaggaccgagttatatgtatctttgacatttaagtagatatagcaagaacttgctatggctttgtgcatacatgaataaatgagtggtggattccattcactgtgctgtggatttaacttcccctgacatctgtgatgtgacccttcaaatgacagaaatgtctcgacccattccagagttttacatgtttttgcatttctaacttgtgtcttcaaggctagtgaagtgtgagtctccagcaccagacgctggcggagaagcacggcagagttgttcatggggagatatgacaaggaggaaacaggccagcagactgcagccctgggactgtcctggagatccagagtgccaacgctcctcaagagaaaatgtgggcgagggtgagtcctgacagaaaacacaattttgtgattgtctttttctctagtgtcacagggatctattcctctcacaccgtgtgacgaatgatgtgccaagcctggaattgatatctggagagaaaacattaattataggacatcagatgttgctctggtgggcggttttttcatatagataggctgctgtgcacatggaattttcttccaaccagaagtctttgttgctgtcatctggatacaagtgggacataggagagcaggtgcttgggcaaacctggaagtctccagacctattcaaagaggtggtctgtgttgtgtgtgtgtgtgtgtgtgtgtgtgtgtgtgtgtgtgctttcctgtgctgatcatttggataactccatgcatattaaagtgctccacaagaaaatgaacttcctnnnnnnnnnnnnnnnnnnnnnnnnnnnnnnnnnnnnnnnnnnnnnnnnnnnnnnnnnnnnnnnnnnnnnnnnnnnnnnnnnnnnnnnnnnnnnnnnnnnnnnnnnnnnnnnnnnnnnnnnnnnnnnnnnnnnnnttcagtggtagaatgcttgccatacatgagggaagcccttgattcagtcccaagcaatgccacacagacagacagacagacacacacaccccacaccacacagacacatacccccacaccactaacaccacatacacactacaaaaacaccacatacacccacacacacacagtataccacacatacagagcaacatacactcatacccacacaacatgcacacactcatgcacaccacaccgcacagacacacactttaccacatacacaccacacacacacacacacacacacatcatatactacaccacacacacaacacaccacacacagagagatatacatacacatacaaacacatacaccatcaccacatccaccattcacacacacatacacaacacatacatcatataccataccttacacacacaacacaccacacagaaacatacacacatacataccaccaccacatacatctcacacacacccacgccaccaccaccaccaccactacatgcacacatgaaaatcagttcatctatctaaatatggaatcctagagactcttaaaaacaaatacaaagctcctgtggactgcacctgtgaattgactcctgaaggaggcaggaatcacaacatggtgtggtgacactggggactgggggtccgggatctgcgttggacctcactctcttacttagtcatgtcagccaagagctagctgcttggcctctttggtcccctgtctcagaccttagaagatggctctgggaagatgagttaaaggctgaaaataaaatacttaaagccttgcactttaaaggaaaagttagttcttggacaccagacagctgctttctgtgtcacacagagaagcaccaactacagacgaagagaaaccatctgagcagccacagcaagcagacaggccgcttctgcttgcagaagaagaggctgtaaggtagcttttaccatcaatgaaaagactgcccaggaagtcattaaaaaacacttgaattttcataccaccttggtgttttaagataaagtcgagacttccggcagcaacagggaagattcccagacacagaattgtctcagctttaagtcgtcattcatgctgaagttgagaatgagcaggagttgagaacacctcaggggcatgtttagccaggattgtcttttgggaaaagctctgttgaagtcataaacactctcacaaccaagcttccttcaaaaacacccagtaaaggaaagcaggcccagaagtcattgatccactatgacatcagcaagcaacggagaggtcacgccgcacctgcaggactatctgagggctgcagaagggctaggcaccctttgcagcccagccttgtttgattttggtttgttttcagagagctggtagttaaacatttacccaggcacacctggcgaagacaaggaggctggctctgaaggcctgtaaactgcaaactgctttcgttggcattcatccgctgtggcctcagaggaaggcaggaagccgaccattggaaaggcgagctgcggttaatctgaagacaaagctagatcatacttcacagagacaaaaatagtccgtggacactgtcccttcttccctagtagatacaagttcagtgcagagccaaggtcaacatgtcctctgtatacttatgtctggttaagagggtgtgtgatggatgtggtgtccaaaggaaacttcagctccccaaactccaaggggcagcccatatatccagaaatgagctcaaaatggactatagaatgtctggcagttagagaaaagccaccgtttcccaacaacttgtgaaatcagttcccagcagccacacagagtcatttttatactcagctctggcacaagaaacatggcacctataggcacatcaaagcctgtgctagcctgcagcctctctcagtaccacaagtacctccctgtgacacatgtcaaaggtcatgctaatatcctggcccttctcacctccttacccgaaactccctccagcttatggcctttcctccccacagctgctcattcctcttataacccagctattcacatttctttcttccttccttcctttctatctatctatctatctatctatctacctatcatctacctacctatcatctatcatctatccatccatcatctatatatcatctatcatttatctgtctatctatcatctatctatccatcatctatctatctatctatctatctatctatctatctatctcttattcccacttcttcttcccccctgcctctctctctcttcctgctatctcactatctctactattctctcctttcctgtttccatagccccagccatggtcagtttactttgtctgttttggactcatccagatgcctctggtagttctcgctcgtatttccaatacaaatcttaaccatatggagcagtcattttggcagttctttactattccccctcacatgatctgttgccaaaacccaggagaggtaaacattgatccctttgggagggcccagccccttataaccaaactaagttgctgacttgactcatacggtacagaccgtttgtttccactgccttcagccacccaccatcttcaactccaaatgtcagagtccgagcctcctcagctgcttctcttccacctgctctagtcatgcatctctcctcgtcctctcgggaagtatgctcttggcatctctggctctcggaacctactaaaagcccctgggtacccgccatgtggaaaggctctatttctcattgtctgggagaaggctgctatatgcttctccactgtgactggggcatctcttggaaaagacgcctacccctgtccctatattggaagcctccctctggcgagttttctgtttccgatcttattccctaaacctcccccatcatatccttgatctgttcctggctccctccccaccgttctctcgggatcttggagcttggctcacctgccttctcagtctctttccctcctcagactcggagagcacattaaagcctcgctgtctaactacagatactttggcacccatatatatagctcagtggccaaaacatggcatgcttgattcccaaattcttgcagattgtaacaacttctgccactgtccaagtgaacgacctaaacaaatcttttctctctgagctttctctgctccccacgtttgccagtctcacaaatccaagcagtcctgggtctccactcactctgaccacagagactcaaatgtctgggcgtggataatgttgaaatgttgtcacatgctgttctgccctgtataaagctggcttacaacctttcttctctagacccaagcatgcttgtttccaacatctccatcctgggtcaggctgcccacctgactctgacagagagaaggacaataagacagaatagcccccctgctccagaaaagcaaaaacaataaataaataaataaataaataaataaaccaatcagcaccccccccccaaaactacgtactttaaaatagcatagggattactgcttctcatcccatactcctcttggttttgttgacaactcttataaatgaaaaagtgtagccaccgatgtttaaccttgttgactgccccacccctgcatacagcgcagaggtgacttgtacacatgttctttaatcctttaaaactataactatgtaaaatataactactctggcatcctttgagggattcggaaatgctagctagtaatagttactctccagctccctttaatctttgggtttctcctgggcaaatgaaaatcaacctaattttataggaccttgacaattttaattcaaaaaggatacttgaccccaaaagacacctaagaagcattcatccatgctctccccctctgtctcaaaaagcccctgggccgctattggctgcagctgaagcagaaatggaggcttcgccttctcacttgagggagaacatttcacatgtcttaggtactcagagtcaccagaaaagatggctgagacacagacctgcagatactacccattctcagtgactctcattcacagcatcctgggtggggcctaggaatggaccattttagcaacttcagtgttgtttgctaacatgcagacaatctgaaggccttctaactgaggccatgggtactaatcttgatccccatactacatatctaggctctgttagttccatactgagaagatgcctgcagatggtcctgctgcccttgttgtcagtgagtgcagataggtgcacatcacagcgcatcttgaagacttcttcctcttgcacaaatatcctgtcttccgaaactaaatcatgcactggccgtgcaaggtacagaatgaaactaaattctccttctggtcctctagttttactgaggtgtaagtcagccatgaaaagcagtttagcacagacaggcattttatttaagcatgtggagtcccgtgagcttgtctggggaataagaagcacatttaggaatggagtgcctcgcaggtgttaaggtagcctggaaagaggcacaactggaccaaggcttcattctcttctcgggtggcatttgctgaagggtttctagggctcattatggcctacaaagtccagctgtggcaatttgccatcagcaagacagaccaaggtccagggaaggcaacagagtctatggtgcagcagcaagtgaccctgacgtgccagtgaactttccctttctcctaaacactccccctgatttagccccagctcatgagggtttgcagtgtcatctgtggcttcctctccccacaaatgagcctcaattactctaaaacctgaagctttagggatttcttgaaaaatggttcttttactcagtcaaaatacagcaagaaagaaaccgtgtagaacaaacttacgtagccgactttccccgacctctcaatatccacccaggcctaaggcattttccacatgatgagaaagatcccagagggttcagcagttgagagtactgactgctcttccaaaggaccatggttcagttcccagcacctatgtgggagctcacaatgacctagaaatgcctggtctagtcaacctgatgccttctctgacttccgagggtactacaaactacgtagtgtacagacatatgtgcatgtaaaacacacacacacacacacacacacacacacagagagagagagagagagagagagagagagagagagagagagagagaataaagaaataatatatctttaaaaaaatcctaaaagcagtacaacaaaaatcctgtgcttactgagaattctccaatggccttatgttcaccagtcctatatgtatatcacaaactgggggatggtgactcctcttgccctgaggtttatattcctcataacaaggttgactctgtatctctctggattggtaacaaacattttcagtatcgattcttcatgctttgtctctattctcttttaaaactgtcttccaacttaactcctatattgtgacacacatagagtcattgctacattaaaagtcagtatgtgtactctctcctactcttacccttagacctctcaggttttcatgcttcactcagagaaagcatctttctagacctagtttatacatagtactgtttactccctttttaatttctatctttgacctatactgtgccattctttaactaagcacagctggaagggacattagtcaggataatgccatgctaagttgctgtgacaagcaagccctacaatcccagtggctccttgtgggacagcacatgactttcatggtcagcgaaatctgagcttcttccaccatgtggctctggcttctctgggttgctcacttctggtagtgttgaggaaatagcaggtgaggacatatcagggatgaaggctctaaattcaactcaaaaaaggtagagagataggcagagatgcgggtgccaagatgactcaacccggtgttttccagagggcatctcacatgctggcacaaactcttatccataagtgcttgtaaagagccaaatatggctgacccttcagtccagatctttatctctaaggctccaagttgagaaagcctgtgactactctaccccaaagccacagttcccaggcagcaccggtgggtctgagagctggacagatgcaagctccaggaagcaagtgccagtggcaagctctaattatgggaaatgcatcctgcttcctcggggaggtacaattactgccaggaaagctgaggaaagcagacagaaaatagatgtgatgcttcgagcagaggccttgctgcctccgaaggcttgtgttttgaacttgactctttcaagataagtttaaagggtggagacggggcttatgggaaagacattctgaagtagggcttggcttgcaaccatcatgtggtttggggcaaatgagtctggaagggctattctcaagtcagataaaacgtgaaaagaagcagaggcgtctaaaaagcaagataaaagcaagggaaggggtgtgaacctccagggtctcaaggtggaatctgagaatggcctgggagagtgatatcttatcagcagagaggcctcctgtgtggtgaaaatccatatatccgcctctccttctccacgtccgagagacccaggctacaggtggtgttaaagaacatttccaaatccttacttaccatccgagattgtgtgcatctagaggatcactgttttgtctttgttttttatatgtatttatttggcggggtgggaggtgtgtcacagcacaagtgtgggaagaggacaacttgcaggagtcaaagctatgcgagttccttagatagaacccaagctatgaggctcgggaataaaaagcctttacctactgaaccatctcgccggcccacgactgtaggctctttagcctggctagcaaaaacctgtatgttactcagtgtgtgtgtgtgtgtgtgtgtgtgtgtgtgtgtgtgtgtgtgtgtgtgtgtgttatatgtatgcatgtgtgtatgtgtgttaatatgtgtatgcatgtgtgtgttatatgtatatgcatgcagtgtgtgtgtgtcttatatatgtatgcatgtgtgtatgtgtgttaatatgtgtatgcatgtgtgtatgtaatatgtgtatgcatgtgtgtgttatatgtatatgcatgcagtgtgtgtgtgtcttatatatgtatgcatgtgtgtatgtgtattaatatgtgtatgcatgtgtgtatgtaatatgtgtatgcatgtgtgtgttatatgtatatgcatgcagtgtgtgtgtgtgtgtgtgtgtgtgtgtgtgtgttacatttgggtgtgttacagactccacaatatatgtcataggctagtctcacacaatctctctgtatttatttcacaaattctggggttgggagcccatgcataataggacctggctatactctccatactcttaaggctcttggagaaattatttaacatcctgacatcttccataatagctagagaggaaaaaataaattaaaaatattatctgccacttgtctgaaaaggttaatacaacctgtacatttcttaacataaagttaaataacgagctaggcgtggtatcacatgcctgtggtttcattacttaggagcctgaagctggtggatcaccgtgagtttgagattgacctgggctatcaagtgaaacccttctcaagacaaatctacaaaagtcaaatactactacaaataaataaataaataaataaataactctatagtattaaccagaattactttattgtacctttctcaattttatttttatatatcttcacaattctatttcttagatgacagatcaagaattaagacacaacaaacctctgaatctcaaggtcaaccaaccttacccttcaggtttctatttcattgtcatttttccatgttaactgtgcacacacatgcatgtgcatacacctctaagttctttcaggatatccaagccacctgccttctcctcatgcctcccaacctcaaaactcagagtcaagctcagactttgccatacccaattgatgctcagaaaaacccattcatcttgttggtttcagaatgactgctaaaaaagtaataataataaatgggccccctgtttccccaaatgacagggataaggtgagctttagaaacaatgaaattacagagttaatctcataaaatatttatacagaatataaaggagctggagagacaaccttgatgcagttatgagaataagccaaaaagccacccatctagatgtaaagaagaagaatgtagagccaggcttgctggcaggcatctgttaactccattgctcaacagtctgatgatacaggagaattctgactccaaggctagtgtcagctacatagtaagaccctgtcaagagaccgagggggtgaagggcagggttaggcaaggcctcaaattttaattatggagcatagcgggaaggacatgcatatggttgcaagttaatgagtagaaagtcaattagctgactgaacagctaattcgccacaaaagcactgtgagaatcagagaggccctagatgcagagcccaggcacacgtgcctaggaaagatactgtcttggtgctacggttctttgatacactgtgtatctatctaccctatggtctagactgccgtacatcaccagcagtcagattttaaggtctctcttctgactctgccaagtgtcaccagagctgcaaagcatgctggtctcctcaccaactgtgtttattaccttacattaatatcattcttctaatgccaggtcctgcttcctttgtaagcttgccaaccaaacctcttttatgagcctaacagatctcaggccgttgtgtacgcctcaggatcaacagcacagtaagggataaatctgcctgagcagacagtacgttgcttagcaacacatcagcccgtcctctgcattagacatgggtcattctgacgtcatcacattcaaaggttgtgctaatgttacagctgacttcagagtctggattagacagttactgtatagcaagtcagaaacaggctgtgcactaaggggatggagatagccaagaccatttcaacaggccactgtatctgtgactccaccatagacagcttcttcaatggcagcaatacccttgacagagtaatgttttccaggttttttcataccttcttccctcgcagtggctgtgaggtatgaaatacagtgatagctcattgcaaaatcagtttccaagatgagttacatgatccctttcacctgttaggtaataggtgtggttaagtcttacccttgtgccttctccagtctgtcactgacccaaactctatcttgaatcttgggcatgagatgtaagaattcatgcaaaagctgtgaaagcaagaaaaggtaagttataaggattactatagagtctcagataggaatacattagacagtgcataaaagttagcggatgagggagatggtgagtgctatgtgccctgacatacacagaggaattacagtactgcagaaatgcttataatactgtcaatggcaaccataggaatagaacaagataatgtatgaagtgaaacaagccaggcatggggtgaaacaaggcaggcctggagataccagcaccacctttcacactcatgagcaagccaaagaagctgatctcacagaagtaaagtagaactctgcccagtagagatttggaaggctagagtctagggaggagagatggagccaggatggttgatagactgagagaggaagaataacagaagggtctacagcacagtagagaactatatcttataactaattaaagataaagaaaacctggtagagacgattttagatggatcaagcatactgctaagtgtttgaggtgggcaagcccattatgttgattggactgcgacccatttgcatacttgtactgaaacctcaaactaccccaccccataaataggaacaaataggtgtcaattaaaacgtaggccattgcaatagggagatggctcagctgttaaaggctaagctcacaaccaaaaaaacaaaacaaaacaaaacaaaacaaaacaaaacaaaacaaaaaaaccaaagtcatggatttgagaggggatattgtaggggcatgggaggagttagagtaaggagagggaaggtggaaatgatgtatatccagtatactcatatatgaaatcctcaaaaagtatcatccatcaatttaaaaatcaagctttagttatgagtctagaagggttccgagccctagttataccagattgtcacatacaaacctgtctgccaacattaagtacttggtctctttagagagatctgttgaagcataatgggtatgtacgaagataagtggacaaaaggctccacttttgtagtggtagcagtcaacaccggtgacactggctctctctggacaatgaacaaccccttcagcccctcaggtttccttacacacatttttagccctacctcctgactcctcctaccttccatgggcaacctgtttccttaatttttaggatttcctagaaataagtgtgaaagaaacatagttatgctggctctgtgtgnnnnnnnnnnnnnnnnnnnnnnnnnnnnnnnnnnnnnnnnnnnnnnnggcgtacacacgtgtgtataagtggtgttgaaagactgagaggagcccctcgctcaggcctcaggacaatagcagacacccaagaactcacgataaaccaagcttgatgcaaaccacatgaggctttattcggggaaagccagagctctggggatgactcatatcccacgcagggatagaggagttgacctcgaggggaaagaggacccagtttttataggccctcagaggggaaaggagaaggggggagtaggggatttccagatctaaacaatgtctattctaaaatgattgattcctcaagaaatgggtatgggagggaaacaaggaaagagtctaatgaaggtgcagcactctggattggccccggctatgattgctggtgagatttcccgactctttcccagcaacccatatcacaaacacctggcagtgaggtgcagcaatgggcacacacctggtcagaacattggcagacacacaggttcgaggatcggccagagcattgtgcacctctatttttctaaatcagtgaagctagttctactaacaatgaaatctattttgccaatttcagggcttctgtgaccttttacattctgtcaggatctttcagtgtatatacatgctcatggagatgtgtatctataaacatcctggatcctttcactcaacatacttgatttgatttctacccattttttagcatatatcagcatatattcattccttattgctgttactattactgtgtaatactcctatgagtgcactgtggtttacctgcttatatttgagagacacttgagttgttctcagcttggggcagttagaaataaagtcctttaaatgtttatgttaaaatatttgagtggaaatagacctccttttctctcgagtaatacccaggaatagaccgtgcatctggttcactgctgacttcctaagaaactgccaaaccatacccaccagcagcaacgtatgaacgttctggtttctctacatccttgtcaacacttggtgtagccaggtttttcctttaactttagccattcacatagaggggtggagtgacattttctgaatatcatttgtgactagagatgttaatacaccttttcatgtgattttttttgtcacccccaattctcttttggggacaaagtgtgcacatgactgtggagtccaaaggtcaatactgtgtgtcttcctcagttgactgtctgtttttgtttgtgagatagtatccctcactgccctggggctcgctgacccagcaggctgggctaactggacagcatgccccagtaatcttcatgactgtacctctccaagtctagactacatgtctatccatgtcattgtgcccagaattttgcacttgggtaccagggattcaaactctggtccttgtgtagcaagcactttaccaactgagccaatccccactagacacccaccccttgtgttctctcataaaatgtctattcaagtatttcctcttcaaaggattgttttcttatttctgagactgagtttcttatccatcctcacttggtcaaactgatgtgttatggtccctttcttccaaaacctgctttgctttttttattttgttaacaatgtccttaaattaacaagtgattcattgtggatgataatctattcatttactttactttatggattgcgtatttgatgcaaatacactctgcctaacacaaagtcacagatgttttctcccatagtttatagttttaggctttatgcttattgcttgatatttatatggtgaaagatactgactggtctatcccttcctatgtgggtaatctattgtacagacagcatttgctgaaaggacactctccacttgaatttgtttgctcctttgtcgagtcagttttccatgtatgtgggtgggcaaccctattgtactgacccacttgtctgtcaggtcctacactcatgaagagtatggctttgggagtcctgacactaagtcacagtattcctctggtcccttctgtaaagtgtcttgcttttagcttgttgtgatttgtttttgttagtctgggttgtttatgtttgcacatgaagtaaaaattcaatttctaccgaaagattgcattatgattttgcttgggagaagggttgtcccaagcattgtctagtattgagttttctggttcttgaatacattgcgtgtcaccatttctttctctcttcttccacttttctctctctggcattttatggggtttagtgtatagagaactgttgatgggcagtggtggtgcaggcctttaatctcaggacttgggaggcagaggctggtaaatcccccagacaactcgagagagagagagagagagagagagagagagagagagagagagagagagagagagaagcttcctcctctacaggagctgaaggcccagacccttccttcagcagcacacatggaggcaggaaggaggggacagtggtgcctctccccccagagttctgactgcaaagagaaagatcaaggttgtgagctcaggcaccgggttcaatcccaactctgacacatctcatacttggaagatgtcgtctctctagaatttaagttttctggtcatcagagcatcccagcagcccctggaaagcctctgtgagataaactcaagaagctcacagaacaattccagtcacataataggcaactaataaatattagcagcagcagctgattttcttatcaatagcacctcagagtaagaaagtagacataatgctgacttactaggcagactggaccacttggttaacggcttcaggtatgcctctcatctgcctttggccattttgagctgactagaactttccagaaggaaaatctttgcattatggggagtagccaccgagggagcccaccatgatgggcaatccccgtgtttagctttacaactggttcctttatttacttgggacatcttgaggtctggggggtctggaggaggctgctctaattatttccccttactactcctgaaatctaaaagcctgactcccttagacaatgacttgaccctagaaaaactagttccagaggcctcactcactacatcaagcaggaggagccagaggactccaggactggctgcctctgataaatgagaccttttcttgaatgatttggccccaaatattcacacaaacaaggttagaaaccaggctcagctggtctgtcactcagaacttccccaaagccttcatctcaagccccaattccacccctaccccgtgcagaaccagccaaaatctttgttctcagagctgatacaaaaagcatttattcctttggtaaggagtctgcaggaatacaggagtaaaggcgtttgcaggagtcgtagattttgatgaagaagatgaaaggacttatttgtttggtatcaggcataatgactgttggatttcctgttgtgcgatgcccttgcttctgagctcagggtagaaggagtggtgagcagccatccaaggcagtttgaaagccattttcacctcacaccatcagcttgctcagcaagcatgtaaacaagaggactgggctggagaaacacgagagggaaagaaaagttgtttggtctgctgtctggagcagtccatcccaggccaaaaggaaaacccagcaataacaacagggagttcacagcccacactcacatctgtgacgccttccttaatggtgctggggaactctcccaagacgacaagctgctagctcatcctctcccaccattatgacctgaaaagctcccatctgtctggaaaggatggaagtgtcatccgagtccatgaatcaggggtgaagaaacttcagttctgtggaaggtcggcaggtgcaagtgttttacaaatatttgctgtcatctggaaatccatcattgtatctagtacccagaaaacagaggtgggagtaacggaagttcaaggccagtctgggttccacagcaagacactatttttaaaaggtgggtgtgggggataactccaatgatgtaaccttccaggaaaagcaagctttctaaaggacacacgtttccattacttcgataaagcatatggacaatcattctatttatttaagtgactcagtacatggctatggtgtaataattaatggtaaggcgtccacagacctagcggtggtttgcccaagcattaaatgttccctgatcatgtccactttatttaatgtcattttccgatcttacataaatgctacaaactccgctgtatcatcattctgtattgtaaagactctgcttatagccccagccatgtccatctgtcatctctgccttctagcaattgccactgtgaactagaacagtggttctcaactatggcagtaagatgaaatcccctagggattatatgtgcctggattacatcccccaagctgtggctctaccagtctggtgttattacctggacactcacataccgtaaacctccttagttgtttctgttgagaagtccagtctggagaccactggaaatatgaaaatgataacctatctgatagaaatgtgcataaagttaggttagcatgatcctagactctcctacaaataagattagcatattaacattctggtgtgtgtttagagatctcaggtcttgatttcttcttcctactgctccaggaacatgacctcaggttagggagagacagatgaaccagtagttagatgtttctgactacagggctctgcccagcttcaaatctcaactgtggcacttttctctgtgactttggatgagtgtcttgacctttctgtggctcagccctatcaggaaagtgtaaagtgtgggaaggatgcattgagcctgtgcagagcagcatgtgacaaactgttagtactccagagcctgcagggaactggattttctccagttggttaaggtaggaatgttatggcacgcaaaggttagcaactgtagagcgctgcctttaatctaggcaagaacagggaaaggattgtcagtacttaggagaagccagagccgggcagttatagcaactgacacagatgaggcccagccaggcacaaacctgtcatcccagctctcaggaggcagaggcaagagggtgctaattttaagtccagcttgcactgtgtaaagagacatcatctcaaaaatggtggacagagctggagatgttgctcactgtgtgcaaggtgctgggtgcaatctccaaccagcatcccctctctgtcacacacacacacacacacagtataagtggaaagagagaagaggacacaaagcagaggggaaatccctagcccctttccttccagcctctctctgctcctgctggaggctcgctctggctggctacccacagaagccaaagagaacatggaacccacaagcagagaacagaggatgacgcaggtggaaggagaggcagatggaaatcaccagcatggagagctgcattcgtcccccctgggcctgagaaattcattgggagccagcaaggttacatagcaccagctgtggcacctgagacaaaatggtccctcatctgtcctcattcccaaaactaagatgggccaacactgtgatggaagaaagttcactcgttattataagtgccacaagtgcaggtattggggaccttgagcatctcctgtccctccctctctgtgccttcttcctgtgctcctcttccaccctccctctgaagatctaaacacagatgtcccttctcctcactgcctcacgaatcctgcttcctggagaccagctggcagcgtcctctgtaatgtcttcccttaccacctccctgtccccaaatgcctcctctctttttttctcactcatgaatgttgacctttaatacaatggagactccagtcatccaccctctcactccttacacaagtagccattcttagctcggctcacattagcttcacaaaaccttccgaggtgcttcagcaaccgccgaggtctgagtggcatcagcagaagcacgggctcttctggtaacttccattgtaggtgccagggccagaggtggctctcgcaggaggtatccctgccctcggctaactccctctaggctttgccactgccctagtctgcagacccaagtaatcaacatttaggttcctgccagggtctcagagcttgttctgtagtgatgtgtgtgcgtgcttaagtcagaccctttgcaatgagtctttctttctttccaaccttaagggttttacagatcctacaaccacacattcccttaccagacttgattaaactattcgtctttgcttattactgagcttctcgctaagccctttggcccctcctcccaactgtgtgtgctttgccaatggccattcccctgacctgttctcccttgcatgtctagtgatgactgactgtgctttcccagggaatgaataggaacctgctcttagtgcctcacagtaccatgtacttagtgcctgtgcagcatgagagacctccagacaaagcaaagtctcgatgtccagtgaggcctggtgagctggcatttggcaagattttaacaagttagccaatcacacataccctgtagcctaagcattcaatcgatccttgttctcaaagactttttttaaatcaggaaaggttgatagggcaggagggtgggagggagcttttatatcctaatttataaggaccatttagactccatgttgtaagaggaatatgcatgtgcatgttaccaatacctcagcacatcacagttaacagtttggttgttctgagttactctccagccacgggatagatagtacttccaagaagtatccaagccaagacacccaggttaagggagggttgatgagagcaccagacatcacccatctcaggagtggttggccacctaacccgaggggcaagactgagctcccgagtgactgtcttcatgtgcccttcccaggataatcagctttctggagagttggaaatgagatgggatgcagtttgcgtggggtgtcaatccactgccatctcaggtcaaagttctctgaataaagtacaccttaaaaactgttctttggatggatcacaaggcccccaatggaggagctagagaaagtactcaaggagctaaaggggtctgcaaccctatatgtggaacaacattatgaactaaccagtaccccggagctcttgtctctagctgcatatgtatcaaaagatggcctagtcggccatcactggaaagagaggcccattggacacacaaactttatatgccccagtacaggggaatgccagggccaaaaagtgggagtgggtgggtaggggagtgtgtgggggggtgtattggggacttttaggatagcattggaaatgtaaatgaggaaaatacctaataaaaaattaattctaaaaaaaaaaaaacaaaaaaactgttctttggggccacagcataagtgtttgtatcctggttataggaagacagtgtgtgataatttgagttagcacaggatgaatgctgcttaagtagaacatcgatgataacaaaattgcatcatgcttcaaaaaaaaaaaaagaagctgtgattatcattttcatgaatgaagacccatttcttactcgagtactatggactttttgatggatttcctcatctctgtttgcatatgcataatttaggtggctaagagatgtttcccactttcaaatttcatgtgtcagctgacatgttgaatacgtgacagtatttcgtgcatacaggaaattgatctgtcagtagctgaagatggatctcgagatggcttcctagtgctaaaacattgtaaagtggaattatgtgaccttccttcctgttgacataggtaagggtaaggtttgtacttctaccctccagttcccacttccttcaatgtggtatctcagccaaaccagcaccttccccatgggtcactacgtcgatagacaaggaaaaacaaagcttagttttgagcaatcttgcgtgactccaaagaatgtctcagctcctagttcattatagatgaacacaaatacaagcaaaccatcaacttgtcataataacacctgttcttgtatgcctgagactccctcgtcacatctgtcccagctgctgatgttggctgctaagcaagcttcctgccaattgtctcacctattccccccactgagaaaggaatatgtactatatattcatggtataacatatgatgctttgaaataacatcgaagaatagttcaatcaagttaactaaagtatccattgccctcaactagcacactgatctttttgtccataggactcttaacctctactctctcggtgatttttaggaatataatcctttactgttaaccatagccatcatgatgtacaaaagagagtcctagaacttgttcatcttgtctatagctttgtgtccctggagacacaccccctcctcacttacaagctctacttactcagcatttttaagtgctacatatacaatggcattatggggccatttgttttattgtcattggcttatttgacttagtataaatttctccagttttgcctatatcatcccagattactgagtaaatactgaagactgagtaacagtctgggtgagtatgtgttgtgtgtacgtgtgtcttttcacatcttctttatcagctcatttatcagcagatgttattgccatatcttttctattgcaaacaacgcagcagtgacgaagctacagataacttttgatgtgttaagttcatttgatatctagtagtaggattgctatatcataagctagctctgttttcaatttcctgaagcgtctgcataccattttttttttataatggctacaccagcttccttccatccaaccatggacaaagattttgttgtctccacattctccctggcatttgatgtttgggaagtttcgggtcttgccatctggacagatgtgctgtgggtctccctatactgcaatggaccttgctcagctcagcacaccctacttggagcacagttctttaaacacagtgagcccaaggagcaagtagactgaggcatggatcaaggaacttatgagtgagaaatgggaaactcccatgcattcatcctcctggagagcaagaagcacaggtagacaaccacattctgtgagctttacccatagtgtcctacccttgcctgttggaaatacccagagtatgtgatccctgccgcattaaccttggaccaagtctgactcatgactggggcatcgtttccaagtctgagtaagtatctaagggcatagcctgggtgacccttcagaacagatgcagggacactccctgtccatgggattgggtggattaggggccagatcagcattctgaaatcccatctgtggtaataaaccacctttattacgcctgtaaaactttgaaatgagaatacgtgcaaacttgacatgttccactgacgctcatagtaaccagcaacctcagttctaacctggttcctggacttcatgcggagtggactcttggaagttagcctcaataccacagtttggttttgctctgaaatgatatccagggatccatcccataattagcctccaagcgatgacaccattgcatacactagcaagcctttgttgcaaggacggtgatatagctgtcccttgtgagactaggccagggcctagcaaacacagaagtggatgctcacagtcaactattggatggatctcagggcccccaatggaggagctagagaaagtacccaaggagctaaagagatctgcaaccctatcggaggaacaacattatgaactaactagtaccccagagctcttgactctagctgcatatgtatcaaaagatgacctagtcggccatcactagaaagagaggcccattggtcaggcaaacgttatatgacccagtacaggggaatgccagggccaaaatatgggaatgggtgggtaggggagtggggggggggacttttgggatagcattggaaatgtaattgaagaaaatacgtaataaaaaaataaaaaaataataataataaaaagaaaatgatcggacaaaagagcccacagttgtctcactgtagcatttggctgagtggcaccattagaagtgggtagagcaaccctgcatagggaaaggctgtttgtgtgggcaactaggaaagttctagggaggagagacccagttacacacaaaagaacacaaagcacttcagattcgtgttcgctcaccctggcacgcgtggaaaggaggctgtttgggtgtgtagaagtgcttcccaaagagcaagcccagaccaggtgatgctccaaagttacaagtgccctgtgagttactgggtgtccatttctgcctccagttgtgtaaacaatgccttgcgtaatgtggatcttgataatattgactcaaaaccttgaaatagatgaagtcatactgagtcactaataggagggactctgccagctggaaagggagcacggagttcagcccagggtgggacagtgtaaagagcagcgtgagggagtaggcagagatacggtcacaagcattggcctcccaggcattgtgtgtgtgtgtggcatttgtcatgatccagactgcccttgctgtaagcaaagtccatccctttgtatggacttgttttggtaaaagctaagtagagaggcactatttatttataaccccgtttttcatttttaagtaaccagtcttttggtgctagttatcataatgtttaatgtgcttattattgtctggtcattttagaaacaaaatttcactatgtagtcccagctggcctagagctcactatgtagatcaaggtggtgatcttcctggaattatgggtatgtggtgcgtgtgtgtctgtgtgtgtgtgtgtgtgtgtgtgtgtgtgtgtgtgtgtgtgtatacatataattttcaagaatgtatctgttagtgctgagcatagtggctctcacctagaataccagcatcagaaatttgagtcaatcctcagctctctagcaattgtgaggttagcctaaggactaactacctcaaaaaaaaaaaaatcagataaaaaaaacaaaaatacctctgttaggtttaagtacacaaaaatatggaggtagataatcatatacctatgtaagtctcaacattacaagccatccaacataccttgtcctatgctgtttaccttcaaagaaccaggctaatgaggcaacattttaatagactgtttttcttcccataggctagcacaaagtccatggtccctttgaagatctgctaataatctataaaaacaaatggagcttggtgaccaatattccccagaccctgctgctgtaggaagcaggttcaagtgtgcacaggccagtgatttcggggtccagagagaagcaaccggttgaacctggagagaagggaaaagccagcaggcagttacaaaggactaaaaggagttcaaacaatcgagtgtgtatatgggatgaacagttctcttctttgcacccttgagggagtgtgcattgaagtatgaccagaatgaagccagtaacaggaaggggacctcccagggcagctcctagttattttttcttgaacacagagactcctctgtggtctcacttttttggctctgaaccttggtcacatatttctaggggccgtgtaagccaaggacagtggagagtgcagcaagaaaccaatcaacctgatgttagggaggaaagaaagacatgcctgctgttattcatgaaaaaaaaaatgggacttcctcttttttctagttaatgaccttgaagtaaattcgtcaggcacaacttgcccggtccaaccagagaggaaaccctcactgcaaatctggaccaatgcagctgtgcacacagcaagagacaagacagagcccaagcatagccaaaggaggaaacaattgcttcattgcatctggaggatttgagagcatagaggctacggcatcacatcttccattcagcctgtcctttcctagaagaaacactcacgggtggaaggagtgtgaaattaaaaaatggccagaggatagataaaacagtagcacagacctgtatttaatcccagtggagattgggaagactggaggatcaatacgaagcagcatgtttgaggttagcctggcatctatgagacgccatcttttaaaagtaaaaagatttatcagtggaggtgaatagcaggatcgatttgttttcaccacataacaagttctccttggagacatggaaaccctgacttttcaatttggacaaaagaaaggcaagctcccgggctggggagtcaagggagaaagcagagggaggagttactggcttgataggctagctcagccatagcctggtctgtgaaagaacagttgcctactgtcctgggaccaccaaggaggagcttgggaaaatatatcactttataagaaccaagggcaacgctgtgtcctgcagctcgggctgcttctcaatactccagtccagtttatagagcagtggcacgaatgcagaattgagggatacagtcacccttcagctatgcgtgtgtttaccatccccttaccaacaacagctggggaaatgggtgacaagggcggggggggggggggggagctgagcaagccagggaggccagcctctaagataaagacttagagtgtccttgatgaactggactttagccccagccacctgtaacagttgcagcaggacaatggctctgcttttttacagacaggaggggtggtctcaccaccaagtcagttatcctgaagtttaacatcctcctgccttagtttgctaagcactgtgagtaggtccatgaatgcctagcaaggctaaggactttttgcctttatccttccaagtcttacgttgatggattcactctcagaatgctcccattctgtagagtcaactatgaagctcttagaatgcgccttctcctagtctctgggagcattgccctccaagaagtaaaccaaaagctggtcactgctaagaccatccccagccatgttcccaaaaccttctatagcactctgagtgggcttctctgccctactgaagcagggaaaacacatgagtaaaggactctgagctcttgggattgtgcccattgaaggcaatgctctggtgccatttatccacagctagccttggtgttgccgtccttgtttagaacacccagcctccaatcctgatagccacccattccacagtctggtcttctaatttctctgctttctgcttaaagcattgccttgttcctttgaggtctgaagcatctctagggatggaaagcatagtgaggtcagcaacctgaagggtgtatggtctccatcccagtgccttattgattacataaatgtccctcatggtaatgagtgataactttgaaggcttgttccctggcctgccagcttctatacacagacagacactggaggaaagtgtcccttgtagtccacccctgctgaagtgaaatgccccacagatttcttacttcagagctacgtcactggaggcccataagacaagtaggttcccttgaggtctcagctgtgctgaacatgtctacttgtttgttttaggtaggtaagtgaagctatcattcctgggaaggagagaaatactgggaggtatcggatcactggagactttgaaaattcagaacagtgtggtggtggtacctgtcaatccccacacactgaagagaggaggagaacttggaggtactgtggttctacctcctgtaggtcagtcagtcacttactattttgtaatcaaagccactgcaggcgacttggtttctcagttgaagttggcaagttgctagaagaactctatgcaaacccttttcttttttggtcaggcttggctttcttttttgtttatcaataagggatatttatttcttaggccttattcttcaacggaagttaagagattattcttagaaaatccctggggggtggggggaatgagtcactgtgttagcacactctcagaacttaaattggcacaagccaatcagagaggaagccatgttaccatcacaaactggatttctctctgagaataggagagaacacagaacaaactaaagggaaccatgattccctcttgctccttttccccaaattcccagttgctctccgaagaggctgcagtatccaagggtaaaatggagctgtttacattgctgacctattgcttgcctgactggagtctagatcagacttgtaatagtacaagctctgtagaagagccattgcagagatcaaaggtcaactctatataacattaccactgacattccagtcccaaacttcttgtgtgtatgtgtgtgtgtgtgtgtgtatctgtgtctgtgtgcattcatattaacataggtgcagatgtgtgcatgcaaagaccagggttcaacattgaatgtgcgctccttaattactctccatcttagtatttaagcacagtctctcactgaacatggagttcactgactcagctagacccagggatcctcctatccctgtctccccagctctgggattatatgtgccacaccaaggtttcatgtgggtgtcttatgtcacactgagtacttcatagctatgtggtaagccatctctctcaatctcacctttagcacattctccctacattcactgaattcactaaaatcaaggagcttggcctgttgctacacatttcaaaactagaagaaatcagcacttttgtacgagaaatgctttttgggaaccccagcctttctttctaagttcaaatatcccaattctttaatcttcaactttacttacatttcttaaaacaaagtctctccttccagtttcaagaagattagattttctctggaaccagattaaaagcccaagacaagatataatgctcccatttcgatcagctgaaataaatataactttattgcttttcttcaagcactggcaaattttttattgtcttcaagagccaataacttcagctcactattatttgagctttttattagtaaatgactttttataagtatagtgattctgactggtgtttataggtccagagttcagatcccagaacccatgttaactataaaatgcatggtggctgattatgggatggatccccgagtggggtagtctctggatagtctatcctttcatcttagctccaaactttgtctctgtaactcctttcatgggttttttgttccatattctaaggaggaatgaagtatccacccattggtcttccctcttcttgattttcttgtgttttgcaaattgtatcttgggtgttctatgtttctgggctaatatccacttatcagtgagtgcatgtctaatgacttcttttgtgattgggttacctcactacggatgatatcctctagatacattcatttgtccaagaatttcataaatttattgtttttaatagctgagtagtactctatgtgtaaatgtaccacattttctgtatccattcttctgttgagggacatctgggttctttccagcttctggctatcataaataacccagacactattgcatattccagcaagattttgatgaagggaccctggtatagctctctcatatgaggctatgccggtgtctggcaaatacagaagtggatgctcacagtcatctataagatggaacacaggacccccaatggagaagctagaggaagcacccaaggagctgaaggggtctgcaaccctataggtggaacaacaatatgaactaaccagtacccccagagctcttgactctagctgcatatgtagcagaagatggcctagtcagccatcactgggaagagaggccccttggtattgcaaactttatatgccccagtacaggggaatgccagggccaagaagcgggcttgggtgcgtaggggagcagggcggggggagggtatagggaactttcaggatagcatttgtaatgtatataaagaaaatatctaataaaaatatttaaaataaaaataaaatgcatggtggcctgacagcctgccggtgatctcagccttagaaagcacagaggatctatagaacaagctagctggagatatcagccatttcagacacacatacacagagaggggggggagagggagannnnnnnnnnnnnnnnnnnnggagagggagagggagagggagagggagaggaaatgtactgattctattgtttgttttgattgtcagatttatgatgttgtaatggctaccagattaaaaatcagagaattcttcattataaattaattgtgattggtgatttgaaagaggatggcctccctcccataggctcacatatttgaatgctagtgtccccagttaaagacagataaggaggtatgactttgttggaggaagtatatgattgtgggtgagtgttgagactccaaaagcccatgccattcccagtaagctctctttgcctcgtgcttgttggtcagatgtaagctatcagctaccgctccaacagcatagctccctgctgccatgttccctgccttgatggtcatggactcactgtctgaaactgtaagtgcccattagatgctttttttctataatttgccttggccatactgctttgtcatggcaatgggagaacaaccaagatggtgtgatataaatcagatttcattagacaaaatatcaatctataaaagtttgctggataagctacagacaccaaatgagagagaacagctgggagagtcaggcataaccaacatgttacctccagaaaatagttgtagtctaggagctggggttttgctttgaaatctcaaaaacatggtcatctctgtgtctggggtattatcaccatctgctactgaaaccattcctcacctacataactaaggctagcctcaaattcataatcttcctctgtcagcttctcacatgctgaaattactgaaattccacagtcaagcagaaaagcactttaaagatgtgtgaggtgtcttttctccatgtgcatggggacgccttaggatgctgtggtagtttgaataggaatgccccccatacattcttgtgtttgaatgctcggctcatagggaatggcactattaggaggtgtggctttttctgagtaggtgtggccttgttggaggaagtatgtcactgtaggggtaggctcaagatacgtcctgtatggcacagtctccttttgctacctttggaccaagatgtagaaatctaagctccatctccagcaccatgtctgcctgcatgcagctatgcttcctgccatgactttctagaaattccacctactctgagatttccattctttttcctggcccttggggcctctctcctgtctctccctgtatctgattctgccctccccatttccccctcctctctgccacccactttctgtcctcctcttgcctctatgactattctattcccttctctaagtgtgatccaagcatccttacttaggccttccttcttgtttacttctttgattctatagagtgtatcatgggtattctgtactttatggctaatatccagttactagtaagtacataccatgcatgtccttttggatctgagttacctcactcatgatgatatttttctagtttcatccatctgcctgtaaaattcatgatatccttatttttagtagctgaatagtattgcattgtgtaaatgaaccacattttctgtatcaattcttcagttgagggatatttgggttgtttccagttctgactattataaataaggctgctacaaatgtagtggagcatgtttacttgtggtttggtggagcatcttttgggtatatgcacaggagctggcaaagctgggtcttccagtagaactatttccaattttttttgagaaactgccagattgatttccagagtagttgaacaagttagaaaacccatcagcaattgagagtgttcccttttctccacatcctcaccagcatgtgctgttgcctgaatgtttttcttgcccattctgactggtgtaaggtggaatctaggattgttttgatttgcatttccctggtgactaaggatgttgagcatttcttcaagagcttcttggtcattcgagattcctctgttgagaattctctgtttagctctgtaccccatttttaaattggattatttggttttttggattctaacttcttgaattctttatatattttgcatattagccctctgtcaaatgtcgtgttagtgacgatctttccccaatcaataagctgccattttgccctattgacagtgtcctttgccttacagaaggtatgaggtctccatttatcaattgttgatcttagaatctgagccattggtgttctgttcaggaaattgtctcctgtaccatgcgttcagggctatttcccactttctcttctattacatttagtatatccagttttatgctgaagtccttgatccacatggacttgagttttgtgcagggtgaaaaatatggatatattttgcattcttctacatgcagacatccagtgagaccagcacaatttgttgaaaatgctttcttttttctattgtatgattttggcctctttgttaaaaatcaagtgtccatatgtgtgtgggtttatttccaggtcttcgattctattccattaaccaacctatctatttctgtaccgataccatgtagttttttgtttttttttttttatcattactgctctgtagtactacttgaggtcgtggatggtgatttctccagaagttcttttattgttcaggattgttttgactatcttgcggttgtttgtttgtttgtttgtttgtttaatataaagttgagaattcctctttcaaggtctgtaaaaaacatgtgttggaattttgatagggattacattgaatctgtagattgcttttggtaagatggctattttcactatcttaaacctactgatccataagcatgggagatctttctatctgatgatatcttcttcaatttctttcttcaaggatttgagattcctgtaatacaggtctttcatgtgcttgtttagagttacaccacgatattttatattatttgtggctaatgtgaagggtgttgtttccataatttctttctctacccatttatcacttgtataaaagagggctattgtttgtctctttgatttaattttatatccagccactttgctgaagttgtttatcaggagtttgctgatgaaattttggggactgactatgtatatcactccagaatagtgataacttgacttcttcacttccaatatgtattttcttgatcttcttttgttgtcttattgttctagttagaatttcaagtactgtactgactagatagggagagagtgggcagccttatcctgtggttttgcgtgaattttattgagtatttttatgttgatgttaagtgaatttggactgaagatctctttctttgttgagtctttgggtggtttaggtatcaagataactgtggcctcatagaatgaattaggtactgttgcttctgtttctattttgtggaatagtttgaggagtgttggtattagctcttctttgaaagtcttatacaattctgcacttgggtgatggtgagatggctcagcagttaagagtgctgactgttcttctaaaggtcctgagttcaaatcctagcaacccacatggtggctcacaaccatccgtaatgaaatctgatgccctcttctggagtgtctgaagacagctacagtgcacttacatataataaataaataaataaaagaattctgcactaaactcatctggtcctggactttatttggttgggagacttttaatgactgctccttaggatatggcccctagtacatgttctagtggctggtcctactttacctgatcttgatttaacattagtagcggtgtctgtctagaaaatgatccattttgtatagattttccagctttgtggaatacaggcttttgaagtaagacctaatggtttgttttgtttttttgttttgttttgttttgtttaatttcttcagtgtctgttgttatgtctccctttttatttctgattttgttaatctggatcctgtctctgtgccttttagttagtttggttaaggatttgtctatcttgttgatttttttttcaaagagccagctcttggttttgttgattcattatattgttctctttgtttctaattggttgcgtcagccttgggtttgactatttcctcctgtctactctccttgggtgtgtttgcttctttttgttctagagttttcaggtgtgctgttaaattgctagtatggcacctctccaattcctttctgaaggctgcaatcagcatagcacagccctagaagctcagttttccccttcagtactcgagtattctgtgttactctactaccattttaaaataatacaaattatctaaaccatattcaataaaccaaagtatactccctaaggcattcttggactttatttgagaattccattcgtgtgctcaaggaagggatagcttcttatattgggaaagattttgaccttgtcaaagaatcagaccaagaattcagtccatctactctttaatatgcacatgagacgcttgttctttacaggattagactgggtgatatgtcacaagccatgtccaggcttagttctctttaaggggcctgtctgcagagagacagagcagaatgactgtagctgaaatgcagtcacagccgtcaagggatactgctttcagaaagagcagctgaaggtggaacccgaaaatggtggagttttcatatggagtctgtttgaagtcatgaaccaggcaaggtatcccaccatgtatagggtttcttgaaactgatgctataaaatttgttgggctgacagtaagatctcttctcgagtacagccatccttcttttgtatctggggtttagctgctggctcaaagggctgtgtggtcattaagtggacaaggtaaagatcatttcctacacacaggccaagcagatccagtcttgctgcattaacttactgatgaatggaactgtcagtttcccaaggatggctgggcatccttgaccacttggaattgagatcagagaccccctcagtcaaggtcactcaagttatcattggaaacaactgcccttggttggatttgcacagctggttacaactccattctctgtcctttcattatatcctgagttggttcatagtttgagagtttaattagaaaccaatataaaacgttaaagagtgttcttaataaatatacttgggtagacacccaaaagcctgacgtaagggggattgctaaagtttgagcccagctggggccacaaagtaagttcaaggctagactgatacacatagcaatgctctgtctataaacaaactagcaaccacacacatccataatggccaaaacacaaaacaaaacgaaaacaccaactctagaagagctttcatatctaaaatggaagcctctccttgaggttcaaactaatgaacagactaaccatctgtgttaatagcttcttctttaaggttttagggtggagtttcttgacatcaccatggttaacattcagttctttgtatcgtgttagcctgaacttgaaggactgctatctccatacagctcaagaacgtagctattaagggatcatcagctagatgctttcttatcactgtgctagaaacagcagaagaaaggaatgatgtatattgctcatggtttcagagcatgaaatacctcattcagagctggtcttccaattgttggcatagaatattctcattgacacacaaagaaacacccaaacaaaaggaaagaaagtaaggctaaagtaaggctagacaatttatttttgtaaaaaatggattgctacaacccaaactaagctagcaagcagcacatatggccaaggtagcctctgtcatttatgcctaactcaaagtagatcttggctactcctcgctggccgaggttcaacctcacagtctagtcctgattggataatttggaaagcagcacaaaggagatgaagaaagaggagactgctctgagccatcaaatttggagaaggcagccaggcctttgcataaacaaaagttgggaaagatttaaagattacattgcataagagttttataaggcaggggagatttatggaatatttttccttgagctagccacttttgatacataaaaatgaacattcataattaatattccttagaaacctcttgacagacatacctagagatggatggaaaaaaaaaaactttcctgatctaaccagctgatattaactgttcacactcttcccccaaaagagaaaatatttatgtaaaacaaagttttgagagtttttttttttttttacttttacctttgaaacagattcttcttatataccccaagtttgcctcaaccatggaatttgtattccacctcagtcttggggtcacaggtgtgtgccttcatgctccatcagttatttgagggttttttgtttgttttgtatttaattttatgaaacagagtctcacactgtagctcacactgaccaagaacccactattgattttaggtagagattatactcacagaaatcctcctgtctccaccccttgagtgttaggattggttagcatgaaccaccaagcctgatgggtcattgtaattatcagttactttttaaaattattactgtgataagacaccatgactggggctggtgagatggctcagtgggtaagagcacccgactgctcttccgaaggtccagagttcaaaacccagcaaccacatggtggctcacaaccatccgtaacgagatctgactccctcttctggagtgtctgaagacagctataatgtacttccatataataaataaataaatctttaaaacaaaaaaagacaccatgaccaaggcaacttataaaagaaagcatttaatctggggttcatggttccagagggtggtaaagaccataagcatcgtggtgaggatcatggtagcagacaagtagacatggcctggagcattaggtgaaagcttacatctgacccataagcataagacagacagtcagactgacagacagacagaactaactgggaatctcataagcttttgaagtctcaaagtctacccccagtgatgcacctcctccaaaaaggctacacctcctaatctttcccaacttgggacttagcattcaaatacaagaacctatggagttgggtgggataagggattctcattcaaactacgacagtgttagaactctattggcttgctaggaagagcgaagtatggttactgatgggattctataacctgtgatagagatgttctccctcttccttcccaatctacccactggaacttgaaaacaccctaaattaaatgggcgctgactgctcctcacctataagtcaccacaactgagctgcacagggcacacaggatgtccctcatttcctttcctctctttgtttgtcttcttctttttattaaaggagggttattttttatgtaagctgttctggaactcactgtataggcaaggctggtcctagagttttggagatctgcctcctgagtgcaggcatgaaggatccagtggtgttgggtcctcttaaaaagagatgctgtttcctctggtgagactcacaagagaagacagaccatgcaaggaaaaaacttcaaagtcaagatttgacatatagttttctggtgaatgtgtatcaatttcacatgactgccaagcaaaccattcaagtcaaatcaccctggtttgggaactatctacctatatttacatgcgacccttgcacctgttttctttagctgcatttccccacagttgtttggtgtcaattccattttaagtgaatctatagtcctgaattctttattttaactctttttttctaacccacttcaatttgttttcatgacacagtattggcaaaaaaaaaaaaaaaaaaaaaaaaaaaaaaaacactgatactatttcatgagctgttgaattttaataatacctgcctatgcttttcttacaaactcagaaggaggtcacattcctagcagccgtctctgttttcaggctctcgtggaccctgttctaccacactgtagctgggtgtcactccagctgtgacctcagtctagagatgctcagagaatctcctgggcctggatttcaatttagactatactactcattaggtatatggttgtgggatttttttaaaaaaaaaactccaatgtgcctcagtgtccttaaaacaggcaaaagacagtaccatcttcatagggtcaaatcatgtggttgaacaaagtcatataaaactaatgcctttgacaggaacaatgtgatgggatcccattatattatctagcctagtgataccatagatgccgtagtttgtgtgtgtgctccctgcatggttccttggatggttaaatcacacaattatgtatttcttagaatgtgtccccgtgctgtaactcatgactgtgctaccaaagtttataccttcaccttacacttacttttagtatttttaatagattttcatcctgagacatgacatattaatagagttcctgatacatgctttatattaaaacattatataataccttcttgtatagaggattagtctaaggtgcaattttggcatagtctaaaaaaaaaaaaaaagccaaaaaatgttagctactaagcaatatggtccgttcatgcactgtgaatgcagtcagatttaggctgtcgagagtgcatgaggataaataggatggtgtttttgaagaccatggagacattcctgcctagaaggaagcggtcatggtcccagaagagtgtttgaggtaatcataagataataaactcctagttattttataagtgcatttttaggatggataagaatattaagaaccagtagccaacatcaaagcaaatagtgagaagctggaagcaatcccactaaaatcagggactagacaaggctgcccactttctccctacctagccaatatagtatttgaagtcctagccagagcaattcgacaacaaaaggagatcaaggggatacaaattcgaaaggaagaagtcaaaatatcaattttttcagatgatatgatagtacatataagtgaccctaaaaattccaccagagaactcctaaacctgattaacagcttcagtgaagtagctggatataaaattaactcaaacaagtcaatggcctttctgtacacaaaggataaacaggctgagaaagaaattagggaaacaacccccttcacaatagtctccacataaaaccagagacagtgaaacttatagaggagaaaatggggaaaagcctcgaagatatgggtacaggggaaaaattcctgaatagaacagcaatggcttgtactgtaagattgagaatcgacaaatgggatctcataaaattgcaaagcttctgtaaggcaaaagacaccgtcaataagacaaaaaggccaccaacagattgggaaaggatttttaacctatcctaaatcagataggggactaatccaatatatatatataaagaactccagaaggtggactccagaaaatcaaataaccccattaaaaaatggggctcagagctaaaaaaaaaaaaaaaaaaaaaaagaattctcaactgaggaatactgaatggctgagaagcacctgaaaaatgttcagcatccttagtcatcagagaaatgcaaatcaaagcaaccctgagattccacctcacaccagtcagaatggctaagatcaaaaactcaggtgacagcagatgctggggaggatgtggagaaagaggaacactcctccattgttggtgggattgcaagcttgtacaaccactctagaaatcagtctggcggttccttagaaaattagacatagtactaccggaggatccagcaatacctctcctgggcatatatccagaagatgttccaactggaagaaggacacatgctccactatgttcatatcagctttatttataataaccagaagctggaaagaacccagatgtccctcaacagagggatggatacagaaaatgtggtacatttacacaatggagtactacccagctattaaaaggaatgaatttatgaaattcctaggcaaatggatgaacctggaggacatcatcctgagtgaggtaacccaatcacaaaagaactcacatgatatgtactcactgataagtggatattagcccagaaacttagaataacccaagccacaagatacaatttgcaaaacacatgaaactcaagaagaacgaagaccaaaatgtggacactttgctccttcttagaattgggaataaaacacccatggaaggagttacagagacaaagtttggagctgagacgaaaggatggactatctagagacttccatacctggggatccatcccataatcagcctccaaacgctgacaccattacatacactagcaagattttgctgaaaggacccagataaggacccagaaaggagctagagaaagtacccaaggagctaaaggggtctgtaaccctataggtggaacaacaatataaactaaccggtacccccagagctcgtgtctctagctgcatatgtatcagaagatggtctagttggccatcagtggaaagagaggcccattggtcttgcaaactttatatgcctaagtagaggcgaatgccagggccaagaagtgggagtgggtgggtaggggagttggggagaaggacttttgggatagtattggaaatgtaaatgaagaaaatacctaatttaaaaaagaatattaagagcatgaagaaagcattctctagtatagattaggatcctcagggtcccccatgggtagagagaaactgtagtgcactaaggcagagtaaggatagaaatggagagaggtggctccccaggacaaaggcaggggttcagggtactttgtcttctccattgatgggaagaataggaaggatggagtggagggtaccagagtccctggggtgtgcaaggaagcaatctgctctgttactgttttgagagagagagagagagagagagagagagagagagagagagagaatgtgaactgtggcatgaccccatatctgggcaagaggtcctggcccagcctgtcatctcatctctagatacagactatataagatggactactttctgtcatgagtaagttttgaagggacacaaatttatagaaatacaagtttaactgtggtttaccaataagaattgaacttgcttgcttgcttgcttgcaaggcatttgtggggttctgtctatcaagagaggttacaagtttcctgggtcaatgtcccagacaaaaatggcacctattggaacagacttccaatctaaccaaactgtgatctcatgatgtcaaaggccaggaatgtgaattggggtggggggtgaaaaataacagcttgctttcactttccaagtgtaagccagccagtccaaggccagcactctgcagctcaaagggacatgcatgtgccagacggattaaacactaagggaatctgatatgcacactccggggagggatttttccactactctctaatccaatgaagcctggcctggcaaagacagttggattgaaagagtgactaaatatgcagagtccttggagggcagaatgcagacggtctacaaggcgaaggcattttgccttcagtctgtctggattcctaatatctcctgcagactattaatcatacaagccagactcttgaatctctttgaatcattttacattcaaaattcttcttaccaaaacaaagctacaaaacccagcctggttatctgagttaaatgactttcaaacgatggttgacagggaatatgtgacccatactgaatgtctattttaataactttcaaatggactttaaattaaaaaaaaaaaaacaacagtgctcaccatcatatcatgaaatcagaattaagaattagccaaggacgtattgttcatttcctttcaattacctattaaaacaccaggcaccccaagttttagccgtcagtaatactaatggaaacaaaagaattgtttttctataagacaatttctatcaaattttattgagtgagaatttggcccggagtttacatgtgagtgctaccattttgcattttaaatgtttggttttatgaagcagacactgatttatgaagccatgcctacctggaaccctagtggctttttgttcacccgtatgcccaggttttcccagctttctccggtttcattctcttaacaaaaccatgctgtgtgaaacccaagttttctcattttgttttcctgggatgtgtggatagaaatgttttcctctaagaactttatcctggagtgacaatcgaagccaaattgaagctgtggaacccggctggtagctagactccagagcagttctaaccacaccccacacacctccgacacacgcacacgcacacgcacagacacacacacacactccagccacatataaatgtctaggtttgcttccgacagaaaatttgagaagtgaacaacgtctgagttttccccagaaaggaaaagctgagtgtctacacctcagggcagggagggacttgagacccgtaaactctgcattgcacaagctcaaaggctgggctggtgtgagagatcagatatttagccaggtaggtagaatgggaccaccaatctgtcaccctggtaactgccaacatttccaggacgccaaaaagtcagcttttaaagcagaacctctctggtgctggttttgttttgctttgttttgctctgtttcaagatttcttaatttgcctctgagcctccaaggcaatttgagagctaagttcacatgccaagccaacagcatataaaccgtggaccaacagaccaaagggtttcactatcacagacctttctacatctgatctagacacacaatctagtacccctcactggagaatgttccataatgcttatagcttttatctcgactaattagttaaaaaaataataataaccacttggatgtcagataatgttaaggagtttgagagatgcttcaagtaaaaatttccagaaggaacaattctccaaaaatgagtaacaaatttgatgaccttgaggtgacacacaatgtacacacactgcaatgatgatggtgccgtcctctgtggattttggcactgggccagggtgggcttttccctgaatggatttgcaggtctgcagatactgcggatgttgaggtaaaagtgatgtgaatgccctaatgacaacctgagagcctgaactctctgtcacttgagctcttagcatctctgcctgttgtcatcaagaccgccatactgcccagggtatgtgtctcgagttttaattaggaaaattaaacttacaatttacctgctaaattaaacagtaaatttaagaaaattcaaaaataaaattaaatacctaccagtattactactataaaaaacatagtgacacctactaaaaggtaggtgtgcttttcaaaagtaaggttcacatttgttgttctttggatacaacgtttacctttgccttacatgatgcgtggcgaagaagggggcctcgacgagtatcaagggaataagctgaaaatgagtcagctcctgtgactggaaagacagatgggtagtgactattagtttatggaatgttatcaatttacttccattattggattttatcataaactaagactgcagaaacccaagttcaagccatgcatggcagcccacagtattcaatgccagcacttgggaggcagaggaaggtgggtctctgtgagttcgaggccaatctaggctagtgagactctgtctcaaaaactcgaaacaaaacaaaagccaaacaccagggtgcaaatcctggctatgtgggatcattgacaaagttattaaatctcccaaaggcttggtgtttgccatctgtaaaatggggataataactccctaacctttgctagtgctgtgagccttttacataaatcaaagacagtagtgaatctgaaggtagcaggtaaactaggaaacacacacaaatgtacatttatgtcataatcattagtactgctaatagcagtcttctgggactctgggacctcagccacccaaatcctgccaaaatgaaaactaccacaagccaccacaagtcacatgccacatctgcatttactcttccaaatagcttcgattttatagtaattataaaataattcatcacattttgtattttgtcaccacaatgagcaaacaaagacatgatcacaatttggaaattagagagtgctaatctcagaggaaatgcttttataacacacaaacacacacactcacatacatgtgtacacagatacacacactcatacatgcacacactcatgcattcacacacacagagacacatttgtttatacacacatacaagtgtacacagatacacactcaggtgtatacacacacccatgcacacatgtatatacagagacacactcgggaggcatacagatatatacacacatacacaccgaccaccaagtaccattttagcactgaaaatgattgtggtaggtgtgaaaacacacccttaaaaagcagaaatagttttttcttctttgactagcaaactttctgtgacttctcttctactttcttctcctcctccttctccttctcctcctcttcctcttccttctgcttcaatattgtcctcagtgagcttaccaagggggtcaaaaaagtcccattatgtaagacttgtcacttctgttcactaagtcagtcctggtcattaaatgcccaggtctgtgctggcaatcatggggcaaggaactctgattttagcatcactctcctcacccttgtccatcagtgtttatttaccaggtccttatgttcattgtctctttcagtcttgacaacaccctattaaagttcaacctcacctcacaaaggagcacaccgaggcttcaaacgacttatccattttcccaaaggcacacagtttcccacagcattgtctagatacaaaaccaaacccacctgaatctaaaaatctatgctttaagcacctctctgtactgcctgcccaggtggtttttttacaggaattttggatgtgttgggacagaaaccagccgggggatagggggtgcagagagacttgtggaaactcctcaacccaggtttggtaaattacagtgaatctactaacacataatttctaatccatttctatacatggccccattatgctaggcaggctggaatggtgtgtgtgtgtgtgtgtgtgtgtgtgtgtgtgtgtgtgtgtgtgtgatacactactggggatttagagtctttggcactgaattgtgagtatgccaacaaaattccattgcatgcatggtccactttgttaagtaattatttgtgtctggagatcttagactaaattattacacaacataccaataaaattgggctcagctcttttgtaagactgatgttaggggaaagaccaagctcaccttgaaactgccctctgtcacatcaagctctcaagccctatatgataccaaatacctcccaacatttgggaggttgaggcaggcacacacatgcacacacatgcacacacacaccaacaagacactgtaatatgtgtgtgtgtgtgtgtgtgtgtgtgttttatggtttccattgcttttgcagacaatatatatgattatgaaattgctttctttaaagactcttgggagcagccatttctgcccatcctccaggtggccactgagactgcagggtcttctagggacagtgacctgcagcaagtgtctgactaagccggcttcaggcatttgtccttccaggtgttttgctcttacaaaagagctcttccctcaaagctctgagataagatgacaccacacaagaagcccttgggctgcctgaggctcccattttgcaaggtttctcagtctgcctggggtgactggagttgggagaagaaacggaactttctccctcggtgaggactcaggctatacctgaattcaaggccaggttccgttttttttcaccctgaagtcagctcagctccttaacagccattattcaggtttgctcatgagtctttctagagccctttagttgacctcacagaaaaccacaagcagcaagcaccaagagcccacagagaggaatgagatgtacaggctatggcagctcctcctctgacataaacagcataggccatatctgagactgcagtgtaatagtgtgatgcccctccccactccggtttctgatgagctctgcctcactttgagacacagtcagctctgatgagtcctgtcaccccagggccttcaacctctggtggcatctactggccttgcttctctcccccaacctcctcccagacagaaatatccccacacagtcaccaactcattgtgacctttgtgacctgtggtccttcagaccctgcaatattcagtccagctaccgagagaacttgggtggcggaatgccctctgaaacaggtcacagaggaaaaagaaaataaaatcttcaagtgatgtgaaaattcgatgaaaaggaaaaaaaaaaaaaaaaaggaaggaaggacaaaagaagccacaaaaccacttcccttccaattcttgatacaggacaagagagcgtcagactgactaagggaagttcagagaagaactttcacaccttctccagaagaaccagctgaggcaccagggcccaaatgctctcaagaaagaaaaaaaaatgctgatgttgaagacatgtggcttgagcagtacttaacctccccttcctggcaggtgctacctcagagcatcctatagcctgatgctctgaagtctgtgagagggtatgaacattaagaaattggctgtgcatgtgcaaaaatgttggtgtgatgtcggagtctgtcttcatggtggactttgggtttccgtggtttacttagaacagggtcttagtggcttgcactcacatagccttcatagggcctctgccttctgagctctgtctcttacccaatagcctagctccatagagggttgctgtatggaactgtgagctggctgtcacagcttgctgtgagtgaggctctgtacctcaccacatgctgatatgagatgggctcaaggacacgagtctatggggctgggaacaaataacagagacagagatacaaagacagagaaagggtatcagtatggtgcctcgccatagatttatgctgtccaccaggggtgggaggctcctgtaagtttgcaccaaagatgcaatgccacctaaatagattccagtctcttgatatcagaaatctgtggtgaagcctctgttatatccaaagttgtagttaatgcctgatctaagactcactcaaccaaaatgctctggaagatgggctgagagatagttcacttggtaaagtgtttgctgagcaagcatgacaacctgaattcaataacccaaatccacacaaaaataccgggtacagcatgcacatgtaatcccaatactggatatgtatatatatattgtgtatccacatatacacccatatatatatgtatatatatatatacacacacacacatacatacatatatacacataggtatattccctggggcttactaaccagccagcccagcctaaatggcaagttctagaccaataatagaccctgatttcaaaaatacagttgaccttctgacccctataacccataagcatacagatatatgggcatcccctcatgaacacccaccccggacaaacaccagaacctgaacttcttagcaatcctttcgtgaatgtagccagcaagggcagaggagcctctgtggagttaagtgtgggcaggagaattgccacaagtaggtcaagagttgcagaacgatgctacccactactgcaagcacacttggcagaaagggggccggtggagaagatctcaacaggaacagtctagatccagaagctgatcttctccctctggctctatctccagggcttggcctgttaggaagaacacagagtagctggcttgtgagccagtctgccttctttcccctggcctgctgaggttgacatagccctgtgggggccgctgagttcaggctgttacatgttccatgccttaccaccctccagctaaacccaaaaactgtagcttgtgaaatcctgcttgttctgctgagccaagattcagggttcatgtacttactgatcagtggcccatggagctacttccattgtatgaggaggtgaaatcagcttttgcttgaccaggtaaccattgttactgttgctccccacttacttgtctctcagatatttggctcctttactataatggggatactggtggtcagtgtcagatcagcaagtgcataccttgacaggaacaaagaattgaacatccaggaaagacaaaagaattgaaagtctgggaaagataaaagaacaagctacagaaaaggggaaagtcacaggtttgtccttctgtatgagaggagccccaaggcttgaagctggattgtatgttttatgggatcctgggtcttcccatctcccttgtgtgtaaccaactctcccacagtatttgctcatttgactgtatggtcctcctatcagtgccagagtcatcaatattgtcttagagggtggggctgaatctattttagtctttttctagaatccatggaaggctgtgtgtcgctgcatgtgctctccaggaaggaggaatggactttggtggaggctgttagcacgctcccacagagaaatggcatgtcaaaaacattccctggttttccacacttaaaattttgtctttgagctatagcaaaaatattaaaatagaaagtgtttttgagcctctaacattcaggcttgagttaggcttgagttcagatctaaaagaaagccattacccctacaaacacacacacacacacacacacacagagagagagagagacagacagacagacagacagacagacagacagagatagagacagagacagagacagagacagagacagagacagagagacagagaatgtgtgagagagaagttttcttggaggtgcaggatgtttcaagcagaagaaaataaacggaaaggcatgtaccctggtgtggtttggctttcagaaaaagcagccactacaagacatcctccatccacctcctggaagaggctggcatcttgcaagcgagatgtcttgttggacatcatttaacatctcctctctcactgtcctgcaaggggacatcccagaccccctaccccttttttttagttaagaagcatgaaggtttggcctgatcagatagatttgtgtaagctcaggggttactcccttctgtgaatgagcaaatgagttgagaaaccatcccattgaaatctttcatttttactataacgtggcatggtctggaggctctagaaagaacacaccctgcttcctcacaatggagaagcttataagactcagatcattaagatgagctcaaacattctcttgtccctgcggcttccctagaagataatgtttggttcctaggcgaccgtcaggagagcgcagagaacacctggcacagcaggcttgttttattttcccaaagggaggctttcttggtgaagacataagagaaaagcaagggggggagaggggagaggagggaaggggaggggaggggaggagttgtgttcctgtcagtttgtgtctgtgtctacattttgattgaaatattaacaccttgtgcatatggttgacagtaattggtctaggggttattattaatgataataacaaaataagacatgaagtcagacaagttcggaggctccagggaagttggacagttgtttcttatatggtttgacccctagaaccaagttactcataacataaactttatcttttaaagaggtgctttcttcattcttactttctgagacattggtttcttccattcatcattttcaaaactcacatgatggtgacggttcttgcctcaagccagccctgttgggaacaggcatggctgtgccctcgcagcttctttctgatctccacagtgcttctttgaccatggaatggggtaaatcaagaaggcatgggaaaaggtcaactctgatgaccagggtctttaacgcccatttgcagtgattcatgttttagtgcctatctgtgaagaggggggtgtgctgtgcgcgctggcaatttatattcctctttaatggcacagaagagaccacccagacccgatgagagctgcggatgcagactgtggaaaggctctcggtataagcagaaatcagaaatgagttggtgtgaaatggggacacaaaccctggctccggtagtcccatgggtacatgctatccttcatttgactggcatcccctttagagctgccaaagcccctttggatttttgtgtttgtctgtattctcagctgccaatgaactggaaagttcctgacatgctcaggctagagaaagtgagaatatccatcaatagccatcatctctggcctagcttcccagacactggactgagttcctgggacaagatgactaagagagctcagtgggtacaacgggcttgccaccacctaaggacctaagtttgatacccaggccccacatggaggaaagagagaactgccagctgcaagttggtccctgtcctctacacataaacagcaggaaagatccaaactggagagacagacaggactgcaatgttcgggctaggtgatgccagctccaaacagcacgggaagaacaaaatagaatgtgggtctcacaggagtcaaataacacacaggctgagaccctggggcagacacagaagcagacagccatacttctgcatttaatgtcaaaagcaagcaggaccagagggaagcacacactcaggccaagacataaatcagtacaaagtcctcagtgtcaagccatcaagggcaattagagttcacagggtcttctccttctagacagcaaggggaaaggtcagcaaccatcagctcagcttggcctgtgctccagtttacctcatcagactgttgcccccagagtaactgagcatcagagctccgagtcagcagacgggagcccagtgagtgggagggactggagtttgattggggaatactgcaatccaatctgaactgactcctctgccattcactgcccaaatagaattatctcatgggccttattctccttctagggacaaaggggaaaaatgaaataaacatgcaaaccatataaaataggtgctgcgggatagagtagttgcataggaagattgtgattttcttctgcaatgtgattggctacgttggcactacttactcaactccccctggactccaaaggcccctgtttcttaaagctcagtgcttggacctcaacatagatatcccattaactaaagccaagggacaagagaaaggtgagtttaataaatgattttaggaccaccacaacaaactcatatttatggtctcccaaactactgtttttttcctgaaatgtcagcatgggactgactattacacagatttagatcagtctgtgttgttgaagagaatcaagatcaagataatacaatgaaatacaatatttactttttatgtgactttgcttttattggattggacttgctctgtccactgtagcttatctattaaaacaaacaaacaaacaaacccaagtgaaacagctgtttacctcagaccccattgtttccttccaacagcaaacttcaggagatgttttcacatatggaaagtccagcctccgtgcccagagaaatcaaattgtcacccgtgatttgcagttcagaattagaggtgaaagcatgaaggagttggcaggtgcatggtttcatttgcaactctaataaggaggttcattttagggccttgttaaatggacaaagaagaactgaaaccattctgggatagtgagtgtaagaaaatcgttaggccccattctagaatctcaggacagaagtcacagtccatcccctgtgtgtttatcctgtcatgatacagctgaaaatggtggcttgatgtagcgtgcagatctgggatctatggagaaaccatctcattgagtgaatggcttgtgagggaggggaaccagaaacctccctggtggtggcagctctgcccttcctgctacactgcacagacctggaacttttccctttaatgtttatgacactgatgagaagaagagatgttggaagccatcctgatgggtgggtaacacgtggtgaccccggcaaagccagcatcatagcgtgtcaaattagattaggcgttggctactgtgcttgtcacatggtcctaaggctcctctgagccagcaaatcacaacatttacttcgcagacaccatgacctacagggatgacaagcaggcaggcaggcagaccatgcacaaccagagttctttttttcttcaagtgtcaactgtttccttttcgccttcttatgtaacttctactcctagatgcctgtttgactctgtcttcaggcacacccttccaaatggacatctattcatattttaattagtgtagactgttaaaatatgagaccattgcaatataaaacaaaagtttacttgagcaggggaaaacatcatcctaggacctggcagtacttcagaccaaagaaagttgagaatatccccctcgaccaaggtggatgagtcctttcacaacctgttcatgcagactgctgccttgtctgactttcatgaacaccttggcatctcagactcctacaacacaagaagagaatcattcacagtcaaatctaaatctataagactcggtaagtgttttttttttagagatgccatccagggtttagaaaagacccatggtggagaataatgtgtgtgtctaaagtccgcagacctgtctatatttcatccaaaagcatttcagacagacatccagagtaacacttaaccaaatgtctggggcccagccacactgacatatcgattaactcaagagtatagtcactgctctgtggacagtggactgtggaaggatcctggattggaagaaatccttttgcttaaaggggagggctgaggccagtggaactcaggagagcatcacagcttaaagaccaatcagaagagagacagggatctggcacaagagactggcccaatcctcagaatgtcagggagatccaggtacaagaagttgggcctcccaggacaacaatgaggcctcagcatcccatcaaggaagttaccagaacagaggaggtagatcaaaggagttctggcaccaggaaagttcagggtcctctgtagcctggccatcagcttcaggataaacctggactgagggctgtggtgaaccaagggctcctgtagcttctgcagtgcagaacagaaagctgcagtggtcataaataggctaacagaagagaactcctgtgttgtcctgcctgttgtgccagagaaggaagcgcaatgcctgttgctattttcctagtggctgtcggtagaacaacaatttccttattagactatttttctcaaccagtttaaagatgtatgggcaagctggaaatgtagctaatggaacatcatgccaggctagcttcagtggagtccttgccgtgtgggcttgatctgggccatcaccaccttcagcatttgtgatgtagagtaattaacttctatctgatgagtcttagtggaagttgggtaaccacttagctacatctggctcaggggcatctccttggtgcgtacaaaggagtcatgctcttgtctcggctgaacctcattcctcttttctttctgaaagccctctaaagcattgctcacactggccgcaaagtctgctttccttctccgtattttattggtatggttgagctgtttcacttcattttctttgtcaagtgttagctagatacatgtgttcatgcatctgacgtatatttttaagtatacagaaagaaaaacacacacacagccagtcttacgtttgtgtttggctttgaaactgagttgaatgcaaaattgcagctgtctctaaatagaaatgagatgagttgccaagggcttggggtacagatggggagtggcccagaccagtaagcagtctcattccaaagaaaagaaagtgtcctgaaattctttgatccacctttgcagaccctgcaagaataactgaatcatatactatataaaggtggattttatgcatgtggatcatatctcaataaaatataatttactattgcctgcatcaaacagagaattgactacctttttgatcatctattgtacaaagaacttgctggccacaaggcacagatggggttaatggtggaacatagtaggtgggttggggctgatcatagcattcatcggcaaaggccgcatgaaatttcaaggggctggaactggagctgaggagtcacagagggcagatggacctgatatgaaagacaagcattccaaagaacaatccaggaggaaaaatgaggtcttggtgctctcttttgattactgttttaaattttcatgtctttttacgttgtttccagggacagatggaaagaatgctgtctttaatctgttctatattgttgtcgctgaatatctgaaacccaatggtgtgtgtgtgtgtgtgtgtgtgtgtgtgtgtgtgtgtgtgtgtgttaggttcagttcggttctgaaagtacaggtgtctattcctgctcagctgaggggaggcaggtgtgagcagggagaaaagggggcagaagttctgcaaaggctagcctagccccctttctcactccagtgagagaaaatgagtgcagaccctggtggtgccccttactagccctgtcacctttgtcactgtcactctggggacagagcctcaacacgtgctttgatgggactaggcccattccagctgccttgtttccaagtcacaaagtctccctgcagacgatgtgtaagcacacacagcctgagccccagcactgaggcaaacagagagattgttgggaaggcagcatctttttatccgccatgcctttggaggtcatcactgcaaagagctgcctgaactccgcttgaggaaaatgaaaccactttgttttaaagaactagactgagccaggctgagggggagtgtttcctgggcagccatcttggtttctgtgggtgtgaagtgaaaacccttacttcctgcagaaaacagaaaccgaaggagcacactgagcccagtgacctttaagaatggcttcttcagctggacccttgcaggtcagaaaggctttggccaaactgtgcttcagaggccttgactgttcagtgcagtgtcttgaggtggttaacaaacagccgtgctgagtgatgtggctaaacttaacgctagaagaactaaaaagaagctcagtcctgctggggaacagagctcaggggtagagcactgctcagcttctgcaaagcccaaagttcaaagtacctgaaaatgaatatgtgttacgacatgtgtgagtttgtgtgtgtgtatgtgtatatataatatacttgtatgtatattataaatgcaagtgaatatatgtgtctatattatatatgtgtatgtgttatatgtgcatatacaatatatgtatatattataaatgcaagtgaatatatattatgtgtctatattatatgtttgtgtgtgtatatatatgtaggtctgtgtgtgtgtgtgtgtgtgtgtgtgtgtgtgtgtgtataaaatttctttattgaaaggctaaggttgtggctcagtggttgagttgtctagcatacagaaaggccagaattcagtccctagcatcacaaaatagataaatacatttcattcctggagcctgagtggagtctgcctttgcctctctctctggaactgtaggtccctgtggaacaagtcttggagcatggacatgcaaatagccttgaggtcccatcaacctgagccatgctctgcgctgacttcctgagccacagatgccaacagtacctgtaagatcttctgacggtcattccatttacctcaatgctctgagtgtataggaaggaagtctgggctggtgtatgcctttatcctttggtgttgatgttattatttggtccacagtgtagctttgtgtaacacgtatctaaatatccacccctgccccacccaaagagaggaaaaaaatatattatcttccctgaaaagaagtgatttctcatagtgaaagtttttaaacatccactttccagatggatcactttgttaaatgtgaaaaaaaaaaggaaaataaagttgaaccatgtgaaatggtctctgaattctgctgcttactagactatttcattccatcttacggaattttatgataaaatatcagcaagctcataaagaaggctgttttaaggtccgtaatctttctaaccataacaaaaggggtggtaactatattgtacaaggctgcgatggaaaaatgtgctaaagtatttccataaatcaaatgtagcactttggcattagctagaaagcattaaactttagcagattagaaccagatgattttaaaatagaaacttacataacttgatggtgtgatttttttttccctctccccagcacaaagtttatcttcatgaagttaccttggctgctctgtaataggtatttaagaagtaagggcagtgtctgggtattattcatctttgtggctcccacggtgcctactgttatgtcgagcagttgggattggtggaggggagaaatatgaaatctcagaggctattaacaaggacaaaataatcggcaaggaaatgtgatactgatggctaaatggctttgcaggtgcacaagccgctgccccccagaacccagctgacacagtgtcttgctttccctttcattgttaaaagtttcctctccataaaccaacaaatctctgtcaccatgttctaacgtgctgtcaccctgcaatttcctaatgcctgactctcctttctgtttcagccacctcagtggtcacttctccctctccttattacacagtgttaggatcctatacctccaggccaggcccaggagtctagcacaacacactgactgggtgtctttgattgtaagacttctgtggaaaggacgcacaaagtgcacatgagtggggagaggcccttgctctctggtagagggtgagtgcaatgaaaagaagccaggtaaagattgggttaagggagaatactttctttgtctgtcttagttagggctctgtgataaaacaccatgaaccaaagcaacttagggaagaaagtgtttatttcagcttaaagtttcccatcaaagtccatcactgagggaagtcaaagcaagaactcaaggcaggaacctggaggcagcaattgatgcagaagtcatggaagagtgttgctaactggcttgctccttctaccttgctcagccgggtttcttatacaaatcaggacatcctaagcaggggtgggccctcccatatcaatcattaatgaagaaaatgccccacagctgtgcccacaggtaaatcttatggatgaattttctcaaaatccctcttcccagacatgtctaggtctgtagcatgttgacagaacccaaccagcatgttgctgtatgagttagatgatcttggagcagacttcaggcatggctgattcaggagacgcagacaaggtcaggactttccattcatttgttcttagtctctgcttcgttttgcttggagtatgatcctctctccctataaacatgttacgaagagaaaagggtatttactgttaagcatagtatatgatccaaagatggagaagccttcttttcatggtacatatacaaaatctcgaagacgacctcagattgattttctgactcatgtgcttagttctcagataaatcactgtggacgagggggtcaagcctctgcttggccagacctgtgtggtgattagattaagtggatggatgagaactggacactaattgcatatgggaagttcaatccgagtgagggtttggctctaggtgcctaagacaatggtcatgtcaaaagaagagtagctttaggtgaactacatccattcaagggggttttagatttgtgttattgtgaggagcaaaacagctgctggtgatggtggtggtgatgttgcctgtgttggtcagcttccactgtaacaacacctgaggtgattaagttgaaaacaaatgtttgctggggctcagcgttttgaagttttccatctatagtcagttagcctcattgctttagagcctgtgacaaggtagcacattatggtgggagtattcggtccaggcaattattcaccactggactgagtaccaaacttagaaggaagagattggtacaccataatctctttccagtgatccaactcctatctgctatggtccacttcctatagattcctctacctcgcaataggcaaatggttctcaacctccctaatgctgtgaccctttaataccgttcctcatgtgatggtgaccctcaacagtaaaattaattcactgatacttcataactataatattgctactattatggattataatgcaaatatcttatatgcagggtatctcatatgtgtccaacccacaggttgagatcctctggtctaaagcataattgtttggaagaggagatggatagagacagagacaggcaaacagacagaaagacagagacagatgggggattctaactgtgttttaaggaatggcacacagaacaaaatatgcagcataaactggcacactaaagactcaagaaagagctgccacactgacgaagcagctgaacctgaggtcaatggaggtagaatttatcttccttggaaggcctcaacctgttttctgttgaccttcaaatgcttagatgaggtccactcgtgtgatgaagggtcatattctttatttattgtctactgatgttaatgttaacctaatctataaaattatccttatattagcatctagtatgcaaatttgttttttaaaaaaaatatctggagacacggcctagccaggttgacatatagagctaatcacaacgtttgaacacgtagtgcttaaaagatgtcgctgggatatctgggcatggtaggaaatgagtttgtgactcagaacctatgttgtgaagtgtggttgttattggaacagaagcaagaggataaattgcaggagaggatgccctagagaagagggggcagaaggcaaacacgctgaggaaatgcctgcctgaagagaaagcaggtgggaggggataaagggatctgctgtccatctggaaaccggaaggtgcatctagctcaagccagaggaagtgagaaggcaccaggtgcagagagaggtaaagcaaacggagaagaccctccagccttagcatcagagacgttggtggctctcagtggaacatggcccttccagtgggccatgcaggactcacattgggccacgtgctagacagagccactgtgatccaagggcagaaattaagaatgtcctcattctgaattctctgaaactctgagagccatcctacaggagccattttatacgggctgaaatgattcttccctactgtcctggttataagcttgtgtttcgcaaacctttctcatcttcttgttctagtaacataaacattctcactgccctaaatgttgctgcttagaaagactgcaaatggtagggacagaagcagaggtgctgggctagagttaggagctagcatgtgagaccattcactctggctacagagactggtgggcactaaggaaaggttggatgccatagggagactctggagactagaggatgtattcagactgccacaaatagaatatacaaaattctagaactttgacttggctcacttggccacaaacccccattggattggcacaaggttgtgtctccttcatttcctctacaaatcctctgaaagacgaataaatctactcatgagattggcctctgaccccatgggagcaattgcaatctgggataataaggagcttctctcaggggtggggatacctgaattgatctggggcatgaatgactcgggaacttgaaaggaaagaattcaagagctgtctggaagaaggactcttattctgacaacaggagatatataggtgatggcttttgagtcattccttcatatggcaggttccacgttcgttctccattcaatcagctgtggaactgaaaattgtgtgtgtgtaaggggggaaaggatgcatgtctgttaaacatataccgatgtttttacttgtgattatcccctatataatgtatttacatagcatttacattgcattgggtataacgtatgagctatctagagaggatttagagcatacaggaagatctgcatggactctctgctaatgctagtgcattctcatacaagatatttgagcatccgcataatctgttaaccatatgaggtcttataaccaataccccccacctccagatactgaaggaaggacaactatataaggtgatttggggctggcaatttgggagttgtggcttttgccaccaaaggtcagcagaggcctaggacttgcttctagtcactcccttctgcccttcctaagaccagaagctcaagtttagaacatgagtcacaggaaccgcaaggcctcaaagttcaaggaagcccctgtacctcctacttgtctgcatcttcagtgatgaaaccacagagcaccaagacttcagcaaattaaaggatcccatactctgtaaacctcagtggtgcacaggagtaagtccgagcagctggtgcctggtcattagcacagcctcccttcagttttgcatataaagaagggagctgccccttattactcagcttctgtgggcagaaaggaatgtgtcacccatactccactgggcaagtagcaggtggaggctgttgcccctgccatcgcctatgccctgggccgacacctgaccagcatctttccatcagatgaaataacacatggcctcttcaagtgaatcaaactcttcagaagctaggctgaaactgggctgtgctgtgctgtgctgtgctgtgctgtgctgtgctgtgctgtgctgtgctgtgctgtgctgtgctgtgctgtgctgtgttgggctgggctgggctgggctgggctgggctgggctgtgctgtgctgtgctgtgctgtgctgtgctgtgctgtgtgtgctgtgtgtgctgtgctgtgctgtgctgtgctgtgctgtgctgtgctgtgctgtgctgtgctgtgcttccatcccacattcttcccctcctgccccctccactgggccctgcgtggctgggattcctttttctggctcagcagcagctgctgacagtgaattaagctaggcaaacaggcctgaggcctttggatctgtggatgtttgatgctcatgtggggatataaggagggccttctctgaggattagagcaggtcagtttttttggtttctttgggactgctggggagagagatatgcctcaaacccataaagaaatagctaagtccagcaaagtggtcatttgggagttcagctccccgcgcccccattcacacatacccttcccagtattgtcccaacaccacccatgcctggagttgctctggatgttagatgctgaaagtgactggcaacagcctctgagctctggaaatggcaaaactcttgagtacattggaaacagacagtcccaccctggagccagggccctgagtccatagtttgttcacagacattgggcagatgaaacaggagaatctctggggctcgctggccaggcagcctagtccaaaacagtaagactcatgtcctattaagagaatctgtcaggctgggcagtggtagtgcatgccttcaatctcagcagttggaaggcagaggcaggtggatttctgagttcgaggccagcctggtctacagagtgagttccaggacaggacaggacagccaaggctacccagagaaaccctgtctcgaagagagagagaaagagaggggggggagagggagagggagagggaaagggagagagagagagagaatgaatctgtctcaaataataagatagggactagagagctagcatagcagttaagactgcatgttgctctttaaaagagtatagttcccagtaccattttgggtgactcacaactacctgtaactctagcttccagctgtggggcatgggaaggatccagtgccctcttcggtcctctgtgagcatccacacatgtagcatatatatatacacataaattaaaattttttaaaaaattgaaaaactaaggtagatgacccctggagatgacacacaggatcgccctctgacctctgaacatacactaaatgaggcacataaacccacacacatagacagataagtcaattcaattaaaaataggagaaagtgggaacaaaacacccatagaaggagttacagagacaaaatttggagctgtgacgaaaggatggaccatctagtgactgccatatgcagggatccatcccataatcagcttccaaatgctgacaccattgcatacactagcaagatttcgctgaaaggacccagttatagctctctcttgtgagactatgccggggcctagcaaacacagaagtggatgctcacagtcagctattggatggatcacagggaccctaatggaggagctagagaaattacccaaggagctatagggaactgcaaccctataggtggaacaacattatgaactaaccagtacccaggagctcttgtctctagctgcatatgtatcaaaagatggcctagtcggccatcactgcaaagagaggcccattggacttgcacactttatatgccccagtacaggggaccgccagggccaaaaagggggagtgggtgggtaggggattcagggggtgggtatgggggacctttgggatagcattgaaaatgtaaatgaggaaaatacctaataaaaaaaattactgtcatgtaaaaataaaaaaaaaatttttttaaaggagaaagagtgtttaaaggaattgccttgcaagtgtaaccctctatgaagggttagcaagcggtagaaacacatggattgcctttatcgtttaaaaggtgtcctgtaacattgttgttatgtgggggccttcagagaaaacagctcagtcctgtcatgggcttcccatttatttggtactggaagatcaccttgacctttgtaaaagtccacaatctaaagtttccacctaccctcgggagggattgccacagcagtttcatataacaagctggacaaagtaaaactcgcaagagcagaacacctcaaagctagagaaaacaggcgtgcacctttgcctggcagcctgcacatttttgcttttaagccccttggtccatataaactatagtaatgtgaacctttgcatattttttggaagacaataaatgtaaatctttattgcatgcttctatatttttcttacgacttcacccctcagttaattccctcaccgtttcaaagaagggaaacactaagatcagagtggaaccctgcaattgcttgtcatattccaccagagttgagtgacttcacttagtgtgtaatttaagctgtcagccgtccttagttcttagggtagagaaagggtgtaattaagtattcccaggttaacagcgttgaacatcagaacttcacagttgtggggctttacaccgtaagtctagatgtcgcccatgagtcactccacttaccacggcgtgcccatgtttacggaaaattggctggaactaaagtattcaactctaccactgcattctggggacagaagttagaagtgagggaggtggtgggttttttagaatactctgcagtgtcatgtggtgaaaggttggctgaacgtaagacctcataaagtcatcccagtgggcagctcatttctaccatagcacgcacactgtaagaggacgcatttccaattcagagccccatctggtctcaggtggcttagcattgagttaggaagaaacgaagtctaaagtaacccagggatcatgacccaacaagtctttttaatatataccaccctcatctgcagagacaaattttcaagaaatatctccttaccaacctcttcaggaaatgtaatttattcctagttctctgttgttaatagagtgtgctggtggggtgggttgagtaacctatgacccacaacgaatattttaagtacattgaattggttggcactggtgacagtggcctgttgggtccaacctatagagaaaagaaggtcaaatggtcatgattgcttcttaaaagaagtagaatttggtaactcatgaccttagccatagctaaggaggagacacagagaaagatgggagcctggaattggagagtataggcagcaatggattttctagaaaatgtttcctgaagagatggactgcaagctggggcaagatgagatgcaggtaaacaggatgaaaagaatgaggaataatgaaaggagctgtgtgtgtgtgtgtgtgtgtgtgcacatgtgtgtgcatgtgtgtatgtgtgtatgtgtatatgtacatgtgtgtgcatgtgtgtatgtgtgtgtgtttgtatgtgtgtgtgtatgtatatgcatgtatgtgtgtggtatatgcatgtgcatctttgtatgtgtgtgtaggtatgtttgtgtatgtgtatttgtatgtgtgtatgatgtgtgcatgcgtttgtgtgcatgcatgtgtgtgtgtttgtatgtgtgtgtgtttgtgtatgtgtgtgtgtgtttgtatgtgtgtgcatgtgtgtatgtttacactatttgacagcatcaccatatgcctagtcctccactgagctgtagacttacccttaaagaaacaatcagcagggctcagataattgtgctgagaagaagcctgatgggcactgtcgctcttttgtgagggctacaccaacccaggaaggagcccgcctgggtttctattgtaaacctgtcactcatctgtcctgtaacttcgtgtgaactgcaaacctttccggaagtttccatgctgtaatacataagctaagaacaatccacctcctggattcggcccacaagacaaatgctaagggagacaatgtctgtaaacaactactgtaaaaagctctggggaaagtcattgtactgaaagagaagtctcagtggcttgtctttggggggttttatagacgtgacatagaatggaaaagcatcatgggcattatttttttgagatgatttcgtatgtacagatttttaaataagtgacatcaaactagaagtagtattgcatagtcctagcatgcctctttgttcagcctgctttctctggtctggtcttcagccagcttctgggttgtttcagctgtagaaggatctgaactcaaaaccagaaaagtcttgtagcattttagaacataagcggcacattttctgtggagaggcagatgatagtattttatttgtcatacctgtttgatttttgtgagatttgttgttttgggagggaagagagggtggtctcagctcacccattctgatcttgaagttaccaagtgcttctgggtgagctggtattatagacatgtgctaccatgcgtggctatagtattatcttataataaatacgttctttagctttgcgctgtttaccaactcagggtcaaccactcagccccagctttgcaactcaacagattgtacataaatatgccaacacaactttctcgtatagacaacacagaaatttgaattacgcctaatttttacatctctcaagatgttattcttttgcctcctcccaagccacttagcaatgtgaatgctgttcctggctcacagagacaggactgacagcagcctggcattggctctgaaaaggcgcatcctgtgtctatgctaacaaatgagacctggagggtgttctcagacataaggattttcttctatttctttcctgggcactaggccgaacttggaggtaaacatgtgttctctgaattacttcctgatccacagggcaatgacttaagtacatacagggtataaagagacagagagatcaactagccatcaccttgttcttccagaacccacccaaagctgtagaaacagacgtcaacgcaccatcagcatccaaacacggaaaaggcacttttaagagatctgtgttccaagtacaatgggagcacagtcaggggaaggagagatttgttctgaaagggcgaggtgggcagggcgggggctgtggaccagcacacacaaaggcattagtgtgttgagctaggcctgatagcggacaagcagccagagcattctctgtagaaagacccatctgtgcaatgccagtaaggtataaataagcctggggtgtggaggaaaaaaactgaaacgaggattggcgaagttctcattatagtccacaccaaggtgtctgcttcctaagatgttagcatatcgataagagactgttcaattccatctaaacgccatcccctctgtcctctgggaagggaactggtagtaacgctgaagatagagagatttcgaggaaggaaactaaagagaaatctctaaatagagtggagagtcgggagagtggcttaccatacatatgactagtaggatcacacccagagggctcaaggtctctgcgtgtcagctttgagttctctttgctgattccccagggggctctcctccttgctcatgggctctagttccttcacccagacaaaatagccactgggttctgcctgagccacaagcagttccagtatttgcttgatttccatgtgtgctctgaccaacgtccaatggctactaataaaatccctcagaaagcaccgggtgccatttccctgactcctggatgcagtagggtctaactgggcatggctttctccaaagaggcacctactcgtaggatgctggtgagcgtgggttgggactgagcccagggtccttggcggttctggaaaggtaccaaccaacccactggtttcctgaataatttaattatataatcagtttttcatatttttcacattcagcgtctcaggcaatcaatacagaaagggctattcctttatttactgaatttgtgtttctccaaaaggtttagagggagcataaccaataaaaacaaaatgacttgtgttacttaggctgcactgagatcacagcatgataataagggcaaaaacagggaaattgtttttttctcaaaattcttagatggcttcctatcacactcaaggaaaaccctagctctcttccctagcaggtacacattattatgtcctcattttataaggctagcattgcaaagttaaggaatgtgtatcgatttgcctgataggaatcaagccatctaccctgagaagacaatttcacaaacgcctagcacaggctttggcaatgttgaggttgaatgggttagccttgctttaatccactcatctaagcatgattcagcctggctgctgaagaagtcaaaggaatgctatctctgtctcctggggaaccaggacaaatctagagagaaagatttgacttgtcctacaaacataggtccctagtgtgaatcttcagggctgccaggatgatcctgctaccgcaatctgcttcgtgcctaatctgtgtacaaaagaccttgcgaatcacacaggttcaattcggctttgagatcaggaagtaaaagccatgacctggaaggggcctgaaccgggatgtcaacttcacgaaggtggccagggacatcttgtagagcaaactccaagctgcagccaaatgtggattcaattgtcaatgtaaaccctaccccacccccacccccacccccacccccagaaaccacttttatgcggcatctgctctcctatgcttttggcttaaatcatttattttcaaaagttttaatccattggaaatttagaaggggattggggaggcaaaactgattctggactaccttagtcaggaaagaagtaagagctgattttttttttccacccgagtcgtgcagtctggctggaatgcatcccaactgggggatagtcctgaatactccaagtcctgaggcccgaggaaaagaaaagcctgtcttctcctgagtgattctctttctctatagaaatctcagaatggaaccgctctacaaatcatgtcccgcgctctgcctgaaagaggctgttcttttttttttttttttttttttttttaaaccaggcttatcaaacagaagcgttctccctgaataataagtgtgagtgggctaatgggtcatttgggggagagaggtcaaaaggaaaaggcctcggtgttcaaaagcggaatctggcaatgccagcggtcaaagaggagagtgctggctggacaggcgtgatgtatcgggtgtgttctatagaacctgcatgggttcccacctatcctttatcctcggaggtcctagtgagaagaaccgggaaggcctggtgcttatgagtgagttccttttcattgagaaagaaatgttttccagctcctagcagactgacttagcaaagtactttgaacacttgggggtgaggggagcagccacagaaaagggaaggggaagagaaaagacagggaaagagagctatcagcaggggtggttagtaaaaaaaaaaggggggggtactggagacagaaaaccctttgttcctccagctcgtttcatgtagagattgtaaggtgaatggctttgaaatgaaatgggtttatgaactagttgctaggtcacaggaagcgcgatcgtcagactgctttgtgaattcggattctttaaaacttaggttactctcaaaaggaacgtacctcctttgtctggttcctatgtctttcctctttatatttttatttctccgggtggctggggccgcctccccactttctgttttctcctccgcccttttgataacgtgaaaagaaatgatcgtattacacgctctttgtcggagggtttcagaagttagaggtgggcggggtggaggcgttaccttcaccgccaccagcagccaatggcggcgcggtatgcaaacgaggcccgcgccgtgctggtctggatctgggctgtgagctcagagactccgcagtgcgcgggaggcgaaggcttctcatttccatccagcccagcgctcaatggaggggcggactctgcagtgcctcactcactgtgtgattcgataggaccagggctcatcagatcaccgccgagatgaagtacaaggtaagagtgccttgtacgccgtctcctgagaagctagaggcagctgtgccggccggcgcctttcccaccttgacaactgggcagggatcccttgtgtgtctggttttgccgagctgcgtctgatctcgcttccaggcttcccccgggtgtaccgccagcagacatgcgctttcagatccactagttcttggtgcatggttctgaaagttgttgtgggtggcggaaggcggtggagtagagttagcataggagccgccgccagagatcagagggtgtctaactcgcctcgcagcaggcaagtcgcaggtctctgcctgaccaaagccagcttggggagccataataaggagagtcagaactgctgagtctctgacaggttctaaaagcaccttttcagatttttgccttaagcacttgatctgggaagctgtctgctcgaggtcctttcggtagaagcagattaaaaacccagacactatcataggcgcgatgatggagaattcccacatccttatgaataaatggctgttagtcatttctggataactctttattggggttgaacgggtctgaaagtatgaaggctccggctggcttattttccctgacgcttacagaatgtcctgctcataattttggcagctctattttccactgcattttgcaccacggtttctggggttactcttggcaaaatgattatgccttgctcagcacatcccgtctaatgaggcagtttccaagggacttggcccagtagcagttcatggcaatgacttggcggtacttacttacgatccttttttttaaaaaaaaattttttttttaattttaatggtgaagagacatgagtcctcgacttttaaaggactgtgtcatttcaaaaattcgttttggtaaggtgacttaacagagccagttaactgacttagctaggggctaacttggcttccctctgcggtatgtagcctctggcccttcctttgggatagaaggctgtagctaacagccactggttccctgtctataaatcttgttcaaaagctgtgagccaaagcatgagtgatagttgttggggaagttccagcagtctaaagacccagatatctattgtcatctcctatcagctttccatttcgtacatctatggggaggggcagaagaaaggaaagctctaggagtcagtcagaaatgatgcagctttctacctggcaggaacagaatctttttggaagtgatggggatacatggtatcaagcctgcaatgttgtttttttttttttccttcccattctccctgttgttgaatcaagacagtgttatagagaaaagagaaaggattaactctgtccatcattgggacattaaatagctggtgtgaactctgagtgctgtagtctagaaggtgaggacatgtgacgacatctaaagtcactttggttcagtgacctcatcatgtttcgctttgctctttatggaaagaaaatatcatggggactgatgatttacactgcaggtgagaaactgcaactggggaatgctttccacttggctgagtctgcccagagttgaacactttgccgagcaatagaaatacatggttatttatcatcatcatcaccatcaccatcatcaccatcatctcattattattgtagacaacttcaccagcaaaaacgctatgctccccaagtaaacaactcacacatgggcaccctgagttgaccatagcagaagcgagccacttttccctctgtcataaagtctatttagctaatgaaagataactgtctttcaggagagaattagtcattctgtgtaggagatgctgaagcagaggcatgatgggtaaagcgatacaagtccgtcacacttaactctccccattagctccgaggcacacttattttcccaaagtagcaactgtggcacacagaagttaaatgatgggttttttccgacacaccaactgaggagcatgggattaaaagtgatcttgatctaatactggtgatttaaacactaccaggaaagggaaagcaaaccctaaaacagaaatcatctgtaactccctaaaacatccctcagaccagtatgttctggcctcagaaagttcagaactattccctcccaagtattctcccaggatagtcagtcttctattttgtttcagtggtaactctgcaaactgaaatacgaagttggcatttatttgtttaattggagctacttaagtagtaaaaccagataattattagattgtaaaacccaggagtctggaattatctcttaaacactatgttgcacataaactataaatttagcttgggcttaaaaatggatcattgtaagatttataagtcaggcttaaaaggcttctctttctttttctttctttctcttttctttttcctttcttttttgtctgttgttaaccagatggtcttgtttagctacttcagggttcataaccagggtgcaatcaacttccactcagtttgtcctcaaaatacacagctcgaggcagccagcaattacaactatgagggctgtggaatgcaagctattgctttaggtaaatctttccacttagtacacatctagtctgcttttagtttacttacatttttgtttgttcgtggaaagactgtcatgggtgtttaaggttccatttctctgagaagagtctgtctgaatgacagtgaattgtacaaacttcctttgttaagattctacataatgaagccaggcatggtggaacacacctttaatcacggctcttgtggagtcagaggcagggggatccctatgagttccaggccagccaaggctacatcgtgagacctcgtctcagacacaacaacaacaaaatgttctatataaaattcctttaatgtagagcctatgttccttatgcctctatggccttggcttgcctgtccaatagaagatgggaggatatgaaggttgccagaggatattgccctttcttctgcaggtgagggactagttccagtccctcatctttaactggagccctgaaagccctgcccacatagtgtgggcctggaatgaggcccaacctacttcatgcccaggcctggaaggtgttcactaagtgcagcacgtgactgagttcttgcggctgaggcacttttgaggctttgccaagtttcagaacccttaagtgtctgcagtcaaagtttaatctattttctagtcaatataaagaaagggaaaaaatcactcttcaatggtttgactttaaaaacaaggtatagtagaatatggcaatacagtttttaaaacacctatagtctggaattcagattcctgtagtccaattgaatgagagcaaagaaactcaaggaaaagagaaagctacagtcaaaggcttctggagaggaacttagaaaatatttttattttccaaagctgtcttaaaggagaagttatagcagacctttggtttagctgataatgaccatttatacccctttttggtttgatgtataagctttaatttttttttctaaattgcttgttgtgttcaatggaaacttaggtccccttccaaccccaccagctttcaaaatggtgtgtgctgcctgtaaatttaaaagcagacagaaggcgttttgaaaagcatagcttcattatttatggttttatatttacctaggaaacccagtttaaagctaaaggactttacatgtccagagatgaggctttgtcaaaattgcaggtgtcttgataataacatgtttagcacgctgtacaacacaggctgaagccctcagcaaccccttcttcttagaccacacattgtccctgtgcccggaaccttgcaagtgccttcccgtaccctcctccttaccccgagtctcagacaaaataaaacaaagccagacaaaatcctgcctcgacacctttcaaagccttggtagattctgtctctcctttgtgtcggtacaccagggccgcatcttaccttttcaaatgagccctcctatgagtctctaataacagatgcttgtgtggctcactggcaccctgctacccacatgggcatgacaccctagtgcccactccctctccctcttgccttggctgccccttggactcttctgtgggggttcccactcctttcatgggcatgtgatttcaagccagtgtgatttgagtaactactaagtcccactcgtaaagcctccgtatctatccactccataaagcaatcaaagcctaaacctttgtctcctctaacccctgaagcagacctgacttttttttcacccctgccttattcctttagcactgccttacttattaacccctttcagtcaaaccactaatctaaatgatacctgcagtgcagccagttttaaggaagccacattgaatacaaaaggcccatcctttaccgataagtaggggcagagcaacagacaagcccttgttaaaagtgtaatgtagactccgtcagccttgaataggcagggacttggctttatatagtcttgtaatagaaacaagatggagagtggaggaagacatttccatttcttgtgatttaaggccccatgatcttgggcaaattaaactctcagagcctcaggtttacctgtgaatttgagacaatattaactgctttataccattattctaaagtctgggctaatgtgtaaagttcttatctgggatcctagcacagagggagtagacaatgaatcctagctagcctcaactctgagtgtgtcctcagtggatactgaaatgttggtgttggtttcatggcagattatatctaaattccaattactaaattaagcaggttgagtattatggagtttaccacaggtaacggtgcacgtgatggaaataggctcacaggtagaaggagccagcagtgtgcttatagcacacagcccccacttgccagcatcctgtgcttggtttcctcattgttattgaccaacctcgaaattcctgaaattacagagcctttctcctagtgggcactcagcaaatatatccagtgctgaattacaggaaacatctgtgccaacagctttttacaagggttccactggtccacagcacattagaaaaagaatgtttatttcaaatcccacttttgcttctttctcacaatataattttcagttactactttagaccattatcttactaaatagtcgcaagaatattgtaaatgaaagtcattgcttcttagcatatactggcatttgataactgacagctatgtattgcatgatatataatttggatggatggatggatggatggatggatggatggatggatggataaatagacatacatacatacatacagacagacagacagacagacagacaaagatccatgtatactaatgaaatagcatagtagtttgtcacaactaagatacaatcagggccattggtcacagagaaatctgcatacctagacagatatacacaaacatagatacattaacattatacagtaaaagttttaaaaggaatcatcctctacaatagtttcctcttggtaggggagatggctcagtggatagaagcactctctttgcaagcctgaggacctgagttcgaatccccaacactatagaaaaagccctgtggctggtcacacctctaatcccagtgctatgtgggcagggagtatggctacaagagcttgcctgtgctcaatgccaagtagaccagctttgaaaacggtgagctccaagttcgatgtgagacccttcctcagggaatgaggcagacagtgacagagcagaacacctcccagtgccttctttcatccacacgtcacatgtttacagcacatatgcatgcgtgtgtgtgagcgtgctcacacacagacacacataccacatatgtatcacactggcatgagggagactatttacccatacgaaaaggctagcaaggaaaagaaaagatcacgtatttaaataggtgcaacacgtggatagtgggttgggggttatgtgggaagttcacgagcagctttcttcctttgctgcagacccaatgacgtggatataagaagtacctatttttagatcattttagggttagaaagcagtggacaaactgatttggaatgctaactcttaggaccatggcactatcctcagaaacgtatagacttaattaccaagcctctctgccaagacaaaggcaacagggcccttgggaacaaatacaatatttccaacttaaaatgccagagccgctggtttcctaagcaacagcagattacaaagagcaagggtatggaaagaagacaaaaatccccaaagccctgtttagactctgtcaacaacagtccctccatcttgtttactttgaacattccaggcatctccctgcggtagttcttactggctaatgagggctctgcatgccaggggagcggcagtctgctgccagggctcttcctgaagggtttccattgtacgattggtcttattggagatcttttccactctgagctggaaaagctggattttttttttttttaaagagggttcttttaatctgagtaacttgagggttggcatatcatctagtggccatgcaattggtactccaaaaagtatggtgactgatggtgtgtgatagtaactggtcatggctgaggtggggccttggggcagctgatcttgaagatgttgaaattgtcagatgggctggggacacggctcaatctctagcacccatgtgcgctgcctatgaaacctgtgctacagagatgggcacaagaggatccccgcagctttaggagtctggcaagctgggtgaataggtgaactccaggttcagagagatcctgcctcaaaacctaactggcgcacatttgtgcaagcacacaaaaacaactacacacgtacacacaaaaattgccactggactattttcctttatatgcctgggctttaccatatctgctaaattctatatatgcctcgaggcaggggccagtaagttgagagatgtcatatttcttggtggatcttggtgttgtaaattttaatatctcttgacatttctaacatgtcaagttaataaaaggtaataataggtctaagatgttacaaaaaaaaaaaaagagaagtttcttgtgggaaatgctgacgttcctttatgctcaccagaaataaggatggaacaaccagggatgtgtaaaagtgcaagctttgccaaccacagagatgcttgatggctctttttgaaatcaattttaattctttatttattcttatggggagcgatggagggacagggttcaatctgtgaagctcagtggaaagttgcagtcatcaaaaacccatgagccactcagattggagccatgtctcctcctcttctgttgagatgctgtgcctttcgaccgtgtggcatgtccttcatacctgtccttctcttttcctcagatagaagttctctggtggtttctgtattttaatggtcagctcactggtagtagctgatggtttgttgtgcttaatttagtttagtacctcacaggccctttggctgaagcttgtgttggctttctcagccctcatggctctgctccctccaagtaaagatggagctgggcttctctgcctgccaaggaccaccacctcctagaattagcagtgacatgcaaagccatcacactggaatgggcagatgtgtgcacacttggccctcttgaagatcattatctttagcattggtcatctgctgatcaatactgctctttctgtccctggtcacttgtaccactgcttagagcctgacaggaaagtgccccagggacgaacataaacagcacaatccaaaggcctcagctccttgggctagaacttcagtttagaaatatgattctcaggctcagtccacatcaagctcaacgtgatatgtgaatgggacatgggggtagaaacaacaggaagaccaagaagaacgtctcccttctggtcccattcactgggaggtagatttctagaccatatcccagaggcgcagaggccccagaagcatatcctactcccttattagaggtcatgttgtgactcagagaacatttgtctgtctagtcagggcctcttgccatgacccatttttctcttgaatccttagttcaaccaaaattgagatcccttagcaaaaaatatattttcaaggctatcccttttttgtaaaatatatcccaaaataagatatgtcctaaaacaaaggacattatatatacatcatacatatacatacatatatacatatatatatacacatatacgtacatatatacatatgtatatatacatatacgtacatatatacatatacacatacacacacacacacacacacacacacacatatatatagtttccaaggatttatccacatttcacaaaccaaagaaccaaagaacaggacatatggtctgacactgggaaggatatttgagactgatgactgtcatggaaagttcagaaacacatggccactctacagatggccaacatgggctgccccagagatcaatgaactgaacaaggctctatcccattccccttatgtcagcattctgcaggaacatatataagagcattttttaaaaatgggatttggctgggttcttcatagagagtcctaagcaacctctagtcataaataagaaggtcctcctttataccttcgtgcaggcataggcatctttggaaaggaaagcagggctggttttgaagtgtgggcttgtttggcacacctgagtggaggattgagtttcaattgttcttgcttttaaacctggtcaggtagctccttgcctcatagcctgcagcatctctaacctccctcccacccttcttattaagatgttaattacagatacaactcagttcatggctcaaggggaagaatttcctcctctgaaccgtgcctgcttttggtgtggcaggtatcatcacgatgagatcatttctactgtgtagcctttaagtgcaggagtttgtcttgtgcagggaggaggaatgtggttaagacacgattctctgagctcagcccagtgcacgggtagccactcgcatctcatagagcctcttttctcctgaaggaattggaggtttttatggatgtaatttcaggagctctcataattcttgcaagaacttctgtattattccgactgtgcaaatggggaaacaggcattggtcattagtcctaagtacaaggatggagcctagactttcctaatggaatttaatggccatttacctagccagtcgagggctggtctgtgcaccagcagcatcccagatctagattctagtaacagacatgtatacccacactgttataaccaagattgatctttgagcattgaaagtccactggctgggcaagacatcttctactctgagctgctattccagcgctcccgcttgaaatacagaactcccctcccggaagtgtttgccataatttaatcatgcctggggttgagcttaacgtaacagatcttaaccccaaactaacttcctcctataggattagcatgggactaccacaaaatcatagaagcgtaagatctcccctcaggccaagtgtgaagcagcctccaagccatctccatgacaaccacttctcccaagtccagatccatccctgagtctcttcagagtgttggagtatgcatctagacttcagtactaaagcaagatgtttgttctcagaaacgaactttctgaccgctgcccagaagtaatgcttacggtgtacaaatgtatacgcctcttagcccagggtgtggatctatgttttaaaactctttgaggagctcacaggataagtggataataacagcaaagaagtaaactcagatcaagtgactttgggggaagggtttcatgttcccgtgggtgtggttatgtgtggaggaggttagaggtcaatgtcaggggttcctgctcctttaggcaccatcaaccttgcttttttaagtcagagtctttcatagcctagagcttaccagtcaggctagactgattggccagcaagctccaagggtctacctgtctttagttcttcagtatcagggttacaagtaagccacgcccagcatttcttcacatgcattctggggtttgaactcgggtcctcatgcttgcaaggtaaacaatatacaaactgagctatctccctgccccttttcaagtaacttctgaaagagtccctgcaaagggtgattcaggtactaagagaagagaaataaaattttaaacaggagcaggagattccaatccactccgttatatagtgtgcattttggtttttgagacatggtatcatttttagaaatacactatatcaccgagtggattgggatctcctgctcctgtttaaatttttatttctcttctcttagtacctgaatgttagcggatttgtctagacaggccgtcatcgtcatagatgtgatccagtgccagcattgtaatgctggctgaaatccaaaacgttgttttattgttaataaaacctatcttttgggtgagtgggtgtcaagacttcatcattatatggcgcctgtcagatttatctagggacagaaccctaaaaaagagtttgtgcttgcccccacgttttttgatcctttgccaatacactatattggagatcatcaaaaccaggcaacttgggatggatacttataaatcccaaggcttaagagtagcatttctaaatttttaaatggagcagtctcaggaggggcatcctgctgtggggagattttttagagggagatgatagcctagggtctctgactctgctgttgatctaatctatgaccttctggctgtaaaacaaagatacctactgtagtcagttctggccaagctatggatgacaaggttgaaaacgtgtagaggaacctatgtgtgttcgtcttctgcaagtccttggtgccacttaagtatagctttaaggctatgggcaaattgaaaattaaactcttaagattggtagagagctatgatatggtgtaagatgatagacgtagagttaacaatattatcacccttattaaaaaaaaaacaagtcctttttcttgaaagttgtcagcagtcaaatttatcttctatcatgaattgggacattctgaagtcacccatatactaccatatctacctatctacccatctctgatgtttcttattcaaagaaaagatttcttctctgctgtaggcttgctttgaaaacaagtctcatcataaaaccgttctgtcctcaatgtcatttattaaacttctatatcctagtttttctttagtgtgcgtgcctgtgtagaatatgtttgtgaaggtcagaggagaggtttcaggagttgactctctgcttccactataacttctaaggatggagctctggtcgtcagtcttgcttggcaggtgctttgacccctgagctgttttggggcctccatcagtcccatatatatgagaatttatgatagccattgcaatacagggaagaagtgaagccaacattataagaaacatgccagtatcttagatctgctgtctagatcatgtggcacaaacctaaggagcctgaaatttccttctaggatccatatattgaacattaaagtcttagatatcctcacctccttcaaggagaaccattaatttggcttctaaattaccaaaagaacactgggtcacaggtcactcatcaaacaggaataggccagtgtatagattcataggcctgggagctttgtggacacacacagtgctacacaccgggagtattaatgtcatcccctgccttgtcaaacaatacctattggaacctagtatttaatatcatatatattaaagcatttctcagtaggaaagggataaaacagaatgtgattatcagtccgggtcacaacactggcagcaaagtgagagtgtgaagattcatgaaaggtctaagatttgcagaagctttcctgtttaataaaagcactttccagaaaataaaaaccattggtggacaggtggtctaaaggtgttcttcagaggggaatgttgaacacgcctccccagtgggtagaagcttaatgatcagtccgaggcataggagcctggtactgcctttctgtggactgttctcagtcatctagtggaggtgagcagaaagcactgaaccacgattacttggaaaatgtctatatcacaagatactatgtcttctaactcctgcacccaaagctatcatgtctgctacttaatcatatctagtggtttcaaatttaaaaaaaatagtattctatatctatatacatgcaagaacagaagtgtgagccatgctttcaaggatcaagctcttgatatttataaacatctgtcctctcggaccgtggctgctttccttaaggaagacacacacacacacaccacatcaaaagtgcctatgagaggtaggagaggaaatgtaaccaaaatggtagaactattctctgatgagagctgatttttgtcagcagaaactaaggcacaagagctctttttttcttttcgccaagtgtgccccaagtctgaccttggccacgttcgtctctcggcagcttccttcaagcactgatttccttgatgatggccatttcctctagtgggtctgtttctcaggatctggtctcttgagtgcctgtttgtgcatgcatgcgtgcatgtgtgcgtgcgtgcgtgtgctggagtccaccagagacctgtggctaacactagggggttgggcacaggaaagtcttgtcatcaagaatgaggcagccctgaggctttggcaggttctcctgcataaatatagaatgaagtaaaaataataagaggaagccaagccattgatgatgctatcggtcacagtgagtgacacgccagccattgtgtctcatttctcttcaaagaacagcatgaatggtcatggaaactccacgtcacacctctctatattgggagaagcagataatttccctggcagtggaagtaataagctttcttgacattttgatagcagtggggacagtagggtggggggaggggggaggggacaaattgtcatgggaccatggcttgcccgtacagccaggtttgttttgttttcttaattccccactcctgagccatagcttgacgacccaaaacagcagaagcaaactttctggcaaagcctgtgaatgtcactcttgtcacctagcagactcatagtgagggaggctgtttaaagagaccattgtattccatgttgctgggatggacacagttcctcttggccttccnnnnnnnnnnnnnnnnnnnnaggagttgcgaacacacaaatctggtggggtggggggtggctctgccatctgcgtcattgtcctggttaaatagggagggactggcactttcctgctggccgtctctctcattctcaggctgtcgggactgaatgaccaggacacatggttagggttctcattggatgttctttctgcacctccatctgaattaagttttaactaaacgcctcgctaacttctcaagaaaaacaattctacactccatgctgagaaccagtgatgcagaatccagaacccacctcaattcaccagactatgagtgtgcatgttgtttctgacactgggctcacattatggaaatggaaagggggtcaggcagagcatctctgaactaaagttcacagcctgggatggggtcatgcaaaccctgctaaaggaaacagaaaaactgtggagagggctcagcaggtaaagatgttggtctccaagcctaccaacccaggtgtgaccccttaagatccacatggtaaaaggagagaaccaactcctgaaaattatcctctgacctccacctacatgtgcacgaatgtactgcatgccacagtcacaaagacacagcatgatgggcaacagagtaggaatcgatcagatggattttgtaaagacggttattctgtttacatggaaggtgggttctaagcggagaagaggcttaatggattgggaaatgccattccaggaatacgaaataaacaaagaaccagttattgctaaactccacacctgggggggcaggatatggagtcttgacaattccagccaggttgtgaccagtatacgaacctcaggctccctattggggcagctaactgcgtactgtgtgggcaagagagctaaaggaacgggaaaggttctcttgtttggtgggcttgagagcaagatgtcccattagccagagacgtggtctaagaggtagggtgcagaagtgtctactctgcactgcggatccgggcagcgcctgcattcatatgtcattacctgggtgacatttcacttagagagcaatgggataggagataagacaggttgaggaagagaggtccctgtaaccatgactactgaagaggcgaaggggaaatggtctattgatggaaaaggagattgagaggtctagaggagaggaagaaccagggagccgggtcttggaagcatggaagccaaatgaagtggatttctgggaaacgtgaggtgggaatgacaaacagggtcccttttggatgggatttataaaccctgatatccaatctccattagagtcactattactagagtttttagggcagaagccctgagccccgacagcctgagcaagctagggtcagccacctgtcttccctccaccaattcaagagctaagtaattgctcaattctcaagaaaaacatttccactcttcctgcagagaaccagagataaggaggtcaaaagtcccttcaacttatcagagaatgggtgtgagttttatttcagacactgggctcacagtttggaaatagaaaaaggaggcaggtagagttagtgaaacgtggagagaggagatttattcaacatggccacactggagaaaagaacaacagaagggtccagtgagccccaaggccctcttctagagcactggcatggagctgaaatgtaaacagagtctaccctgttggggccctttctatcaactgcaccatcatggtctgtccccagtctctcctgcatgacagtctgacaacttggtaaccttgtgaaatctctacccgggaggcaagttcctcctctgactggcaccagggggtgtacttccctcccctcagcatgagattcctgggggaaataccaatttcttagggtccactatctcaatagtcctttagccaaaatgaggatcacaagtgtggcctcggaatattgtccctcctcccaggagcctggaaactggannnnnnnnnnnnnnnnnnnntgactttacaaatcattaactttttgaacctcccttctcttagttgtcaagtggaagaggtggactcttaactccttgaagatccttctggctttcaagttgtgcaccctgcaccaacccgactttctgcctttgtaactgccaatctgcagcagcttggcatccagctgggtgtagagttacccagcttgctcacttatctctccttgatttgtttctgtgttggctttccctccccctagagataaatatccaaggggctgggggttgagaaagagtagatcttgaatagacaacttctagcctctccctgtgttttcttagatgttcagataagagcttctgactttggggcctcagggaatcacagctttcctataaaggagagaccacctcccaatcccccaccacccccaccaccttccaatcccctcccccagcacacacacacttttgcagcaggaattaactcttgattggcctcctcatgacttactgtcctttggagatagagccctatgttctgtcttttatcttttttactggacccttgacctctcaccaggtaaacatacagaagccacacctcttatctgagactttctaaatttacttttattttccatgtgtaatggaagttctgtctgcacgtatatctttgcactgccttcatacctagtgtcatcagaagccaaaagagggcattggatcccctggaactggagttacagatggctatgagctgccatgtgggaactgggaatcaaacccaggtcttctggaagaggaacaagggttcttaactactgagtgagttctctagccctgggattgtttcttgattgagcaccaagaagggagagataggtaggaagtctgaagtcaaggaccacccaaaaaaattaaataaaagcccacaatggcttgctaagtgtctggcagtctgtatatctttacttggattcacgtatttttattcttgtgacaaactcacagttgtaccgagccacaactctgttcttaccctagggatgaggaaggtaggatatccaaaaggagagccctaagaacacacttgggactgcaaaccccaaaggatgcatttattccataaaatggggtgaaggtaaggttaccctcagaaccttctgatatgctggaatggagcccagcccaggcactgatctgaaagctaagctagcatcccagagagggaagtcaacccagtaaacccaagttctccttccagctctgatacccagatgtggcccttgaagaaacaatggcttgagctcaccagatctgggtcctcatcttcaaagcagaactacaggttcacgagctcacaggctttctacaggggctgtataggagagtgactaactatatgcacatcagctgtctttagataacatagagattaaagaactcaatctcacttagtcaaggctgatgtgtaccggggtatgaatggatgtcagcctggcctgggggtgggggtggagcagtgtgaggtccttgctccccaaccgctgggtcaagttctttctaaatcccattttctctgtctgttgtgagaagaccggagagatgttgtgggcaaggaggcaggagaattcaccagatgtgcccacttttgaatggttgaggggactctggggctatcctaggaacttcccttaggctcctgtgcaggcatgagcctgcagctaaacaggcggtgggaaggtcactgggacagaagacaaaacatatctagcagactcacccggggatttgtatctgtgtctaatcaagcatggcgcaacactccactcagtacctcacggtgttccagaccctggaagaggcccaacagcgaacgcctccagctgattgcggtcgattgagctgcagtcctttgcccgtctgctgtcttctcttgcttctctttcttttctttgaagcctgtttgattgcatagctatcagtcttctggtcccatagggttgcccccaacttgatcacttctgattctgtgtagggacttcctttgctaccatcccctgttcttgaatgggcccagaccagagtcagctcttccatctaagctctgaaatcggaatcctacggagtcccttccctgaggtcatttgatacaaaaaggaccagagtcttgtcctctttaaacctatgacccctttttacagtgatagaacactcaaaggatggggagaaacagagatctaagcatcctggcacattctttaatggctctaaaaactaagcaagcatgtggcctgactttatcgttgtatttgtgagtttttcagcgttagaaggaatccagtgtttcctagtatacaactgctaagtaaaaccttcacctaacacaaaagctccgaattcccttctagctaatctcaaacagatcgcatctaccagtgatttcagctttatcctaagttccctgggggacggctatttgtggctctaatctctcttcctaaaattaggtattcatgataaaagatgattggctagctgcagaggtatgtacctgtagtcccagcacttaggaggctgaggcaggaggatttcttatgtccagcctgccggggcagtatagcaagtgtgtgtgtgtgtgtgtgtgtgtgtgtgtgtatacatatatatgtttaaagtgtatgtctttaaagtatgtatgcttaaagaaaaagaagacttgggagtagttgaccaaggcaagacacaatgaaaacatataccatggttttgttgttgcttcggggggggggggttgcaggaggggggggatgaggaaggaaagttaattgggtagtgtgatatgagaaggatctaagaaaacttggaaaaatatgagcaaaatatatagtatgaaagaaatttaaaataatttaaaatgtaatgaaaacaaaataaattttgtattatcacttcaaaaaacacaaagcagtgagtggaactggacttcctccagcctcgcgaccagaagcagacccctcctctcatacacagcccctccccagaagagtgcgcctcacactgcgaggcctgtggtttcaggcagagtccaggggcaggagatgattaatgcatgtccgtcttaaagaaatgaaaagcatgagattggaagatgaagtccacatttctggagaggaaagcggaggcaagagtccaaagaaaagcagccccgaagtccacaaatatgcgatggtgtgaaataaagtcccaagcatactccggccaagcggcagtccttcgctccgcaaatgactcctcgccacagtgacattaagtgcatccagacgctcgagtgacacatgagaggggtcacatttagtttttccgatgcttgcgctgggttccctatgttccccccacttgtctgcactctgggaaaggggcaggcgtgcgggactggctgccagtatgccgagaatcttcagagcctttgaaagccttccaggaatgtcagcgcagactgcctgcccactctctgctcaatgcctactttagctgtctgccgaggactaaatgtgccagacaggccttcatacaaagacagagagtgttctgagtccatgaaaggaaggcacagcctttcagatgtgaatggcgagatttaagtaggtgactacgtggtggcctactgggaaaggaagggccctcagagaggtgcaagagagacccagcctatgaaccaatgtattcctgccgagtacctctccacggtgggatctgtctagacagactgctatcacactgtgtccctgcttgattactgtagcctatccctatgctttcgcacgtagattcttcctgcatccaaggcctccttaatcataaaagatatggtaggctctgccaaggcacaattatgtgtatgtacttctagttacattgcaatgatgaataaaatttctgtttgtagtatgtgtcatttagaattttctttgactcatttgggggcggggtctagaatatatagaagcattgtggcgtatgagcagctttttcttttcttttttcttttttagtattgagggcagctcactgtggcgcctgaacagcttggaacattcttcccgtccagctgactttgaaaagttagaaaaatgctttgcccagtgaccccttcctaactcgttagcaatgccagcccagctccttggcaaagcacccagcactggagggaaatctcttctgttttgtgctttttggaggagtccatctgatgtcactggtggaagacacagtgtggctgtggctatcttttgtctgaaccctctaagttccttctgacaggctagtgttcatatttcttctctatttccaggaactgtgcctgtccctaaaagtgtgggttgtataagtgctaaaaagacagacctaacactctaaccctgttcctctcttcttcccttcccagaatcttatggcaagggccttgtatgacaacgtccctgagtgtgctgaggagctggccttccgcaagggagacatcttaactgtcatagagcagaacacaggagggcttgagggatggtggctgtgttccctccacggtcgccaaggcattgtcccagggaaccgggtgaagcttctgattggtccagtgcaagagacccccggtcatgagcagcctactcctggacctatgcatcagacctttggccaacagaaactctatcaagtgccaaattcccaggcagcatctcgggataccatctaccaagtgccaccctcctaccagaatcagggaatttaccaagtacccactggccatggcactccagaacaagatgtatatcaagtaccaccatcagttcagaggaacattggcggcactaatggaccccttctaagcaaaaaggtaagtgatgaactagaatgttgttctttcttttatgccactcattgtagttagaataatagaggcaaccccccaaaaaaatacttagaaattgccccaaagcaaacatactaaatggcttaccccagacatctttattacatcaaatttccattaatccgtcaacagcaatttttattatgagacagagtctcactgtgtatatcccaggctgtgtttgaacttgagatccttttacctcagactcccgagtgctgggattacaggcatgcgttatcataccagcaacacaacttcgttgaatgaccatgtgcctacataccattgactaacagccagtctaagtggtatttcattctggatccagtttgagcatacaatcgtgtctcttcagtcaggtgatgagtctgctagacctggatcctgtgtgtaaatggtttgtagtcttatcgacctcttccttgagtagtgtagcccccgtcattactgtggatccttctccctgggccaaaagctaagtcatgaatcagtcatctggctgggcaaagaatcaaaggaaagtagaggaaattaaaaggttgaaaatacatcctatctaccagcttgttcttagagctttgggcttaaagattgatttattcaaaatacacagatactagtaggtttagaattgattcatttcttgtagtaatgtccaagtagacacagcagagtttagatacttaggaaaatgccaagtttaaaaaaaaaaaagaaagaaacatatgatgtattcatcagctttttatcaccattactgaatccttgagacagctaccttcataaagagacaatatttattgcttaatctctcagttttgatagtcccagagcctgcctctggcattagatcagttgtggcaaaggccagctgtcatcacctcttttggtaggcactctcccgatcacctcagacctgccattagcagggggtgtggaatactcagaccatccccaaaccacatggctagggagcaccacaggactagggagcaccacaggactagggagtaccacatgttagagtctcaacccagaacaatttgagttgagtagaaatgcattccttaatcggtgaatattgagcatcttttgtagttttgatacttgtgtgatacagtggtaaactaaagactaaatagagctctcagagcagttacgatgcagtgagggaacagtacaataccaggtaaggtgtgtgtgtgtgtgtgtgtgtgtgtgtgtgtgtgtgtgccaggaagagaatcttgacacttacttacagggcaatggctaagccaacaatgatgggtttttgtgcccattaaaagggaaggctttcctctttcatttgtcagaaagtcccaatggttccttcaaggcttgctagtaagaatagactaattttatacaatgagaaaatatctccagattatccagattataagagtaagggtaaagttggacaccagaaagagcttgagactctatggacacaaaatatagatgaatttacaaatctatgttgtgtcaaatagtatttgctagcatgatacttttttctaagtacgtcttttttaaaagagttatcatttttgttttatgtttatgagtgtattgcctgtgtatatgtatgtgcaccgcatatatgcctggtacccaaggaagccagaagagggagttgggttccccggaactggagttaaggacagtggtaagccacctgtgtggcttctgtaagaagtctcttaccaatgagccatctctccagtccttggaacctctatttattttcccaaggggccaggggaagaaagatttattcttgaattcctcaacaatgaattcattttctaatcatctattatacatatgtgtgtttttaacaaaaacacatctcaagggcacacaatccaagttctgtctgataggagaaattctctgagaagtggtgaagggctttcccacttaagttcactccccaggacagggatcctggctacaggccatcgacagagcatgtgaccttgcaaagcccttctcgccccagtgatttcagctcctgagggagtgccaagcctggcctctgtcccccagagaggaaaagaacagttggaaggtgtaactataaataagtaactctcattcttagtctcggtggcttgagcaacttaaaaatagttctccctcgtctgagctggttcgaggcagacagaggaggccagtacgggaagtgcttggctgaaaggtagagggaccttactcttgtcatagtttattttggcaggaaggtgacatgttttcctttgactcaaccttttcagttccatgtctgggaagcctgatgcttcagacccctcgttccccccttgcttgtgttatagctgatggcgttcttccccttggctctctcctggtctccactgatgtcaggggctgaggccctcaggtggctcgggtccctccgcatactgtttccttctgtgacttctgcacctcagagccttctgtgtttagcaaagggcaggccagccctgaagtaataagccaacctttaacaagccctgccagcccttatgcagtgcagaccaaacaagacactcccatcacctgaagcttgcacagctggcaggggctgcctagtacggactaaagctagaaaggacagggaaggtgaccctagcccttccctgccatgcaccagggtcctctgtaacaaaccctgtgagtgagtcttcgcgccattgagagttcaggtttcctgcttccagtcccttcttccttttctttccctccctcgttcaccgctcttcttccttctcctttgtccactcctcctctcccttcctctcctcatctctccttccttttatcccctcgcttccccataccctcctctccttcttgttcacccactttcctccctctccttcccacttcccttcctgattttctccatttcctcctctctctctcttcccctctcctctctccctcctttctttcttgttaaattttctttcctgatggaggtggtggcaagggtcacctcttacatgactgtaacctcccaggcagtaataactgctttaagaatttggccactggggctgaagagatggctcagtggttaagagcacagattgctcttccagaggtcctgagttcaattcccagcagtcacatggtggctcacaactgtctgcaccgagatgtgatgccctcttctgaagatagcaacagtgtattcatatataaaaataaatttaaaaatttttttaaaaatttaatttgaccaccaaatcccttgctgtagtatagtaactcccagtggacaggaatcctaatgacttaagtcagaccccaatctcagtggccaagagaacagatgtgggttttgtcagtagttattgtttcttatcttagaagttttgccggcttgctaaataactaactcattttctcttctaacttcctgtctgtaaacagtgacaaactaaggcctggatgagtgtccccagtagctctagctatggtttctaaaagctgtctaaggaaaatgaggactcagtggtaacttgttctgagcttgaagaattgaatgagctagtcacccagaaagggagggacatcaagtcagctgtgggttcccaggtccacctcacagcccttcctttcgtgggtctaagagaggaggcccaggagcctaccactctttgcttagttcatcagaagttggcccaggaccatacttagagaatcactaaagagagacaatggccggcttggatgtgttccagtctgactgtgatcgggactttccatagttcagaactcgcccgagttgttacagtgtggacttcagacatttcatcccatacaccactgtgtcccaatgaattacttaaaaaaaaaaattacagcatgaattctgccttctgccttccctttctgctctcctggaaactccagcttccacccaccctcctgcaccccggatccatattaaccgacagccagaattagctgcctgcagaatgcggatagggatcacacgtgcaccctctgtgaagcaaggagaccaggagccctgtggacagagcaaggcttcagttagtctgcctcctaccacagttttgtggctccctgggctcagcaaattacaggtgtcctctcagaccctgcccctttgcttgtgaagtgggaataagcccatttaccacaaagggctgtcgggaaaactaaatggactcggaggcagaaagctcctgcattgcacttaccatcgtgggatgatcctctctcttgcctttctcctttctcaagagttttgtttgggtttgggttttgtttgttttggacaaagcctcaagtgaccccagctgccttcaaactccctaagtagctgataatgaccttgattttctgatcctcccggcgctgggataacaggtgtcttaagcacacacgcccagttttcaaagttcatgcggagtctatggaccttgtgcgtttctcagtatatgctgagtatgtgcgtacttcattctcagccaatgtgctgaaccctctgagtgcacaggtctcttctggaaagagtggtaaagaatcaaggttatctggaaatcttgcagacgggcaccttttcctagtttcatttgtcttcactctgagtcttatatgtagggctgtttcacacatcgggcattgcaggcagagtgcctagggcctgggcaaaagtttgaaagctgaatcaaaacaaaagaaaactccgagccgcagagtatgaagcataagtgcaggatagaaattaatcaacacatagacaaatgcttaggaaggagactcacgcgaggctcatcagttatatgtgggattcaagacagttccattccatttggaaaacagtttgtgagttagagctttctcactctgcagagacttgtaaatatgtgttgagatcgccaagagctctcagacaattctaaattaagtatgttactcatagtcaaataatttgaaaagctgaattttttttaaagttttcagtctttaaaaagggaaaattctacttaaaatatgagagttggatttgagttggagagcccaaaagcctgcaagtcaaaagcctacaaaggtctgaaaccagactacttctctacttcagtgatctcagacttccaagggacacacccaagctgcatggggagcaattttgattattcttttcttttcttaaatgtatttatttattcactttacaacccaatatcagcccttcctctcctcccagctaattattctttaaaaaaaactatttatttaatttggtttcttttaaaaaaaaaacatatatttattttctctgtgtgtgtgtgtgtgtgtgtgtgtgtgtgtgatagcaatgtaccatggatgtcagagaacagctcaagcggagtggctctctcctgccaggagggtccctgagattaaactaaggtctttaggcttgatggcaagcaccttcacccacagagccagcttgtcagccttgatggttgttctttagcgttagcttggaccctaaccaacaggattttatgtgccctgactccttctgaagattaatttggagctaccttctgactctaggaagccaggagccacggtacccacttctgccgtagatcaatcttgcagctaagaacccacacacagatcagcatggtgaaggaatgaacaaagtgggagcaaggaacaaaggggtaatgctcagttcacctcaaactaccaatggtgattccgagctgctcactcagccagtctcctcctgcccacaccttccccaacagctcctgatagacaacagaacagagcttcctaccacgagggtcctgcaagggcaccacttattaactgtccttaaatagtaactggataccaaagcaaataatgattgatgtgaatttcggctttccggatcggggtatgactctgtaaaagagcacttgtctagcacacatgagaccctagatttcatttaagccaggcacggtggcatgtgcgtgtaatcccagctctcagggaacagaggtacgtattgggagttgcctgacttctcccccccccccccccgccccagtatagactgcaaaactggtaaactctttcattgtctcctagagggaaaacatatacttggtatagtggttctcagagcagcctctgtgggttctatgagacctacaatcccttccctcctatattgtgttttcaaaccatccgtctcttaaaactcatctccagtctaaagctttctcttggcaacccagtattctcttcccattttctggtcccatcgtatgtgcatacctcactgatgccatggagctcatgggtccattggaaatgggataagctgctgtcatggccttggctggggtgcgcaccgtttggtggtggctacttagaatacttaagtattgttgagctcggccaagccctgtggcatcatctctaaggtgggcaattccaaaacagggcatagacaaatgctggcaggaagtgactcaaaggcttttaggcaggtcttccaggctggttcctgaaaggtagcagaagatcctgaaacttatgctgcctctgccttcttagacactgaatcatcacagcgcacatgtacatgcacatacacacagacacccatggctgctgccatgggaaccagagacttcccttgttggcatgtgaagccttttgaaatcagttgaccataacaacctcagataccagccacctaactgctatagatattaagcaatattatttttgtctactaacaaggaaaaaaatagatttagaggaaattagagttgccggaaatgacaaactctgacttttcacctcccttttctttgttccctgttgtctgtgtgtctctttgtttttctctgcctttctgttctctatgctctccccatctctatctcccatatatacaacttaaaaagttaattccagggcagaggacaccccccccccagttttttcttatgtaaactcaatgaagtacaattacgtcccaaaattgtagatttctatatgaaaataaacctaataaatatatctaactgtctagtttgtaaaactgtccaaagaactgagatgtcacctaaatgtcccccctgaaaagtcaaggtacattttatatcttccacagccttggaggtccccaagcagtgaagggagggacttgctaagcttaccctgacctgaaaggcactgttcccagacagtcacccacgccaagggaatgagcaaaccctcacacctccttaactgaacaaaggtcctctttgtttggtcaacaccaacgtcttcagatttcagccacagtctgtcataaagctcatagataatgcatatttctgagggggcgtttgtaacttgtcactcacccttaccaaggcaacagaggttagttagccttcccctcccactgattgcaaagtaagtgactgcttatcacagtgagtgagaggcagcctgccacaggacaccccactgcatggataatactttctgaaggagggagggcaggaacactgcttgtcttatttaatgataaaacttgttggatcatcttatgtgaatccgtctcaaagacacaagagaaagggagaagaccaactcgccagagtgcattctacaaaattcggggctggaaaatgtcagaggccaaaaacactctgttctaagtagcagtaccttagtcattgtgtcagggttacagccagcaggcatgcccgacctttgatgttgtgaaacgtcagtgccatctacaagtgtcttgggccacactcgtggctatcctgggatacactcagctcgcagattgcagtttgcacatggctggtactagaggtgtccccatctgtgtgagaagtccaggtggttcacacgtaagacagtggattcctctgcagtctctgttaacttctggagagatctcttcaaaagaacctctgagtctgaaacagggtggtgatgttgctccatcttattctgcagtgatgcttcaaatctgaagcatagaaatgaccttaaaatgcctctgagcctctgctccattttgagggcattataatgactgtgtcacctgaccctcctggcagaaagcgacgtgcatactatagctttccttcccctcacaaaggaaaggaggactgaggcctgagattaatctaccagagtgaactcactgcctctcacaagagacaggcctgctattgagctcatatctgtctgactccaacgctaatggcttctacatcccagctcataggtgccattgccagccctaacctaagagggcacattgactttgttagcaatcccagctcaccacaatcctgggtgctaaggagcatggtgttagccaggaagaattcatgttgctgcggaaggctcccccatctcacatccacatagtacccaaagagctgagagagcctagccacagatattccagccactcggaaatacttccaaagcactcatctgggagatgccagacctgtggtactgcaggcaatatggccatgtggacttcttcttaaatgatattgctgttctaaaagttcatgtaatctccaagactagactagaaagaaagggacccaccaaagcacaagatacctaatttgcaagctacatctattgtatatggaagttgctttctttgagagtatttccttctaaatgtctaaaaagaactgcatggcacgtgtcactgattcaggaaataggcctctgaaagaagaattgtaagtgccaactgtagctcccactcgctcctctgatgacgtaccttcccatactccagctccctcgactgtgaaatggccactgaaactggattccctctaatggtctttgccaacattttacgatccagatatccttatcagattctttcccacaatagcttgaaagatttcattaaatgacctaccttcaaccctcgtcttaaaaactccaacttgacccctaaacatggacagtttgtcccctacccttctttagagcccagcttgcctttgccatccacagccgctgtgtacaagaagaacatctagaagctggcaagggcagatgaaggcacagatattgttcccaagagaagtcctaggaaattcttcatttggagaattcccctctgtgctctatcatcaagacaggcaagctcttctgccttgccatttttctaccatctttccctgtaaaaagcctcatggtctaggcagagagatgggcctggtgcctcgaggcatggcagccaccctcagaactggcaccaatgtttgccattcgtgccatttgccccatcagccattatattcgtcctcccactgagctgtgagagatcacctactcaaagagaagcaatacccacaggcattcgggtcccagactacttctctgtcacctcccatccacagctcagcagggcagtcttaggcgtctttctaaatctagagtagatgcaatgggcatggtcccattgaatttattcagatactaaaagagcccagaggcctgttcctttatggtttcattcaaaggaacatttcagtcaactgaaagagatatttaaaagaaaaatggctttcaatacctaattgtcacagcctgcattcagctttgtcccatgaaagaccttggtcacttggggaacccagatgtcatttcccaccaaggtttgatgttctgtgcgtcttgctgctctttggtgcttggtcagtccatagctaaatattgctttagtgctcactatacaaagagcttcctgatagcagcaggggagacatgttaggggcttaacaattggggtactgtttccattgagtggtttgccacacaaagctgtgtcatatgaatgtgacccaagggagcagtttcactcctgaaccttccctttgcctttgcctcaagtggagggagagatgggctgtgatctggacagcttgcaaaaaaaagtttagctccagcataaaaatcaactatcaaatgtccttgaaggaaagtaagtcgtgtccccaaaatagagtgaaaaaatgtctccattgaatgcaagagaagcatcaggatgggttgagcctagagatagcttggaagggagtttttttttaaagccagactgagttttcattatattgttgctatgcaagtaaacaagtgagctcactgctgcacccaagctggacagagagagaatttatagagaattaataaatccagggtagacaatgtgtagcttttcctcttctcatagaagtgcaagacatgatcttggatttcaaataggcagcccactgtagctctcagttgctgaaaactgagtccccgtcctagtgggctggcaatggtagtggtgatatttctattcctagggttttcttgtaaaaagggaagagggtaaattgctcatttaagacaaagggttattatgaaacccagtgaaggcagtggtgtctctgctagagctttttcgtttttattatttcatttgaatgaaatggtttctatctaataagcagttttagaaatcaaaacagtcttgttaatgtaggaaacccaaagaaaggtagtataaataaatcaagggaggggggggtggttagaggggcagggagcagtctaactgtatttcccaccagagccaaagcaaagcaatagacgctcgtcatgtgacacgcttgctcattagaccatctcaggccttgttaagggcaaggctgtctgtgggtctgttgctgtagtgacatgtcctaacctctcgttagcgcctgttgtgctctctgagccgagtatttcctgagttgcctagttctggtgaaagccttagggtaggacagcaaaacagcaaagcctggttattcaccttcctgctctgttgcatcgtggtcaggagtttaggcaatatctaatctctctctctctctctctctctctctctctctctctctctctgtgtgtgtgtgtgtgtgtgtgtgtgtgtgtgtgtgtgtgtgtgtgtgagtatgcacacgtacatttgtggtatgtatatgaacatcaaagtacaccttgcaggagccgattctctcctagcatctgggtcccagggattgaacttaagttgtcaggtttagcagcaagcccctttacttactgagccatctgacctgcccacatctgaatggcagaggcaaatggttacacaatgtgtgccatttctgaagctgttttgcagtgattctggaagaaaatgatgggatacaaaattatctgcaaaatcaaaagtcatggcaatcactatcatgattttgtgggtgctatgatactcatagaagaaaaggcttctgggtggaattctttatttttttattttttttttagtttttcttaaaattgtattttgtgatttttgtaaagatttttgacagtgctaagaacagaacacagagccttgcgtaagctagacacataccctaccactgagctacatccccaactctagctttttgttgtataccagaaaaggataatatatagatggtaaataggtagatgatagacccgaaaacaactagaatggaagcaatacttccagcccatctccatgtctctcctccactctacccaagtcttcttactcaaatatttttctgtgctgtgtgtgtgtgtgtatgtatgtatgtgtaaaacttatattattgtgtatgtgtatgtatcaaatttatattattttaaaaataatacatagtgattgtgcatatttacaggatatttctgtacatgatcagataagggtaggttgttcatcggctcaaacatttatcattttctaatgttggggatatttgaaatcctctctactatttaggaatatacaattaatgcttgtcaactgcagttacatttctgtgacatagaactttcaaatttcctttcttctatccaactggatgcctgtatccatcctgcatgctctctgcccagccctctcctcacccatgccccaggtaatcaccgttccattccttgtcggcttctatgagaacaacttttcagcttgcactattttgtccctcacagctgccagtagtgtgaggaagtaggggaggggtgagatgttgcattgaaggaagagtagagagagacatgggagaacctgaggatttgggggaggccgggggtggggataaggggaacttgtcttggagaatggtagatggctacttcctccctgcttcacttggggctccagtgagcaggcagctgacagggcaaaggtttcctaaccccagctttgtattaggaaggtgaggcagacagatactcgaggtaagacatggcccaaatagatttgctgaggccttggccccagtgacatcccaagagaagttatctgtaagccaatgctttgcatattatagacattgccgagagcaagctccatgtcctagttcttggttcctagaccctcttgacaagcattagtttgtgctctcccactgataagaatttcatcccataccctgagcctaggatctcatcacccttccctttggaaaagtccttcatctctaaaccctatgaaagcactcttccccgcagggctctcccctggagtatcttgatttccattgaggataatcatgatattggcagcactgataaaataataacctaagtaagtctactggtggctgtgaagaagcggagtcccctgtcatttgtggctttgatttgaagtccctcgtgcctcctgggcctctctttcaatccttcacatatgtgtaaagatgactctcttctcatctaacttaaacataccaagctagtgattttttgttttatcttcatgtttaatcatgaaacactttgaaggcaaacagcctcgaaatcgctggactaaaatatgaactaactacatcctgaccagcatcaccatggctgatatgagttgtgcctttcagcctggggtatgatactcacttcagagctgcccaacctggaaatctgacttattctatgtaggcagacatcatttcccttccttctagcatcatctttcctaaaatctgctttatccaaggcacggttataagccctgctgcaacaggaggttcaccgagagagtcaaacaataagtcacatgcactgtcagacatgaatataaatatgtaaattacttggagtgttacaaagacagaggtagtttatccatctagggaaggctttctgggagacaggaatttgacttgactctgaaatcatgatattatctgaagataaggggagaggaaagagttgaatggacaaagcaggtgcagatgtgtgggttttcagggcatttgaggaaaccagagtctttcagtcttgatagagatggtattggtcagaacttggaggtttcaaggtctcaatgaaggagagagaatacatacacacaaaaaataacatactggagaaatcaaaccaggcagcataggggcccgaggtgtgatttagtcagccaacacactgcttcaaattttgaaaaccagatttacacttctggcatctgaaaacgtgcaagatctgataacacattcccagtagttgactgaacgcaagcatggtcgcctccctttcaataggatgtgcgcctgctcctaagtacagaagtatggctgtttctcctctgtacctgtttgctgggctttcaagcagctgaatgaagggtctttgctctgtcaaagaataaacctaggcaagctggttgcagaaacatcaacaaagagccccaaagagtctcttctccaatccacagtctctagcttgctgctgtccaaatgggcctttcctttaaagccagtgtgcccagctttccaaattatgaatcatgaaagtagattacctctctggaaattcactccaggaactccaaagaccttacagaaaatgacataatgcctatataacctgcacacatctgcacatagacgttgaatcatctctaggcacctttcaaaacctgatgcaattagacgctgtgcacgtacttgttagaccgtattatttaagaaagaatgacgaagagaaatggaaatcggcatatgtgtggtgcgggtgggaactgttttcatgcactccctacccctgagcttggttgaacctgtgggttcagaacctgaagctacaaaatacaggctgtgtcagaaagatcttcaaaagcagttcctgcagtggggatctaaggctcaatgcagggagaattaaatgctgctaaagtgcaaggcagaacagctgaggttgctcccttgttcttatgtaaacaccttaattagagggctagcatatcctaggtctttggtctttcattcttcctggcagggaccagccctagagattgattccatgcgttcgtttgtaagtgcttatagttctcagtgcgaattatgtgtatgtgtgagactacaaaactgaacccctttaatgcatacaatgaatagctactaagatgacttagtatgtaaagtccctgccgtgtgagcatgaggacttaaattgggagctctggcacccgtgtaagaaccaactatgggtatgtatataggtatgtatgtatgtatgaatgtacatacgtgtgtgtgtatatgtctacaatcccagcactgggaaggtgaaaacaggtacacttcaaggtcattggccagccagcattcccagattgatgggctctaggttcagtgggaaattctatctcaaagaataagatgaggggcctggagagatggctcagcggttaagagcgccgattgttcttccaaaggtactgagttcaaatcccagcaaccacatggtggctcacaaccatccataatgagatctgactccctcttctggtgtatctgaagacagctatagtgtacttacatataatactaaataaatctttgggccggagcaagtacatgatggcttacaaccatctgtacagatacagcgtactcatatacataaaataaatctagaagaagaagaagaaggaggaggaggaggaggaggaggaggaggagaagagaaggagaagaggagaaggagaaggaagaaggagaaggaagaagaagaagaagaagaagaagaagaagaagaagaagaagaagaagaagaagaagaagaagaagaagaagaagaagattagattgcaaagatgactcagcagttaagatcactggccatcctggctgaggcggcttcagttcccagcatctacatggtggctcacaactatccaccggcccaactggagaccggccactttcttctagcctctgcggctactgaatgcccatggtacacatacataaaaaacactaagtgtttttaaatctttttatatggaattttaatgtgaaacattatttagcagcagagatttgaccttcagagctaagagtttaacctgttcttcaatctcttaaataaaactgacatatacttggcagcggaggaagtttaatttattgaaagaaaaatgtttctttttctttcttttttttattattatttgttattgttgttgtttgagacactcttgctatgcgccctaagttagcttcaaactcacaatcctcctgcctcagcctcttgagtgctggggttaccagtgtgtagcaccacacctggtaatagtagtgcctgaacacataatacaagcatattatgggcatctattcttaaattaaaaaaaaaaaaaagggtagaaagaggttgagaagtcacctgatgtcagtctctggccctcacacacactcacatactcacaagcacacacacatacaccaccactccacacacacacacaccctacacaacacacaagtacacaaacatacacataccacacacacatatgtgcacatacacaaacacccgcattcatgcatatgcacatacacacacatactcatgcatgcgtgtgcacacataccccttcatgttcccatacacatatgcacacatacacatactctctcacgcacacacacaaaacactcacacaacaagcaatcagaggttttgaaaaatatatataaaggaggaaaaaaaacccttaatggttacaatctcttctctgctttgtagctcttctgggggttttccgggtagttgacaacaggattcatcatcaggaacagcaacagagccacaaatgaccatgcagacccttcgagggatgatcataatcagggggcagctgtagttctggaccttcagggtcccagcctaccacactgcttagctccctgggaagcagtaatgaattaaaaggtcaacttggtaattcccttgggctaagcctttgcaactaaaaataaatacatagaataaaaggactgcagaagaagaaaaacaaaccaagagaaaagggacatgattaaaaaaagaaaaaaaaaaaaaaacagacttgattttattgagaaactagtgtaaaaatgcccttgtgtggtgattccatttaaacccaggagaattcttccaaactcaaggtcatggtcagctgttggtctgcctcctgggctgaaggtcagtggttctaagaggatgagtgtggggatggtgtgcttttcgtgtgctccgtcaagcaggaagaaagagcctgaaggtcaggctagccaagcactttgccttgaggagggaacacgcaattggcctggagagggtcctaggaaggatataggcaaagctagctctgaagaaagctccatcagttttacctaagatgccacatgtatcactaaatgccctggacttgttctaccagaggcaaagctctggcctcacttcaacagcattgctgggtctgtgtgagctggatcataccatcgggaatgctgggatgggaaggctctattttattggctttttccctttcgtggttttgaccatctgtgtttctaactgcgtaaacaaggaaaaatgactggtttggaatgcaaagttttaaacaccagatgaccacaggcatcctctaaatgagaaagagagagcaagttggggttctgtgacatttgtcaggaagtggaatggtaaataccaagaagcctgtgtgtgccctgccagggaagggccacaaaggcaagggannnnnnnnnnnnnnnnnnnntggtgtttgtatggtgtttatataacattgtagtactataaaaacattggggaaagggtttgaagtgtgtccaatgatatatggaggttacatacaaaacacatatatggaggttacttgcaaaacacagcaccttggccttgaccatccaaggatgttggaacagggtctcctagagacactgtgggaaactgtatttcccttgtctcataaagtaaagtgaacatccccaggcaattataagaacaggactgttcatcagcggctctatgaaaggattagggtgacccatggaattttcagttataatcacaataataatttcagataaagaggcatactgggttaggtatgagaggaattttaagtggccaaactatttgtttatgttctttacaaaagccttggagcctcgttaaaaaaaaaaaaaaaaaaaaaaaaaaaaaaaaactgtactgttgtactttagccactccgaaaggatcagctaaaactttcataatttatttttattttatatgtatgtatacaagtgttttataatatattcatacacacacacatacacacacacacacacacacacacacacatgcttgatgctgttgggggccaaaaaaggctatcagtgcctctgggaccagagatgaagatggttgtaagctgccatgtgagtactgggaaccaatcccaggtcctctgtaagaatagcaagtgccagccgggcatggtggcgcacacctttaatcccagcactcgggaggcagaggcaggcagatttctgagttcgaggccaccctggtctacaaagtgagttccaggacagccagggctatacagagaaaccctgtctcaaaaaaaaaaaaaagaatagcaagtgcccatagcaagtgcccttaactgctgatccctgcagtccaactttcataatttaaacatatctccttgaatatagggaattgagagtccattgatgaattttgatcagatttttggaaaattcttaagaaaagaaataaacatatttcagtcacttctttcatattctgaccttgtatcttcctttcctctcaccctcccatactttttctcctttccttccttctttttctctcctttctctcctttctctggtggattgattagggatatgtttctcaacacaggctgataagtatgctgaggactcagggctgacgtttgacatctttgtgtattcttacccacaggtgatcaccccagtgaggacgggccatggctatgtgtacgagtacccatccagataccaaaaggatgtctacgatgtccctccttcccacagcactcaaggggtaggcaatgggaacatcaccaggggagctggtgtagggggcagcagctctttaggaacgtacaggagaagagggacatcagccacaaccttaccttgtggaggttgcctgtccagaggccatttcagtcggtgttgcttacattgtatttcttaggtttgccttatcagaaagtctagtcttttatctgagaaatttctcatctgctttatcggtttgtcattttatttctggaagtgtgtaatttaaatgatctaaattatagagcagatagttcacgtaagattgttttcatagttaacctaaatcaaagaatccaagagtcataaagaaaacatccagaagcccctgatgacatgaaacactactaacgaccaagtctatgtatgacctgatgaatgaatccttacagaaacaatagcaagggacttgaacagcagattccattgcattctgggtaacttgagtgtttcttttcaggtatatgacatccctccttcctcagtaaaaggccctgtgttttcagttccagtgggagagataaaacctcaaggggtatatgacattccccccacccaaggggtaagtgaactggaaaaacacagtatgtggatgagtacctcaatgtgtggtggggggggggagtggaatgtgtcatagtttattgggataaaacaagaatggcagttctaaaaggggaaaggagagaaagaagaaagagaaagagggaaggaagcaaaggagagaagaaagccattattattacaaattttgagtccccgaaaatatgaagacatcaatcatgagagtccattggaagaggagatagtatgttcagtttggcagtatctaacacatcacatatttctagaagggtctacagcttcctttgtctctacataagaagtagctcatttgatttttctgtcatcttctgggcctgcttgcactgcaagtgcagttagctttgctgaacagataggggactgtgcctttgaatacaaagaagacccaggcagcttcacacacacacacaggcagcctgatgaccaagaatggaacacaggtccctctgcccagtgtatcaatgtcttctgtctctcagcatagatcagtttgtgtaggacagtcagtgaatggttagaaacatgagactgcaacccagtgatgagcaatttagctaggagggagggctctatacccaagctagcaacaagaatggttaagaatgctcaggtaataggacaaaggcatacatcctctaaggagtatgctgcatgctgggaaacatctgaggtagtaaatgatgagaggagaggaagaagatggaacgaacagtgctgtgaactctggaccacgctattcactttctgcctccatcaaagtctcaactgaacaaataaaatggctttttacttacgtttttaggtctatgccattccaccatcggcttgccgagatgaggcagggctcagggaaaaggaatatgatttccctcctccaatgaagcaagatggaaaaccagacaccagacctgagggggtttatgacatccctccaaccagcaccaagacagcaggcaaggaccttcacatcaaattcccctgtgatgctccaggaggtgtcgaaccaatggcacgaagacaccagagcttttccctgcaccatgcaccctctcagctgggacagtctggggacactcagagtgatgcctatgatgtcccccggggagttcagtttctggaggtaccaacagaaaccagtgaaaaggcaaatccggaggaaagagacggtgtctacgatgtccctctgcacaacccagcagatgccaaaggctctcgggacgtggtagatgggatcaacagactgtctttctccagcactggcagtaccaggagtaacatgtccacctcttccacctcctcaaaggagtcttcactgtcagcctccccgtctcaagacaaaaggctccgactggacccagacacagccatagagaagctctatcggctccagcagaccctggagatgggtgtgtgcagcctcatgtcactggtcaccacagactggaggtgctacggatacatggaaaggcacatcaatgagatccgcaccgcggtggacaaagtagagctgttcttacgagaatacctccattttgccaagggagctttagccaatgcctcctgcctcccagaactggtcctccacaacaaaatgaagcgggaactccaaagagtagaagattcccaccagattctaagccaaaccagccatgacttgaatgaatgcagctggtccctgaatattttagctatcaataagccccaaaataagtgtgatgacctagaccggtttgtgatggtcgccaagacagtgccagacgacgccaaacaactgaccaccaccatcagcacctacgcggagaccctctttagagcagatcctgccaattcccatctgaagaatgggcccaacagcatcatgaactcaagcgagtacacacatccgggctcccagatgcagccactgcatcctggtgactacaaagcccaggtccacagtaagccgttgcctcctagtctaagcaaggaccagccaccagactgcggtagcagtgacggttctgagcggagttggatggatgattatgattatgttcacctacaggtaagacctataaaccacccagactcggggctgatgcccgtaaggctgtgagctggaccgataggaggctgatgtccataaggctgtgagctggaccgatagcaaaacatgttaatctaactgttgtgaaaactgagggtgaggttgtccaaaaaaatgtacagccactttgtctaacttccctggaccttaattttattttgagaattaatttagctcacatggttgtatgacatctcattgatacacctcaggaaagctggaggagactcatcaatgttgttgactggtgagtccatcagccatagaatcacttctccctcggcttgtgtttttatggcacaggttcatggaacagctcatcataacagaaataagtttaaatatatatcactgttaattttttagaaattattggaaatatatgtacatagagagtttctaaggtactctttcagcctacagtgtgtgcatatgtgtatgtgtgtctgtgtgtctgtgtatgtgtgtatgtttagctgcttacaaagacacagagctccatcagatccagaggaccctgtgatcccttgccaagtggccaacagcttgacctacttatgttaaaatccacaaactgcttcctatgagtataaactgtgctagctcccaaatggacctggaaccctgaaggcttccctgtctgctttgaagaattccaacactctaccataatccatgcctttgtgtttggcttagtgctttaggcggccattcttttccattggactgagagccatgagttaggctgaaaacgattaaaataccagcagcccccagacgcaagagagtagaaaggatcaactgaaccacatctcatgctgaggattggccgaggttagaggaaagcatttaacattccactggtcttctgatgctgtagactggagaatactaaggatgggtagagagatgcagaatagtcaaaggaatcagaagtgaactatgcacccattttttttaacctttgtttggaagcacatggttcacatccaatctattttaaaagagccatggaaaaagaatgcttgggaatcttcagaagctcttcaactggagctagcagtgaccgtggtggcccacacggacacaggctttactcttcagcctatctccatggcaattccagaagtcgctaatctctggtttacaatgtctaactggacatgagggaagtggccagtggataataaaggtctgagtatacttgtcagtgaaactgtccccataagtgtctcacagcaaggaggtaatactgtctttgttttgaacacaccagggcaaggaggagtttgagcgacagcagaaggagctcttggaaaaggagaacatcatgaagcagagtaaggcgcagctggagcatcaccaggtaggtttgaacacagcagacagcacaccgtttggtagggaacggagagctcccaaagcctggggtcctcccggcacactggcaggaagaaggaagtcccaggcatgtaataggacaagagaacaaagtgaaggtgtgtggcctatgactacagctgagtgtgcctggattgcatccaaatggcagtgtttgttcagactgtgcctgcacatctatcacccgttaggagtacttggtttaaagctttcagtctcaagacacaagacccaagtcaggcaagcccaagctaactggttttccattgaggccaaataagggaattccagggaatgagatgcaaccaaaaccaaagaaagcaaggactgtattcttgatgttctcttccagtatctgccttcttctctactctccaacattttctccaatcacttcactcggttcacatataactttgactcataaatggccactcaaagcccttcctatagggctttgtggtattctgtaatgctttgagataagttttcacaatgcagtccaggctggtttcaaagttggtattctcctgcctcaaccttttgactattggccttgcaggtgtgtgcattgagcccaacttcaaaacctctgtagatgtcacttcatctaggattccttagataatggtcaactcccttttgtgcttatcaaactcctaagagagtttgagtctaactctcccctagaccccacccctctccctgtcttttgtatggtccagtctaagggtcagagggaaggagccaatgtctatcagacatatataagtccatttaccaagagttctgagcagggggtgttcactcaaaggtttagtttgtatagcaggtaaggctaggtattgtgaagccaaggatacgaaaacaaagagaaatggactaaagatttatatgcactttaagatgaaatgaaatggcatatcacaacatgaagtgacaagatgtctctagcaaatcagagttttccagccaacagctgtgtagacttgaacatcactgtaatgggccagttccctctcgataaaatggaaaagtactaccctctacagacacatgatttgaaatcaaattcataattatcaaataatattaagacaccaccctgtatctgctatgcttatattggcagtcggcccaataggacagcagagtttgggaaagctagcggacactaaggtaattcctaggaagcaagtagtttccatggaatagaaaatcgactatgcacttcttagcaaggaagcaagatgagggtgtccctgagctgactcggctctgagtcaggatgaaagattaactgactcccaaaatcagtattcttagtaacatagctagaaattatcatttctattcgaaagaacagtccagttagggatgctaatgatagcatcaagaaatctggtcctaggactgttgagatggttctgtgtaagggcacttattgccaccctgatgaccggagttggagtcttagaaaccacacaggagaagagaaccagcacccatgaagagtcctctgacctacacatgcatgctataaaatacggcaaattagaaatgctgagatttctttgttgtgtcattttccctacgccatttctaagagttctcggcagtaacagaccacaatgtgtccatcttaacagtgcaaataggagagagaatcttcatgaactttccatcttgaagaaaggccttacccaggaagtaacaaacagaaaggtcactacatctgcttttcccttgctgcctcccaacattattttaaaaaaaattaaatagagcctacaactcaccaaacaccggtacaaacactttgcgaataataatgataatattcactttgtgaataatagtattttattgagccctcataatggccttagaaggtaaggctgttgccttccagttagagtgcaaaaaaagacaaatggtgtcataacagaagatctatgctggaggatcccctagggatcctcttcccagtgtccacgttgcacaatttaggaagcaaggcatcctggataaggtctcacagctcctaggtacctggcatctactaaagatgaagctgatatcttttgaccccacacccatatttctttccctttacaatgtatgccttgcccttaatgaaacctgttctcttccttttagctgagtcagttccagctgttggaacaagagatcaccaagcctgtggagaatgacatctctaaatggaagccctctcagagcctcccaaccaccaacaacagtgtgggtgctcaggataggcagttgctttgcttctactatgaccagtgcgagacccatttcatttccctactcaacgccatcgacgccctcttcagctgcgtcagctcagcccaacccccacggatctttgtggcgcacagcaagtttgtcattcttagtgcgcacaaactggtgttcattggagacactctgacaaggcaggtggctgcccaggacattcgcaacaaagtcaggaactccagcaaccagctctgcgaacagctcaagacgatagtgatggcgaccaaaatggccgccctccactaccccagtaccaccgnnnnnnnnnnnnnnnnnnnncgccctccactaccccaggaccaccgccttgcaggaaatggtgcaccaggtgacagacctgtccagaaatgctcagctgtttaagcgttccttgctggagatggccaccttttgagaagacaaagaagtggaaggaactgggtgaataattactaaggaaaactggaaatactatctagtttttgtaaatgctatctatttttgtagatattttatatgaaattgaaatatttcgatgtttttgtgagttagtcgattttcatcaattcagggagctgaagcttggatttattttgtttcccctgtgtggttctgatataaacatataagtatctaagacataagttgtacagaactgtgtccacgtttgtgtatgcctacatatccatatttgtttatctgtgtgtctgatacagcccattaaaaacatgaattgagaagcaccttagtgagcaccttctaatgctgcattgtttgggttttgtagaaaattataccacttagttgtaatattgctcttcatgtagtagtagtcgtctgagcccagcacacccaactttcttgtctgaaacctctttcaaacttgacttgtctttaacacggtggtaaatctgaccaacttctggttgaaggggggcagggaaagaaagaaagattcaaaaaatatattaacctaaggtttcaggtgctagagagaggcaaaacatgtgtgctgtactaagaggccatgtctacagtagttattgtgttatttcaattctgaaaggaactacaataaagagagaacacttgtttccctggggctacatttgtgagtgattcagtcatggttttctgaaggatgtttttagagttgaatttttttttaaaaaaaattgcaacaggaattcatgaagatacatcagaactgtgattgtgggcaaaaagaagggctgtttccaacaggcagtagttaaatcaagacctctctaccctcattctctaatggaaatggccagttccttagtcactgaactgtggaaccaccgggccctgtcctgctctcgcattgcttgatggatcctacaccagtctaaaaacttacataagcagaccaacactcaaaacagctgccaagagctgaccttcacgtcccactgtggctatggaccttgtggatgtcagctagtcacagccatgatcgtgtggtctgtcccttcacaccggctgtgtggatacagcccaggcaccagattcatcgtgggcagataaactacttccctcttcctttatgaccaactcaagaaatatagtagtctctgatctatttcattccagcctacttggaaatgtgtttttatttgttatggatgtcttgactgagttaatgttatttgttttaaacaaccaaattacaaaggcaaggaggggcttaagaaggacatgtgatctcaatgtgatttttttttaataaatggaagatatcaaaggaaaggtgcttttcaaaacaaactataattgtaattctcaaagttctacatcgccagaagatgaacagctgagctattggagagcaattcactgtgtctggcgtgtggaagaagagggtcctgaagcatcagtaccattgcaggaagtcaggaagggtatgcttgtagatcttactacacaatgtgtatatgttatgtgatggctgccttgtcctaacctgattgatgacattccacattgtaaaaaccaaactattcaatttctactgtttattgccatcttgtatatttaagccattaaatgtttggatatttctctttatagccactgggtttcttttccttgtgtctctcttatcacagaattaaatattgacccatctgagtataaaaagtgaaattatgatttttttaatgtgtgctatagatctgattgttttttaaggaatagtatgtgtaggctaccccagtaccttggtattgaagaaaattctagagcatgtggatggcatctaactaagtatctgaaattgtttttgtttttgtttttcagtatcaaatgcccacagacaggagttaactacatagttagtcatagctggcctggaactctctatgtagaccagactggcagaaattggcctgtctctgcctccaggttgattgtaataaagatgtgaaccaccacatctggctacagcacccacacatttaatgtgggtaggacagtttctatttctactctgtggctatggctattcaagtagagtggacttttttcaattactctggaataggcataaagaaatggttcaacacaaattatattagaagaaaaagattcctaaccatgagaatttactatgggccatactgtgggccatactccttttagtgtccctccctttaattcagataaccctctgcgatttagaaagcactttgagtgctggagagatggctcagtggttaagagcacggactgctcttccagagaacctgagttcaattcccagcagccacattggtggctcacaaccatctataatgagatctgaagatagctagagtgtacccatatacataaaaatattgttattgccatgaagtatcttagaagcaacagaggagagatttcttctgacttgcactttagaggggacagtctgtccatcctggaaggtctggatattgactttgttcctggcagtgggagcttgcagcatggcttgctagcatcttgttagatcaagaagcagatagagggaggtctcagccaggctgcaagtggggctagtttaatactcatgaggcccacatccactctaggatctctgactatagagcatccataacctaccaaaataatgatgatagctgagactacaatgttcaaacaagtgcacttgtgggtgagatttcaaagtcaaaccacaacacctatgtcattctatatacataaaggaggtaaattatttttgacaaaaataagatatgccagtggatgaaaaagaatgtcttttgggtggtagactgggcaggaatgtgctaaatcaaaaaaaaaattctatgaaggaaaataaatatttactttatatcatgaacaaaaattaaaaattaacttacatggaccagagacttaaaactctcaaatatctagggaaaaaaaaatgtaggagaaaaatcttatgatcttaagcaggttatagtttcataaatagttaaaaataattcataaacatcatcaaacttaaaaatttttacttttgagaccagagcaaggactcaacagttaagatcactgactgcttttccagaggacaggggttcggttcccagcatccacattgtggtttacaactgtctataactgcagttccagaggatctaccaccctcctttgacctctgtatgtactgtttactgcactttcttggtgcacagacatacatgcaggaaaaaaacactcatacacataaaacagaaataaataaatatttttaatgttactcttctaaagagattgttaaggaggcaaaattaatttctggacatgacatggtcttgttcttatgagctcactatagctatgttggtctacacaagagcaaggtaagattagatggccatcacatgaggcaatgctaattggacctgatgaaccaaacaaacaaaataggagatgacatgaagtgtgtagtgaggcttgttagaaatacctgtgacagggaagttgggtatgatcaaaatacattgttctcaaataataaataaaagatgttctgcttcaaagaaagattgatcaactggctggctggttggttggttggttggttggttggttggttggttgaactggttgtttgactggttggttggctggctggttgactgctttggtcggttggttggttggttggttggttgattggttggggccagcaacatggttcagtaggtgaaagctcttgccccataaacctggtgatctgagttttgtcaacagaccccacagtaaaaggagaggactgagtcctaaaaactgacccctgacctccacacatgaatctacactttctcacactcacatatacactcacgcattcacatcacacacgcccacgaggataataagtgaatttaaaaaaaaaaaaagtcaagcctcattgcagtcaaagagcttgtgctacagacagcagccgggggttgcatggggtgaagggacaagtattttaatgaggcaagaattccaggaagaaacttcaaaagataagacataagaatgggaaataattaaactaaataaaaaccacaccaagtgcaatgatgggagagacaaacagctgcaaaacctggtgaggaaaggaagaaaatatcaccctcataagccctgggaagaacgtgaactggcagaaatgcactggaaaatggactgccaatcaaaaccaaagctttgcctgctgcattatctattaatcctcttctaacttaaccaagagaaattaaatgcatatatacaaagacttatgtaataacttattacagttctatacatagcaaaaaaaaaaaaaaaaagcaacaagcaaaggtccatctttgtgaaggcaccaagctattcccatccaccaacacagaggagcaggcctgtcttgggttggctgtattgaccatgacccaggctagagccatctgagaagagaaaaatcacagttgagaaaatcctccataagattgaactgaagccaatactatgggcccttttcttagtgattgatacaggaagacctagagcattgtaggtaataccacccctgggcagatggttctggagtgtgtaagaaagcaggctgagcaagctatgatgagaacggcagacagcacttctccatggcttctgcttcagttcccgcctccaggttcctgccttggattcctgccctgactgcccttcatgatggattacaactataagcttcaaagaaccctttcctcaccaagttagttttgatcatagtgctttatcaaacacacacacacacacacacacacacacacacacacacactaatagccaaaataaaaactcaacatggacaaatttcaaaatcactatgatgaaaaaagaccaaatgaccaaaaactccatagtaagtgctatagttccaggcctacaagattttagagactgaacacaccagactatgttgtattgcatgcctataacaccaacacataggagatgaacacaggagtttgtagtcagcctcaactggagttggatttgaagaaattacaagctgatatataacgacagaataccaatagctgcctggggagggaagggtgggaggtactgatttgcccaggagaaggcaaatgatgagaaatgttcattctctagatgttatggatggtttcacacatgtgaagactcatcaaataatacactactgtatgtacaattcagccttcattgacaatctcttcttcagttagtaatcacagtacttccaataaagaatgactggaagtgtagcactccacggttgctgcttctggggggggggtgcaggtagagaaggactcagttttctttaggggacaggccttggggaatttgcccatgttcccgtaagtacatggacaattcagattagacttgttttgtctgtctgtctgtctgtgtttgaggggtgggtcacaaaggtcatggagtagacatggaagcaatgagaagtgatgggaaagttccaataagaatattattttggaaaaaaaaagagaatcttagattacatttttttttaaaaaaaagcaaggctatttaaagacaccccgtttcagtgaaaattcccagataacagcaaaggaatgggaaggaatatgcaatgcacattctagctatagataagaaaagccaagacagctgtgttataacaagtagaattcagcacctagccaaaaggcacatgtcgtgatgtgcatcagcatacaaaaaaggcaaagccttcgtaaatatccacaaagccaatcacaaaaacctcaaaacacgagaagcaaaaattaacagcgctgaatgcaaaacgtgcaactgtgtgatggtaagtggagatctgagcatttctctatcagtaacaaatagaataagtagacaaaaaagtcagtaataattgataagaacagaactcgagcatgccactagaggggatataaaacggcacggccactacagaagatgcttgacatacaacctagcagttctaacgctaaatacttatgagatgctaaaacagacctctaattattttgtcatttttaaaaatgttatgtgtagggcgtttggcctgcatgtgtgtgtgtgtaccatgtggatgccaggggcccaaggaggcgaggggagggcatctgattccctgtaattgaagttgccaatggttctgagactcctcgtggattctgggaactgaagccaagtcctctggaagagcagccagtgctcttaactactgaaccctctctccagctttgctttgctttgctttgctctgctctgctcttctcttctcttctcttctcttctcttctcttctcttctcttctcttctcttctcttctcttctcctctcctctcctctcctctcttctcttctcttcttttctttttaaattataaaaaattttaaaacaattgctctgggaccagtgagatagtccatcaggtaaaaatgcttgttgccaaacccaacaacctgaatttgatcccagaccccacatgggggaaggggaggatcaacttctgtaagttgtggcatgtgtgaatgtgtgtacgtacaacacacaaaatcggtaaatgtaaaaaaaaaaaaaaaagtcttattaacttctttttaaattataatcatatcaaagtggaaacagcccagatgtcttcaacaggtgactgcataaataaactgtggtgcagtacaattcagaaataaaaatctgtgaatctgtgaactaattgtttaagtattatctatacataacagtgttattggattaacctgagggaaaaaaatcccaaaccaaaatcatgcacttgcaattaatgacaaaagaggccatgtgtttgaagaagagggaggatctggagggaggaaagggaccagagaaacatgctaattaaattacaatctcaaaaataaaaagaaatttaaaagaagaaatgacagatgcctgtaaaccacagcctgaagcattctgggaggctggatacggagaatagattggctgtgagattggccaattgctattacgtgaagtgagcccgctgttctctatcctggatctgaaagagatgtcccccagaggctgcgtaacaaattactctaagaccgtgcatgaagctgcaccaggttccctgtaaatgtggtgtgtgttccatggcatgcatgtggtgttgtgtgtgatgaatgtctataacatacatctcaaggtctactttccagtacatgtatatcctcccataattcctccaacccctggctaccctggaaagctctgccgcccccgcaccacccccccacaaaaccctgccttctgctgagtcctgaactgctcctccactagcagaagcggccaccctcttgtctttcccaataaatctgttgtctgaggtttgttgtacggtgtgatttttgtggtactccttggctcctgaatgccagaatacccttcagagctgtaacacttagaggaaggaaggttggttagttaaatattatatacatatacatatatatatatgtgtgtgtgtgtgtgtacatacatacatacatatatgtatatatatatacccacatatatacatacacacacactcacccatatacatatattacaacctcgaaaggattttagtgcatagaggtaaaaacacgggggataaaatgggacaactgaaaaatcagcaaatactcatacctacgttgcaaaaaattcctttgcaatatgaaggatagaaaaaaaaaatcacttcagagcctcagaacatgatttaagtcatctcccaaactactataattaagaaaaactgagctaacagagagagtatcttatgttatcttctcacagactgttttccagggagaccagagtcagcaaagaatgccgttgaatgaaaacactcccttaatttctactggcctgcctacccagcagcccgggtacaggcagacaccagacccctgcccacatcctagcggccatccttcagaaggcactttatgagtcgcttttatgatctagctgcctaaaaggtgtgtgtggatggggcaggattgagaacatccaagctctttgggaattcaatccctatgcaaaatgacatcgggtggccaatgggacactttaggattggttagaagggcacagagagttagctcagagtcttgcacaaggttgaagtatcaaagcaaaggactgggggaggggagcaggggtgtttttaggatgaaacaaacaaaaaaaaaaaaaagtgaaacctgtctagacacccagtccacacaggcaagggcctagggtttgacaaaagagggtttgggtttagtgctagtcctgtttgcaaaaggcaaccaacaaggaagggaacaaaagatctacgagaaacactagggcttgtagagacctgtacctagaaacacaagctagaaacaaagtagcatgcactctgccgctggcgaccgaggtaaacctgggggtgttggcccatttcagacagcgcaccctgttgggaaggggctcccaagagttccttatcctccaggggcagagaactagcacccctttgcttctgtaacaattctttggtgcattttgctcatctaaagtcgtgttctctgagagccctctcggggatactatatatggtgccccctcgtggtccagtgtggaaaactagagaggcatctcagagatgctgcacacagggcccccttgtggtctggtgagaaaatagagaagctgaggtggggtgggttataaccaattcttccaccaaccatcctgtgaaatagcgatgctaacgaacgcttgtctcagtgctagaaaaacaaggtttggggataatttgaaatgcccctgaaacacataaaacagtattttatttacacacacacacacacacacacacacacatacacacacacacacacacacacacacacacacacacatatatatatatatatatatatatatataatgatgtatatatcatatctaaggcatcttggaccatgagtttatctctgccttctgatgtggttcacacaggaactcattccatgtttgttgactggctaacaaatgaatgatctcacctctgtatgtgtctccccccaccccctgaacccctacacacacacacacacacacacacacacacacacacacacacacattggaagagactttttgaaaatcaaataggactttgcagaatctttaaatatatttattttcttttatttctgtgtatacatctgtgtcacacaatccagaatcaagagtctgaccccctggaattagaattacaggtgttcgtgagtcacccagcatgagtgccaggaagaagatccttaaatataataaataaaaacaaaaatctcttcaaagggcaggatgcccataagctattgctgtattgtttccctttgtggaagcacatttccatgacgtgttagttatttttgcatcaagcagaaacaacttgagagaagaaagcttagttgaagaccatggtttcagagagctgcaatccatcacactaaagacggtatggagagaagactatggcagacgaccaggaaatagaatagacccaagggacaaggtcaaaggctcgctctgacagccaggctctgtagccttccaaacagggaccgtgctgctactgagcttccaagagatgagtctgcagaggactttcagactgacagctgacagcagagatgcctctcctgtagctggataactgtagtctccatgtggtgtgtgcgagagctaaagttaacctgtaagccccaaggacgggtcacctcttgaacaagggtggttgcctcaccggcacaggacgtgcttggtcacatatatgcaggaggcacatacctcctagtatgtcagggtgtatgcttgcccctgattgaatgaagatgggatgtccctaccttgtgagttctgccttgatgagcacccga

SEQ ID NO: 396 - DNA, 2886 bp, Mus musculus
cttagatgcaaggaggggatctgcagagagagaagcataaggacacagagggacgagttcccatccctgcctgcctacctagaagagatcagggtgtccagggtcacaagatggtctgtccactgcggttctgcgttcaggctagtgaagtgtgagtctccagcaccagacgctggcggagaagcacggcagagttgttcatggggagatatgacaaggaggaaacaggccagcagactgcagccctgggactgtcctggagatccagagtgccaacgctcctcaagagaaaatgtgggcgaggaatcttatggcaagggccttgtatgacaacgtccctgagtgtgctgaggagctggccttccgcaagggagacatcttaactgtcatagagcagaacacaggagggcttgagggatggtggctgtgttccctccacggtcgccaaggcattgtcccagggaaccgggtgaagcttctgattggtccagtgcaagagacccccggtcatgagcagcctactcctggacctatgcatcagacctttggccaacagaaactctatcaagtgccaaattcccaggcagcatctcgggataccatctaccaagtgccaccctcctaccagaatcagggaatttaccaagtacccactggccatggcactccagaacaagatgtatatcaagtaccaccatcagttcagaggaacattggcggcactaatggaccccttctaagcaaaaaggtgatcaccccagtgaggacgggccatggctatgtgtacgagtacccatccagataccaaaaggatgtctacgatgtccctccttcccacagcactcaaggggtatatgacatccctccttcctcagtaaaaggccctgtgttttcagttccagtgggagagataaaacctcaaggggtatatgacattccccccacccaaggggtctatgccattccaccatcggcttgccgagatgaggcagggctcagggaaaaggaatatgatttccctcctccaatgaagcaagatggaaaaccagacaccagacctgagggggtttatgacatccctccaaccagcaccaagacagcaggcaaggaccttcacatcaaattcccctgtgatgctccaggaggtgtcgaaccaatggcacgaagacaccagagcttttccctgcaccatgcaccctctcagctgggacagtctggggacactcagagtgatgcctatgatgtcccccggggagttcagtttctggaggtaccaacagaaaccagtgaaaaggcaaatccggaggaaagagacggtgtctacgatgtccctctgcacaacccagcagatgccaaaggctctcgggacgtggtagatgggatcaacagactgtctttctccagcactggcagtaccaggagtaacatgtccacctcttccacctcctcaaaggagtcttcactgtcagcctccccgtctcaagacaaaaggctccgactggacccagacacagccatagagaagctctatcggctccagcagaccctggagatgggtgtgtgcagcctcatgtcactggtcaccacagactggaggtgctacggatacatggaaaggcacatcaatgagatccgcaccgcggtggacaaagtagagctgttcttacgagaatacctccattttgccaagggagctttagccaatgcctcctgcctcccagaactggtcctccacaacaaaatgaagcgggaactccaaagagtagaagattcccaccagattctaagccaaaccagccatgacttgaatgaatgcagctggtccctgaatattttagctatcaataagccccaaaataagtgtgatgacctagaccggtttgtgatggtcgccaagacagtgccagacgacgccaaacaactgaccaccaccatcagcacctacgcggagaccctctttagagcagatcctgccaattcccatctgaagaatgggcccaacagcatcatgaactcaagcgagtacacacatccgggctcccagatgcagccactgcatcctggtgactacaaagcccaggtccacagtaagccgttgcctcctagtctaagcaaggaccagccaccagactgcggtagcagtgacggttctgagcggagttggatggatgattatgattatgttcacctacagggcaaggaggagtttgagcgacagcagaaggagctcttggaaaaggagaacatcatgaagcagagtaaggcgcagctggagcatcaccagctgagtcagttccagctgttggaacaagagatcaccaagcctgtggagaatgacatctctaaatggaagccctctcagagcctcccaaccaccaacaacagtgtgggtgctcaggataggcagttgctttgcttctactatgaccagtgcgagacccatttcatttccctactcaacgccatcgacgccctcttcagctgcgtcagctcagcccaacccccacggatctttgtggcgcacagcaagtttgtcattcttagtgcgcacaaactggtgttcattggagacactctgacaaggcaggtggctgcccaggacattcgcaacaaagtcaggaactccagcaaccagctctgcgaacagctcaagacgatagtgatggcgaccaaaatggccgccctccactaccccagtaccaccgccttgcaggaaatggtgcaccaggtgacagacctgtccagaaatgctcagctgtttaagcgttccttgctggagatggccaccttttgagaagacaaagaagtggaaggaactgggtgaataattactaaggaaaactggaaatactatctagtttttgtaaatgctatctatttttgtag

SEQ ID NO: 397 - protein, 851 aa, Mus musculus
QGGNRPADCSPGTVLEIQSANAPQEKMWARNLMARALYDNVPECAEELAFRKGDILTVIEQNTGGLEGWWLCSLHGRQGIVPGNRVKLLIGPVQETPGHEQPTPGPMHQTFGQQKLYQVPNSQAASRDTIYQVPPSYQNQGIYQVPTGHGTPEQDVYQVPPSVQRNIGGTNGPLLSKKVITPVRTGHGYVYEYPSRYQKDVYDVPPSHSTQGVYDIPPSSVKGPVFSVPVGEIKPQGVYDIPPTQGVYAIPPSACRDEAGLREKEYDFPPPMKQDGKPDWEGVYDIPPTSTKTAGKDLHIKFPCDAPGGVEPMARRHQSFSLHHAPSQLGQSGDTQSDAYDVPRGVQFLEVPTETSEKANPEERDGVYDVPLHNPADAKGSRDVVDGINRLSFSSTGSTRSNMSTSSTSSKESSLSDSQDKRLRLDPDTAIEKLYRLQQTLEMGVCSLMSLVTTDWRCYGYMERHINEIRTAVDKVELFLREYLHFAKGANASCLPELVLHNKMKRELQRVEDSHQILSQTSHDLNECSWSLNILAINKPQNKCDDLDRFVMVAKTVPDDAKQLTTTISTYAETLFRADPANSHLKNGPNSIMNSSEYTHPGSQMQPLHPGDYKAQVHSKPLPPSLSKDQPPDCGSSDGSSWMDDYDYVHLQGKEEFERQQKELLEKENIMKQSKAQLEHHQLSQFQLLEQEITKPVENDISKWKPSQSLPTTNNSVGAQDRQLLCFYYDQCETHFISLLNAIDALFSCVSSAQPPRIFVAHSKFVILSAHKLVFIGDTLTRQVAAQDIRNKVRNSSNQLCEQLKTIVMATKMAALHYPSTTALQEMVHQVTDLSRNAQLFKRSLLEMATF

SEQ ID NO: 398 - DNA, 228835 bp, Homo sapiens
tagaagctggaaaaaggcaaggaagcagattcttcccaacctaaagaggaggaacacagcctgccaaacaccccagctttagccctgttaaacctgtgttaaacttttaacctatagaactgtaatataacagatttgtgttgttttaagctgttaagtttgcagtaacttgttacagcagcaatagaaaactaatacattctgatggctaacactacatatgcatgggaaaatgtctaaaagaatgtattctccaatgtaacattggttttgtcatcttttcaaattatttcttttttctggtttcaataacgactgtgtgttatttgtgtaataaagaaatgatggaaatgttaaagaataagtaatatgtactaaataaagttagatgacctctaaggctccacctaactgtggcattatctgagcaatccagctggtggcttaattgccaatccatatcctgtttcttcttggatgccatagacaggtcttaactcctccacaaaggaaccagaaagagcaatttcaaatcactcctggtgtctttattttccatatctcagatacaaatatgtattcacctgtatatgatatcagtgtgtttctacatttttatgtgtccttttatttattttttttacaaattataatcagatataattatagggtgcacagtgatgttatggtgtatgtatacaacgaggaatgttggaatcaagctaattaacatatccatccccttaaatacttatcatttattcctcttgtctaactttctacccctttaccaccacctccccattccctgacctccagcctctggtatttttacattatttggagcaaaaatcattttaccatcattttgctctctattagttaaattattctagattccacatatgagtgagagcaggcagtatttgtctttctgtgcctggcttatttcacttagcataatgtcttccatatccatccctgttgttgcaaattataggatttctttctttttaaggctaaattgtattccattgtgtgtatataccacattttctttatccattcgttcactgatggacacaggaaaatttcctattttagctattataaacagtgctgcagtaaacatgggagtacagatatctcttcaacataatttcaagtccttaggatatatatatcccgaagtggaactgcggcatctatatggaatttttaaaagatttcattggccgggcgtgatggctcaagcctgtagtcccagcactttgggaagccaagccgggtggatcacgaggtcaggagttcaagaccatcctggctaatatggtgaaaccccatctctactaaaaaatacaaaaaaattagccgggcatggtggcttgcacctgtaatcccagctactcgggagtctgaggcaggagaatcacttgaactgggaggcggaggttgcagtgagcagagatcatgccactgcactccagcctggcaacagagcaagattctgcaagattctgtctcaaaaaaaaaaaaaagaaagaaaaaaaaaaaaagaaaagatttcattggctggtaagtaatgatacataatacatacatatttggtaaataacaaatacaacaaatatgtgttgtcgtgtagtcttgaggtcattcagatgatgtatgttttgtaaagtcttcgtgggttctggtatggtgcattatgacagatctcaaaattgtgttgctagagctcaagattaaaaaggacattttagagagtttgtggccaaaacaaggcttgcctatcattacagtctcccagcagtctcatctaaagtctaaaaaagctcattcacaatccactcagtgtcaacaggtgagggctactagctgatactagagttatcaataccgatgataggcacagcaaatggaaccgtgcagctcattagaagatacttacgaaccacttaaacttaagaacttggctttagtgagttaaaaatgcagagtatgccctgcaaaaccagtttccacttgagcaagaatttgttagttcttatcacagccaaccatcttccggaatttgaatggccctaaacctaatttggcgttttggacaggacaataggtacttgcgtgacatggttggggaataacgcacagctgtttcccatttaggtcactttgatctatgactgagccaaatacctgggcctgtccccagccaaactacaccccagaggaatgaaggaaatagagcagaattttaggagcagggatctcagtacttttttaatcaagtttttattcatcaaatatttgttggatgctgtagaagtgttctcaaacattcatgtccgtaagatttgcctaggacagtcccacgaccaagacaaacagaatttggcagttgagtcacagagcctgggaatctacatttaaccagcctcataggtgattctgataagagacctccatggactactttgtaaaatgtttagtttggtctccagaatgaataaacaacagttccctgccctctggagcctcaaagtccagggaatggagatacactattgtgacattatgtgattaatagagggcctggtgacagtgaaggaggagaggaagactctgtccaggggataccaaggggttgccagaaagacaaggagaaagggcattctaggcaggggaacagcctttacatgccataaccatgagaaattatggaataggaggggaccgagagcagcctcaatgtttaataaattagcagcctcaggtatttctttatagcaacacaaatggactgagacaaatggaagtatgggacgagaaggctggcccctggtttaaatgggatgaacttatccagagaaagcaggagcatgaacatgtgtggggcccaagggtgaatcacagtttgatgtgatgggaaggtgaagggcactgcagaggtggacaaggcaggagagaatgtaaagagaagagtggactgccattcaccagcacagtcatttcaattctattttgtaggcaacaggaagttggcaaaagtctttaagcagaaagtgaacatgagaagatatgaagtttgtctatggaagtatctaatattttgaagatgttcattcaattaatatctcctgaggacctggtgtattggcccattcaggctgctataccaaataactaggactgagtaacttacaaacaacagaaagtgattgctcccagtagtggaggctggaagtctaagatcaaggcgccagcagattcagtgtctgctgaggtccctcttcctcatagatagtgccttccagctgggtctgcatgtggtgagaggagcaaaagactccttcaggcctcttttataaggggactaattccattcatcaggacactgtcctcatctcctaatcacctctcaaatgccccacttcctaataataacaccttaagaattaggttccaacatatgaattttgggggggacacaaaaatctgaactatagcacctaccgtgttcctaacagtgttctatagaggctagaagaggacctcacagcttggaattgttgtaacagtctgagcaattaacgtctaaactaagaaagtggcaagggacacacagagagggaactgaatgcgtcaacaagattggatttgagatttaatttaaaaagacaacaacacagaatatggtgactggttggattgaagatgcagtggggaaaagatctgcagtgttttggggcagagggactgagaatacggtaatgacatgggtaatgactgggagaacagacaggcaaaagacaatagtttggatgtttgtccctccaaatctcatgctgaaatttaacccccaatgttgaaagtggggctggattgaaggtgtttgggtcatgggtgcagacccttcattagtgcagattagattagtgtcttcccttgacagggtggtgagtgggtttttaatctattagttcccacaagagctggttgttaaaaagagcctggcacttccgccctttcttgcttcctctctcatcacctgatctctgcacatgcaagcttcccttcctcttccaacatgactggaagctccctgaggccctcctgtccctcccccaagcaatggcaccatgcgacttgtacagcccagcagaacaatgagccaaataaagctcttttctttataaatgaccagcctcaagtattcctttatagcaatgcaaatgaactaggacaaatggaagtgtgggaagagaaggtccctcttttaaatgggatgaacctacccatacagaaagcagaagagtgaaaatgtgtgatgcccaagggtgaatcaccgtagcagtaagtggtggagtgtactgaaccagaaagaggggaaccaaggcaagaggtgtcctccaaagaagtagagaggggtctgagaggaaagaattgctcaaccacttccaatgcagcagagaaaaagactttgtagtgtctaccggtttatcatccaggttcctgagggtgaccttagcaaagatgatttcagcggagagctggaggcatggaccagatgtcaggatggaaggaatgcagtgaggaaggaaggaatggaaagtgtggaagtggaggtatgaagtgtagacaaatttcttaggaaaactgagtatgaaagaaagaagagaggccgggcgcggtggctcacgcctgtaatcccagcactttgggaggccaaggtgggcggatcacctgaggtcgggagttcgagaccagcctgaccaacatggagaaaccccgtctctactaaaaaatacaaaaaattagccgggcatggtggcgcatgcctgtaatcccagcttcttgggaggctgaggcaggagaatcacttgaacccgggaggcggaggttgcggtgagccgagatcgcgccattgcactccagcctgggcgacaagaacaaaactctgtctcaaaaaaaaaagaaagaaagaaagaagagaaagaggcaaagaagaagatggaaccaaggaactgagttaggactgccaggaaaatatggacataggtgtttgtttataagaaaagttgtggtgaaaatagaggaagggtaagttggatttccagtttaaatttctattgtcttagagaaaaaatcattgtataaaaactaaagggaacaaacagggagtgctgcagttttaactactagggatcagtaaaaaatatttctcaatttagaaagtagttaacccacagtatggcactgtgaaatggaggctgctatgagagtcaggataagggaaacgcccaaggaaggagagaggtaaacagtcagtcattgtagagaaaaaagtggatgtaaataatcccagcacttggcatccctccccgtgtctggggtcattgtcaggggcagcttatgtatatatcaggggagggttgtgatttgactttttagctaggtgattgtgaaggcaaaaaggaacaatcccaaaaatcactttatcaaatggcaaatagatctttagtatttgatccaggaatctctacccagaggtaaatcagctggatgtgaatccacatttctatgtatttagaaaacaaatggacaagattcagataaactgaggagcctcacctgttcaaccatctaaagcagcaatgcagttttgttttttacattctcgtgaataagatgttgtttccaagttgctgtttcatgtgaaaccagaacggcagtttatacagttccctcagaaaccgaggatagtacagtatgatggtttcagtatcaggttctgtttgtgtgcacatgcaatgctcaagggcaagggtagtacacatgtgcacaactgcaaattggcagtggtgacatatatttatatgaatgcctgaaaatgtcttagtagaatgtacctcaaaccgatagcaaaggttctctgtgggcaaagcaagagagaaaattaaaactagggctgatgggcaaagacactttggagaacctcatctgcaatgttagttctttacaagataaatttattacttgtagattttaaaattttattttaaagttatagagaaattagcactaattaagttttaccaagtattttttgagaagtcaaagatggttattatgtagtggaagggtaggcaaacagggtgtaaaccatggagaaatacgtgtttgcaagatgcctaaatgcaatgaatgcttccaataagtcagaatctttacaatttggcatcacttctgtctttaaaagtgttcagtctttcttccttttgctcttccaggtgcccgtgttttctcaaacagctgttctatgactagaagaatggtttcatctttgccaatgttgtttgcctcctgctaatataaatttaaaatgatagctcttactatcattattaattgggtggtgatgcttgaagctgtaattcaaaggactgaagaatggacagagaatggggaacagtatggaagaaatggtgaaactgcagggatcttgaggcatcctgaaagagttcccatcatgagaccttaccccaggcataacaggaggcaacagctaggcttagagcttttagaacatgagaaaggtctagaagggataccacaggggacctgacagacagcaggagatgagaaggaaaattcttgagcagcagaagggcctcagttaagattattggggagaatttgcaaggaaacaagttgccttattaactttccccagtaagtctggatagctctggtgcatgacatgggtggaaaatggaagaacaagagcaaggaaatctacattatacacattgctgaaataggtcatggagttctggcaatgtaggagggctagagagcccaggacttggctgagggactgggagaatagacaggcaaaagacaaaggtgtcctgttaggggagagagaaaaggaggtttataagggcaagagagcagaagaggaaggtgaataaggctcattcttccatgccttccagactatcatctctcttaggggagaaactgattctcatttcttttttatttattttagcccatgttaaataatgcttttaagatcatgaattaactaatgaacagaaacagctatcttgctggcttatctcccactgagctacaggtttctggagggtgtcctgtggagcgaggtatcgagaatgcccaggaaagctcaggagacttcgcaggtatgcgatagttaatgaatgggaaaaaatgaacgggatctttttgagctctgatttcctcatctaaaaatgaaaaccacaagacaaactcccattcccaagaagggaggaggcatccattataattctagacaactttgttcttaaaatttgccagaccagcccttgagcattttcatttaaattcctcagtgggcagttgattccccatggctcatactgtcttccatcgtggaggggaatgagtcaagcaaatggaatcataaatagacacatgtgcatgcgtgcacacatgcacacacacatgtgcacacactttggccatagatttctcaacctttgagtcttctcaaattctccttacttttccttcccccatcctcatcctccactccatacaacagctgctccttggaccagacctccataacaaattcaaaacagttgcctggggtttggctactgcttcacaggtagttataaagcattttgtggtgcaagctaagattccagctaactgagatggcatgaaggagctaattaaagcagtcaagaagctggtttaaatgaagatgaaaatgtaagccctgtcctcaatggatagagtgattagaaattaaagttgtttgttttttgtcagaatcatctgtggtttgccaaaatgttgacatgcagcataacctgctactaatcaaaaagaaaataaaccaaagaagaagaagaaaatctaacactgtaagtaggaaaacagacatagaaaaccggcatctttgcaaatgggaaaaatatttaacttgtttttctaaaataagtctgatctgtttttggacaaagtctcagttcctgagtttgccttgaaggacatgctcgctcgctctctgttctgaaaaactcagcagtgggaggtccaggcagctggaagtgggaaatgaagccataggatgaagatgaaaaaacagagttcaggataataaggttgtcagtctcaagtattttatgtaaaaggagcccaagcttagcatttttaatatctctagagtgtaactgacttatgcagacaatttgatggcattaatattcaagtcatactacaaaattattaattatgttttctaaagtttgtacatttaaagttatactaattaaatgcctgatgaagaaaataattccttacctgatacggtataaggggaaaaacataaaaggacgttttgataaaacatgtactatccagacttctctacctccatcaatttattataaacactctgtattataaaataaaaacttcagagtagaataattctagctcaaatctggaacgatgtggatacatagcatgtactcaagaatggttttgtaaggagaaagaaagagaggaaagaagaataaaagcataccttgctgaatattgttaattgcacttaacaggtacaatatatgtatacaatatatacaatatatgatgattaatatcgatgttcttgtcattgatttcttcataagacccagtgtacatggcactgagctgagtgtttattgctttaagtgtggcacctttgtatgagcagaatattctttagcaagatttgaaccagctcaaacatttaaaaataaatgaatttcagagaagtcttacagaaaattaaaacaaaacaaaacaaaacaaacaacaacaacaacaacaaaagagatgccacaagagtgcaacatacatgagctgagtctgatgggtgggaccaagggcagccctttctttgtcttcatgatggagcaggaaggagttggagcagaaacatcaagcaccacaggatcatttggggaacatccattatcaaacctcctctctctctttcctctcaaccctctatgtccccaagtcgtttgctaggcatgagcaaggagtggaaaatgaggaagggtaggaaaatagcaaagatctcagctgataataatacaaagttgccacgaatgatcacggcaaacacttatattgcgcttactctatttgtgccaggcattcttggagtgctttacatgtactaattcacttaattctcacaacaatcctgtgactgttcccattttacagatgaggaggccgtggcacagaaaggccagaagtgtttaaagagcagagccataattcaaacccaggaggcttgtctcagagccacttgtctgctacttgaaagcacagaatgaagaagacaaagggtttgggctttcgaattcccttctacatacacagatctaggcttccataccacattgtaagtaggaaactctctgagcacctagcctctagcatggtgtctattccagtgtacaagctcaataagtacttgtcataggaaagaatgtttcatgtcaattaatagtggaaccctttgcaacatactgagtccataaaaccataaaatcccaattcagttggcttggaaatagcctaacttttgcttcagtgcggcctaggagggagcttatgccacttagaagaatacattttgacaaatttccttgcaatacgaatttaaagatcacctacctttctaaaaatagcaaagaggccagatgagaacaagctttcttacctgtccctaaactacaaagtgtcctcagcgaatcagaaagtatgacagagaaaaaaaagaagaagcacagagaggaaatgaaccaagacaacatcacctcacagcaaccggaaggaaaaacacacacatacatatgccactcacatccgacgtgtgtggttgctcagtagggaaatgcttacagctgcctctagaagcaagtccgctcgctgcatggagagggaaacatgagcatgcagcaggactagctgtcacctcccgcccgcctgcccagagagggccagagcgtcggggaggcaagatgatccaccagcggttccatcctacacttgggtgagttctcagccacttgctgtggcctgtgggagaggagggactcattcaggctcctacttcctgagttggtgccagacatctggtggtgtttccccactgtgaacactcctcaactggggcagggaggacctccacatgccccagaagaggaatgagtgactcccggtctccaagttgacctggaggtgctggttttagtgcaacattcaaaccagcatgatttctacttatgaaattgttctgggtagatgcttcctggtgtgtaagtacatggcccctcccctcttcctactgtcgtcagagagcttacctgacagcaactaagcttttatttttcctgaattatttcagtacttcaaagtgtgggccgtcacttattctttatggtggattagaatcatttacgtccttttcagcctctttggacatgagtcctgactggcgagaaatggtgactgaggattggattctgtgcgtgtcctatccctgtagtcattaggatcatctccaaggggctgaggacaagtgacagcacactgtgttctccctgtccatagtgagccgcccaagagctccacccttacttttctctatgtttattctttcacttagcccattcattcatttcttccttcattcattcattcaattgcctttcttccaccaagggacttgaggcaaattttttatcttgctgaaattttttcaaaatgaagaccatctgtaatcataaaggggacaatcgttctgaaagggttatacataattctaagctatgcagagatcggccaccaatcttttccctttgcttgtgttgagaagtgagagtaggcgctctagtcatttaaactcctgcatggggagtccctccttcccctgcccagaagctggtttcccacccagcatggggtgtgaagagcaattgtccatgacagaatactgggaatctgccaaatagttttcttctttgtttctgttttcttccaagcttggttactttcgaggacattcctggttctaagaatgcggaaagtggagttggtggaaaagaaaggatgtgaaatcagtgtttagctagcgctccaccatttcttgttaatcggttagtttatttaacagctatttagtggctgtcactttgtacgtcaccacttaaacaagatagctgggcacggtggtgtatgcctatagtcccggctatgcaggaggctaaggcgggaggattgctggagcccaggaggtcgaggctgcagtgagctatgactgcaccactgcactgcagcttgggtgacagagtgagatcctgtctcaagaagaagaagaagaagaagaagaagacgatgactaggaagatataaaagcagaggtgtaggagaggacaggctgtaagggtcacatgatgtaattcccggtgcctcttcctctacatgtaaataaggggaaagagctatcttgaatggctgtggtaaggattagattgaatagcaaacatttaagcatctggcagagaaggggtatccgaagtagtcagtgtcctgcctccctcctccaggcctcactgtgactgagctggctgctgacaacctgagtctttatctcatgacctgagagctttctccaagccacacagggacaactgtaattgcccaaagggcagacgaaaattcccagaaatgaactcctcaaaggctgtaaatattccagctccctcagtcttgagtggaataatctacacggaatcaagctccagttgcccacagtggcggggcccttcatggcttctctccttccctggatactccttcactccccatcaatgcttcctgggatcatttcttaaactacatgtcctcgaactctgcattggggtctacttctgggggaacccaagctaagaccaccggccacctactactgtaggtacttaaagagtttagtcgtctgttttccaatgatcagctccatctccatttgaccttagactctgagttttgatttcccacatatccattcaagggttgtagtgggggaagatcctcctcctcctcttctggatttggcttggagaaagggcacaggcacagcatggagagcaccttaggcttgacatgtctccatgcaaacccgcacagcacgaagatgcgtcctactgcaaatgaccttcactttgtcctgcttatctgtcaccttcacaactcatttgatgaaaatttctgaagtgtggaacacaaataggagaattttatatagcacaagatacatagatagagcatgaaatcacattgaacctgatcttaaagctactctaactcttggctccttactgttttaacaagagaaagtcgatctgaggctaggagccatcaacaggcactggtagctagctacaaattaatagcatggctttattttcctgtatttgctttttatggttaccttatattaaaccacaacggcctgttttttttttaatttgtaggaatggtataaacatttcttttaaaatataaatctttaagttttaaaaaagtgaatttattattactattattatttttgagacaaagtctcactctgtcacccaggctagagtgcagtgtggctcactgcaacttctgcctcccaggttcaagtgattctcttgcctcagcctcccaagtagctgggattgcaggtgcccaccatcacacctggctaatttttgtgtttttagtagagatggggtttcaccatgttggccaagctggtctcgaactcctgacctcaggtgacccgcccaccttagcctcccaaagtgctgggattacaggcatgagccactgcgcccggcccaaaagtgagttaatttaaagaaaaaacgttgctgacagtcctgacagcacacagaatatggcaaaccctggaaaatggggtttgattaagagaagactaggaaagccccactagaacgcaggctcctcaagggcatggctgcatctcccagtgccttccacccagggcctgcctggcctgtgccactgggctggaattgtatggattttggatatcccaggaagcaggggtccaagctgcccttgttagctacaggcttttttggtcttcaaaatatacaacttcactttgcccacagtggctcccaaacgtcccagcagtgatgcagggtagtatagacacctaaaaatgggtacaacacaagctccattgtatggtagttccaccctaggtaagaatccatgaggctccgatgtaactcagcaatgtgagctgaggggacgggtggaggtatttcttcatctgcattccttttcacttttgcttcagattagaagctctggttcgtgaaggtctgtaattcacttaactagaggtcaatgaatgagaaatttttttgaacagctacaaaaccctctactttccaaggaaagtgatacatgagggtgaataatttagataaatttagcttgaaaaaatttttaaatattgtaacattttatactacaaaaaagtatatataaggtatccatatattctaaataatcataggaataaaaacataaatacacatccacctgttaccccactacccaaccctgaaagcctgctgtgtgcccctaaacaattgtatccttctctcccaatgcccactgggttggtctatgtttgtgtggctataaatacctgaggctgggtaatctgcaaagaaaaaaggtttaattggctcatggttctgcaggctgtataggaagcatggtgctggcatctgcttctggtgaggcctctggaagcttacagtcatggtgaaagatgaagggggagccagcatcacatggcaagagtgggagcaagaaagctgggaggtgccacactcttttaaacaatcagatcttttttttgagacagaatctcactctgtcacccaggctggagtgcagtggtgcaatcttggcttgccgcaacctccacttcctgggttcaagtgattctcctgcctcagcctcctgagtagctgggattacacgtgcatgccaccacacccagcaaaattttgtatttttagcagagatggagttttgtcatgttggccaggctggtcttgagctcctgacctcaggtgatccacccacctcagcctcccaaagtgctggggttacaggcatgagccactgcgcctggcctaaacaaccagatctcatgtaaactaattgaagaagaactcactcatcaccaaatagatggtgttaattcattcataagggatccacccgcatgctccaatacctcccactagatcccacctccaaaattggggatcacatttcaacatgagacttggaggggacaaatgtttaaaccatatcattctgcccctggcttcccaaatctgatgtccttctcacattgcaaaatacaatcatcttctcccagtagtctcccgaagtctgaattgattccagcatcaagtacaaagtcgtgtctcatctaagactcaaatctgtccacctatgagactctaaagtcaaaacaagttagttacttccaaggtacaatgatggtacagatattgggcaaacattaccattccaaaagggagaaattggccaaaagaaagggtataggggccccacacaaatctgaaacctagcagggtagtcattaaatcttaaaggtccaaaatacaatctcctttgactccaagtcctacatttagggcacactgttataacagtggactcctaaggccttgagcagctctggccctgtggctttgcaggatgcagcccacatggctgctctcatgggtttaagttgagtgcttgttgcttttccagttaaagggtgcaagctgccagtgaatctgctattctgggttctagagggtggcagccccctttccgcagctccactaggtagtgccctggtggggactctgtgtaggagctccaaccccacatttcccctggcattttcctagtagagtttttctgtggggcctctgcctctgcagtaggcttctgcctgagcacccaggctttcccatacatcctctggaatctaggtggaagccaccaagccttcttcacacttgcgttctgagcatctgcagacttaaccccatgtggcaatcaccaaggcttatggcttgtgtcctccagaactgtggccagagctgtacctgggcccctttgagctgaggctgaagccagagtctgaagctcagcagggcagtagggccctgggcctggcccctgaaaccattcttttctcctaagcctctgggcctttgatgggaggggctgtcctcaagatttttgaaatgcctttggagggtttttgccttgtcttggatattggcttccttttagttatgctcatctctctagcaagtgaatgtttcacaacctgcttggattctttctctaccacagagccaggctgcaaattttacaaacttttacactctgtttcccttttaaatataaatttcaatgttaagtcacttctttgctcccatatctgatttaggttgctggaagtagccaagtcacctcttgaatgctttgctgcttagaaatttcctctactaggtagcctgggtcatcactcttaagttcaaacttccacagatccctagagcatacagtgcaaccaagttctttgttagggcataataagaatgaccccattccatttcccaaaaactttctcatttccatctgagacctcatcagccagaacttcactgtccatatctgtatcagtattttggtcacaaccatttaaccagtctctaagaagttccaaactttccctcatcttcctgtctttttctgagtcctttaaactcttccagcctctcccttaccccgttccaaagtcacttccacattttcagttatctttatagcaatgctccacttctcagtaccaattttcaattttctgtgttagtccgttttgcatcactataaagaaatacccaaggctgggtaatttataaagaaaaaaagtggggaccgggcacggtggctcacgccagtaatcccagcactttgggaggccgagacgggcggatcacgaggtcaggagatcgagaccaccctggctaacacagtgaaagcccgtctctactaaaaatacaaaaaattagctgggtgtggtgacgggcgcctgtagtcccagctactcaggaggctgaggcaggagaatggcatgaacccgggaggcggagcttgcagtgagccgagatcacgccactgcactccagcctgagtgataaagtgagactccgtctcaaaaaaaagaaagaaaaaagaaaaaagggttgattgacttatggttctgcagggtatacagaaagcatggtgctggcatctgcttcgggtgaggcctcaggaaggttacaatcatggcggaaggaggagccagcatatgacatggcaagagagagagaaaaggacagaagggagaggtcccagagtcctttaaacaaccagatcttgggtgcgttaactgagtgaaaactcactcaccatcaaagggacagcactaagccactcatgagggatctgcccccataatccaatacctcctactaggccccacctctaacactgtggatcacatttcagcgtgagatttggaggagacaaacatccaaattatatcacctaccacaaaaggaactattgtcttaaaattttgttagtcattcccttactttactttttgattggcctcctaggtctaagtgtatgcatagacatatatgcataggtatatatacaatttgcatatagtcaatttctgcctgtttgggaactgtaagtaaatataatcatacataagcattcttccaagacttgctctagggtcaacatgatatttctgagtgttatccatgttgatgccaagagatgttgataattcattttcacagctgtatagtatcctattgcatgaatgtatgacagtctatcatttctatcagttggcagtgctaagtcattgacaaaaatgatggttcagagttaggatttcaagaaggcacaattgccaccaaatttatccctgtttcatgcacaaactacttgagcagagaagtgaaaattttgcctcaagttagaagcaggttttagctaggggacatcaaaggagggaaggggtcttaaatgggagaggaagaaagggctaaagtgactccccaagattaaaaaataaaaacaaaaagaaaaaaaagaatcttcctggacagacaatttgtgactgggctagcccatgctgattgtgggcaaattaaggctttcactctcactgtcacttcccctccagataagcccttggggaaaagttctatatgaatacttaatttacaaaagtattgttccccagaccagcagattgggttccatgaaggtccatcactttgcttgatcctgaagagaaccaaatttcatatagtgctcatctataagcttcctattgatgtattttttatattcacctttttctatagcatatgcgactatgcagctaccacacagttatcaaatagtagtgtccatgaacctttagtaacctttgactagtttccatgactctgaaattccccacccacagcttcacttgtaaagagtggaaatatttagaggaagtgagactatcagcagctcagcctcaccatgggaagcattttctcctcaaagcacagtagtatgctggtgccttctgtcacactatcaggacatggctttagcaagtacagtgtcctctcagcacctgttcctcatgcaggtgctttgcatcatataatcgtcgaaacattaaggaagtaatgctctttgtcactccaccggagtggagaagttaaagtcaagagtgtacttcaggggttgtatcactggtttggctttagtagttgtgaggtcttgatgggtgagagtgatccctggcaaatgacatatattgattgattcattgagtgagcaaaggagtaaggtgggtgtattagggttctccagacaaacagaaccaatggaatgtgtgtgtgtatatatatacatatatatatagagagagagagagagagagagatttattttatgaagttggttcacacaattatggagactggcaagtccaaaatcagcaaggcaggctggcaagctggagatcagggaagaactgacattgctacttgagtccgaaggcactctgctagctgaattccttcttgctctgtggatgtcgctcttttttctattaaggccttcaactgattggaggcccacctacattatggaaggtcatttgttttgctcaaagcctactcatttaaatgttaatcttttaaagaagatagctttgcagtgacatccagaagaatgtttgatcaatatctaggtaccttggcttagccaagttaacacgtaaaattaaccatctcagatactgtatccatttcagaaaataatttagtagatattaatatttattgaacatctgttaaggactctgtatgggccaggcaccatattaggtgctggggattcagcaggaaagccagccagacaaaatccctattttcaagaagcttacatatggaagggtggaggtttgagtaattaaaacactcgcagtagttttcatgccttcaagaagcactgcagatacaactcaagtcaatcaaatccattctcccatatacatatggtattggggtatagtgaaaagaggaacagaggttctgacttcctggactttgtcttctactgaggacctcaggtctaaattatatgatgaccatagacacattttaacaattatatacaacatgttattcattatgtagctttcaaaagcacatataattcagttataaaggatgatgaaaattaacaaattgcatacaattgtattaaaaataaagtgacaaaggtattttgtacatgattatttcattttcttcatgagttttttttttttaatttttatggcaaaacagttcaaggaaccacttaacgaaggtgtttgatttcaaaagaattgatttgggaagacagaactgcttgatgatgtctgtttctttgttagctttaagtaactggtttactcaattggcctcttccttcattgtgttttggagtttttttgactgaagcaaagacaagcattaaaaataaagacattggtttatgttgtttagaactgagaatccatttaaaaaaaatgaattggagtatctatgccagattgctcttacatgatatatgtggccatgggcagaggagggttgcattcttaatttatgccctgaaagaatatcaggcttatttctcaaaaggaaaaatacaaatggcaagcaggtatatgaataggtgctcaacatcactgatcctcagagaaatgcaaatcaaaactacaatgagatatcatttcaccacagttaaaatggcttatatgcaaaagtcaggcaataacaaattctactgaggatgtgaagaaaagggaaccctcatatactgttagtgggaatgtaaattagtataaccactgtggagaacagtttggaggttcctcaaaaaactaaaaatagagctgtcatatgatccagcaatcccactcacatatacccaaaagaaaggaaatcaatatattaaagacatatctgcagtcctgtgtttattgcagcactcttcacaagtgccaagatttggaagaaacctaagtgtccatcaacaaataaatggataaaggaaatgtggtacatatacacaatggagtactattcacccataaaaaagaatgagatccagtcatttgcagcaacatggatggaactagtggtcattatgttaagtgaaataaaccaggcacagaaagacaaatttcacatgttctcacttacttgtgggagctaaaaattaaaataattgaactcataaagacagacaatagagggatggttaccaggggctgggaagggtagcgttgtgggtgggggggattatggggggcaggtaggggagatagataatgagtacaagtcatagaaagaatgagtaagacctagtatttgctagcacaacaggatgaccgtagtcgaaaataatttaattgtacattaaaaaataactaaaatattgtaattggattgtttgtaacacagaggataaatgcttgaggtgatggagaccccatgtaccctgatgtgattattacacattgcatgcctgtatcaaaacatctcatataacccataaatatatacacctactatgtatccactgaatttttttaaaaagaaaaaaaacagcctttaattagaatatttgcatgtcacaggctagggctaataatccaattaaagttttaggtaagggctggaggacacagggatgtgtagcacacgttgatgtacctcaaagaggggaattcttctaagaaagcgtcatcacgatttctcacctgttatctacaaccttcaacccattgctctaaaaaatcttacatttgagttgaagaaagaacaaatacgtttgtaaaacaaaaatcacatttaaaaaatagctaaatatgttgctaagtgaaagaagccaatctgaaaaagctgtatattgtatgattctaactagaacgttctggaaaagataaaactagggtaccagtaaaaagatcaggggttcccagggactgcaaggagggagggatgaataggtgaggcatggaagatttgagggcagtgaaagtcctctgcgtgatacgatagtggtagaagcgtgtcactgtgcatttgcccaatcccatagaatgtacaccaccaggtgcgaaccctactgtcaactatagacttggggtcataatgatgtgtcaatgcaggtttattgattgtagcaaatgtgccagtctgtggagggaggtcgacagtgggagagcctgtgtgcatgtgggagcaggaggtatatgggaaatctctgtacctttttctcaattttgctgtgaacccaaaagtgctctaaaaaatagtctttttttaaaaggagctaagtggcctctttgatgttcccccagaaggccaagaaagtgcccaacaccggacgtttgcactgacagtccctctgcctggaaggaccttctgggagatccctgccaggctccgtccccttcctcattcagctctgggccacaagtcacccaatccgccagccctccctcacatgccatgcaaaatggccacggggtcacctctgtcaccctccccgttgtcacctgtcctcaacaccacccgacgccgtgcagactgacgtactggcttatggtctgtttctgcctctgaaccgttggctccgtgggtgggtgaaggacgttattttgtcccctgctgtgttcttggcacatgggaggtgctggagggacatctgctgaaggaacgagtgagtgagccagtgagtggatcatccagtgagcgtgagggacgggtgctaccaggcagggaaagaagctctctgtaagcagggaagcctgctcagaagtgaagctggtatggcccttgcaaaacgggaaggacacagaaaagcatgaggagattgtgaggggaagaaaaggcggcttgaggagagccttgtgcacctagtgggtcggtgagggaaccatttggactggaatgcaggtcttgggaggacaggggtgggagccgtcctccagccgtgtgtgcgtgctgtaggcaaaggcagacttttcctcaggaaagcaaatttggatccgctccagcatttgaataacagcctgattgaaaaacaaagctctactctacatagcagagcaaagaatggttttggtcagagcatttttcaaagacaatgttcctcacttcttgcttcagcataggaaaacgtcagcagagcttcggtgcagcgttttactctaagcaggcctgtgattcaggggctggcctccttgggttcccacaagcatgatttagcagagagatgtgtctatttcatcattaaacgaaatgttccttagggaaaagactctttatatacctcagttgacatccctaatgatattccctgaatacccagttagagaagtgttagcctcttctatgtcatactttctatctgctgagtaatttctttcttaattgcacagaagagccacttggcccaacactccctatttgagttcgacctagcagagatttctttcttttgaggctatgtgaaatgcagttgagcatgatattgaaaacatgaacacaatccaaaagtccatcagtagggtccttattacaatttggcaatccacactttggaatactgtgctactggtgaaaaagaagaaagaggatatacacaaagatatgaaaagatgtgaatcaaatacaaagcaacaaatgcaaaagaacatacagtacaagcccatttttatctatctcattgtagaataaaagtctagcaaaatatagactcccaaatatttttaaatgttttgggattgggtttataagacaggttcactttctgcagtagacattgtctgtctttagatatttaaaaatgagtttacgttgctttgtgattgaaaactggctcaaattttaaaaactctgtgtgtgtacacgtgcacaatcactcatgcatgccaggttgtgtagtacacaggagcaatggttggagaaatggggagttcctaataaaatttaacagtaggaatgtgtttttaagattattttacttaaaaataataattcttctcccctcgtcaggcttatcttttgaccatttttgttttggcttgttttcttgttttgttaatttgttaataaataattgataaaaataaatggcaaagcaaaaaaaaagttctaagcaatgtaagaaagtcatggcatactctctaaggagattctttctctgcagcatgggaacattcacaaagcaactatcaagcaacataagttggggaaatgatcatcagggttcaggaaatggacagattcaagaaggttggagtgcttaagagagaaccaactgcctgagttcaaatccaacctgtaccacccacctgccatgtgctattgagcaaattactttacttttctgtttctctgtttctcatctgcacaaaggaggtaataagagccctacctcaccggtggttttgaaggttttatgagtcaatggatgattttgaatgttacatgagtcaacacacacacagcacctaaagtggtatctgacacattaagtgctcaatacatattagctagtgggaggaagaggaggagagggaatgagttttcataaaagagaagggatgtaaagaatgagtagggtttgacagaaaaaagaattccagaagatcaagaaaaaaacaaaacccaaaggcttataggatacatgaaatgatccagttaaattcaccccaacctctgtaaagaaagccgaaatgatatttcatgactagatgataaacataagcagatatgtacaagcactcaaatgaaatagaaggagggttttttaaagttagctttcctttattattctgtagacccttctgtgtgtcagtcatcagtcaacaaattcgtatggagctacgtggtggtgtagctcccaccagcatggaactttttccaagtgggtttaaagttggaaaaccatggcgatcatttgttttattgtgtgttgattagtagcgtatccaagagttgtggtagttacttcggtgtgactcattcaggaatagaagaaagattcattgtattactcttaaaatataaacaattcttaatttttctgtgctaatgaagaaccacaggaataaatatagttgatagattaaattatgtttattttattttatctgtaaattaagcaaatcttcattgttttgcctttttgaaacttttctccatctgtttgggtttctgggtaccccccagccctggtgtcttcttcccagcttgcaaacagccatcagggcccaagggcaaggggagaagccactgagggccagactgcgcacagtagcttccaagcaggccctgggtaattgagttgcttgaccttggcaagcacagaaccagcctcatccacgaaaacacgaaaaacacatgtgactaggtgctgagactgatgcttttgatcaccagccctgaccacactgaagagcccttttaagaaccaaggtccagtctcatacaatcccgagagttcagacaaaaaggccaaaattccatagctctgccggacttatttgcaaggggtgctgtgtagaaggtgccgaaatggctagtagctaggtttaagcaattacagtcactagttggttcaaagggatgccattcactcctggaatcctgctgtcaatgattgagctagggagtttggtctccagggaagagttaaacattagacaggaaccattacaaaactttccactaaaaataagttccttgtaagagaagttgagagacttgctaattgcagcttactctaaacctaatgacagtctgtatcatttgcaaagaaagcacaggatgtgtgaatgatggtgagggaagtggggagtcttggcagatagatctgactctgatagatgcagttggtcctctagactagtgatccattttggagtaaactgcattgggagactgatcaaatttcctttctccaggattcttaccaacagtaaagactgataaaacacatttgtgctgctgtgtttttcaaaagctcggccatataataactttaacagactccctaaatttcaaacatttccttgatgtaggatgatcacaatagaaaggaatgttattctcatccagccatcggtaagcttttgtcttccttaatcccagaaactaaatcactggctacctcagaggctctgacctaaatcttaattgatgcccactgcactttcagaccactgtgtgtgattttaaccagacaaaccaaggaggaaggattaatgaagaaagcctaatattttgaccaatcatagagtccactgcagtgccctttccattttaattgagctttatacggttctcctctcgaggtaaccctcctttcttaatgttcagtacagcaaaaactaatctaggttttctttttaatgtttgatttatctcttcaatcttggtgctaggtaacaacattggatcaaaatattaacagccaagatttagatattattttacaattaacacagcacattgactcatattatttcactttcacagtggtcctggggcatgtttattgtatctcccactctacagatagtgaaactgaggagatcacggtgggaaagatgacgtaactcacatgaagttgggcaactgatcagatgacacagctaggactgaagcctgggtcccctaagtcatttgcttagagctcattcaatgacgaggcaactccttgctgtgcatcctttcagcacacgttgttggtgtgaagacgctggttttcatcagactaaaatgcatcttacttcaagataggcagtttctgttttggtttccacctctcatacattgcttttaaagtgccaacctctaatggctatcccatgagaaaatctactgtaagtatgaagtgaccctttggtactaccagtttttcatcctaaatcccttttctttcttctttcttttcctttctctctttctttcttttttctttctttcttcctttctttttcttttttctttcttcttttatttctctctctctctgtcttgctccccctttctttctttcttcatttctttctttctttctctctgtctttctcctttctttctttctctttctttctttctttccttccttccttccttccttccttctttctcagactctcactctgtcacccacgcacaatctcggctcactgcaacctctgcctcccaggttcaagtgattctcctgcttcagcctgctgagtagctggggttacaggcacatgccaccacacccggttactttttgtagttttaatagagactgggtttcaccttgttggtcaggctggtctcaaactcctgacctcatgatctgcccaccttggcctcccaaagtgctgggattacaggtgtgagccaccacgcccagcctctttctttttttgactgtgtctcttgctctgtcactcaggctggagtgcagtagcacaatctcggctcacggcaacctctgcctcctgggctcaagtgattctccagcctcagccccccgagtagttgggtctacagatgcatgccatcacatccacctaatttttgtatttttagtagagacagggtttcaccatgttggccaggctagtcttgaattcctgagctcaaagtgatccgcccacctcggcctcccaaagtgctgggattacaggcgtgagccactgcgcccggccccattttattttctttcttctttttcttggcatttgttatgatcaagccttttttttaagtactgaatatccatggactccttccagttttacctcatcaaaatgtgcttgcagggaaggatttggtcttgttgatttcaattaatgtaactccaagccaccactcttctgctattcaccttttaatctatatttcttactatacataagaagctttgcttctctacttatttcaaggagtgtagggtgaagatgaggtttttaaatcacggtatctttcttcagtcctttcctccaaattctacacgtagatgtactgtgcttcagccaacttatctctaactaggacattcagatctactaactaagctatgacttattataggcaggcggtcagcaggaagagctgtttttttttgaaagtaggacaagaataggtctatggaatgttggggtcacttggtttcctcaatggaaagaaacgggatgtttctgcattaactagaacacttgaaaggtagggaggggtgagggtgattgagaaatgatttcaacaaacagaacattaagtactctgtttgtcagacagcgtgttcccatctggggggtgagtggcagaaaacatagtcgccatcatgagaagagctcccctaaatctgcccacccacctccaactcttgctccagtcagtttttctgaatgcccagcctgctacactgaccctcaccgctcttaccccggtgccagggtgagagaggccagggatcaggtaaggaaagaggagaggaaatgcagaggctccatttggcttataaaggaactgtaccataatagttattattgtttaaaaaaatagcatgacatccattctatttctctccctcttcttcaaagatatttcagcctcagggactttctgcttgttagtgggatggcgaaaaatgcatgatagatttctagttagtaggtagaagggacgggagattacatcctaatacagtagagtaactatgttttattgagcacttaatatgtactgagtgaacacacctgctttgattcacaaccacttaatgagggaactttggagcctccttaagggttacaagcaaaagctgtggagtcagcttgcctgggttcaaatcctagttgtgccatgtacctgctgtgtggccttggtatagttacttaacctctccatgaatcagcttcctcaccttaaaatggagataattataatgtcacacacctttggggggaattcccaaggccacccccaggttcaatgactcattaggaggacccacaggattcatcatagagacatgcccacagctaagttctattacctcaaagacaaatcagaatcagcaaaggggaaagcaacagaagaaaccagacatgagctaccaagagtcctctcctaggggagtcacacaggacatacttaactcctccagcaacgagttatgacaggtatgaaatgttgtctactagggaagctcagtagatacttagtgccagagttttgatttggagctggtcacttagacaccctctgtctggcatgtacacaaattccagactcccagaaggaaagcaggtgttcagcataaaccatgttgtttgcacacacagttaagtcacagtgagccactcatatcacggaccagcaggaacccctcacatgttcccagatgccagccaagggccagccttgcaagcaggattgagatagcagtctcagacctgctatgtgaactctttactgcttgctaccttttgattgttgtgagattacataaggtaatatatatatctgttgcttacaacagtgcctaatttgtgggaagccctacagatttttttagcccttactattatgcagaaaaaaaaatactcaggtttagaatgactacacagtcaaaatggaacaaactggaatctgaattcacatatccccaaaaaaggttcatgcatctattcacatcaccctaacatgagcaaagtagcatccttcttcaaaccgtaactggggatgttgttggtgggtccctcccttttcaggttcagagaagatggagcctttcattccagttgtgttctgaagacagagcttcttggagctataagcaccattaggttgcttctttctcaggttaaaccactcagagtgcatttatggtctggtacttaatgccccacatgagcatatttcagacttcccccccattccatgaggcttgctttgttgatgtccttcatttttcaggatacgtatccacaaatccataagaattttcttccataagatctagatagtgaatcatctcgccgtaattgaaatcatcccattgtaaaccatttttaggcttaaaaaaaatctgacaaagaaatttctcccacctacttctcccaatgcaaagtagttaatcaatctctttaatcatgggattacctctatcttatctttcaccaggttttctggtctttggttatgtcagtgggcagggcagcagagtgtccaatagctagctgtgaatgctaagcaactgtagtagatgccaaatcagttgcaccaccaaagtctatgcattgaaatgaagtcattgactgcaaccaatttagatatcttttagtattttttttttcaaagacggatttcaaaatgggaacagggctagaagaatcctttcaattttaagttaaaaattatgcatcatcaatgcagattgccatatggttgtagagtaagatgaaacagagtcttagagcaatagtttatttcagcattagcattgttagttgttagacatctgtcccttccaataaatgaagattttgtaaacttcttagtcatttctgtccccatagatccaagaatagaattcacacatggtgactgtttattaaaggtctgctccattaacactcaaatgctaatgcacttccacttaataaaagagcttcatctttgggtctggcagctcatgacatatcccaagtgagtaggtgactatttcctggatgactatagtcaacgcagtgccagattttgacacctacacaaatatctccctttggtgagaaaagcaagcaagagttatagtgaaagaatagtgtgactgcagttaataccataatttgaagaacaaataatggcatctataaaaaaataagatgtgaagctcatagaatataagaatcaaagtgctcatggtagccctggttgctactagctgagtctacacatgctaataaatggcagaagacatgaaaaggcaaagcaagaggcagaacacacagaagagagagaaagagagggatgaaaatggaattatgtcagtgtactcataagtttggactgctagaaccgagtactatagactaggcggcttgtaaacatcatatgtttatttcttacagttctggagactaacattctgaaatagggtgcctgttgaggccctcctctgggttgcagattgctgccttctcattgtattctcacatggcagcaaaagaggtagagagctctctgggatctctttcataacggcactacatccattcaggaggattcaccctcatgatgtaatcacctctcaaagccctcccctcctatcaccatcacattgcgggttgggacttcaacatataaatttgggggtgatacaagcattcagttcattgcaagcagcacagcacaattcatgaagacttttttcttctatgcaatctcccaaatattccttgaatatctgtacctctgcctttgctcagactaatttcttctttttctccatatgccaggctcagctcacataccacctacttcttgaacaccccagcccatctcagcccccaatgctttctccctcctacaaactcctagagcttccattgtgatgctgaatgttgttctttagggtcgcaattagattgtataggtgttcttcttgtactcctaagtttcttaaataaaaatgacatggtttttgttctctcatcagctataagcatttcctaaccatctgctgtgaatagggatgatatagtttaggtttttgtccccacccaaaaatctcatgttgaattgtaatctccagtgctgaaggtggggcctggtaggaggtgtttggatcatggtggtgcatccctcatggcttggtgctgtatttgtgatagtgaggtcttgtgagatctggttgtgtaaaagtgtatggtacctcccccctgccccttgacactctgtctgtctctcttgctcctgctttcaccatgtgacgtacctgctcctactctaccttccgccatgattgtaagcctcctgagacctccccagaagcagaagcctctgagctttctgtaaagcctgcagaaccgtgagccaatttaacccagtctcgggcatttccttatagcagtgcaagaatgccctaatacagaagataaagaggatatgatctagagtttggctggactttaaccagagcccccatccctacaactctgaccccctgacactgctgtctgagcacacagctgtcctttagcacctttagccttgttttcttatttccagaacaagctgcatatttctggagaccattcctccactatttcactttttgaataaagcttaagtgcaccaaaagtaaatggcaataagaaaaatgtaccatacatgcctcacacacatgtacgctcacagtcatacacacaaacaagctgatacattagttttactttggctcacctctagaatctgggtggacagtctgctctatgccttttctgttctttctcttccattgtccgcagaatatgaggaccaaagtgctcattgttgtttcttgaattctgcatgtaggcaaggagtggtagccttccctgatgtattagtcagttctcacactgctataaagaaatacctgagactgggtaatttataaagaaaagaggtttaattggcccacggttctgcaggctatacaggaagcatgatgctggcagctgctcagcttctggggaggcctcaggaaactttcaatcatagcagaaggtgaaaggggagaaagctcatcttccatgactggagcaggaggaagagagagagcagggaggtgctctctcaccaaccagatctcatgagaactcactcactatcaggagaacagcaaccagggaaaaatctgcccccatgatacaatcacctcccaccaggccccacctgcaacattgggaattacattttgacatgagatttgggtggggacacagaggaaaccatgtcacctggctaagtggtgaccacacagttctcacctgtgtgtgggttattcactttctgctcttccctaagactctccttaaattcctggcagactcttgctcatgctctcctttgggagttcttcttctgctctacaatgctttctgcatttgaaccctttcctcatatgtcacaccctcttcaccctaatgggggtttattttgcttgatcactctttaatccatctgtactttcccttttgagtggcacccaagactgagcctcgttccaatagcagtgccctggaaccacagatttgggagctgaataggactgtcatctctttgctgtgtcacacactagtgatggaagcctgcagaattctcccacagatggacagtttagttatgaatcccacaccaacttctgctcatcaaacatcctcctttcatgatataggcagaaatttcagaagattatttgataatgccttgttttattgttttgacacaactgtcaaccacgccacttcaagatgtggtttgtccctcatggcatgaaacaggtctcaaacgacttgctatctggcaacaaaatggtacaccaacacattaaactccttcaacaggagaacatcttcatgacaaagacagtggttcgcaggttggacaccaatcttataggatgggtttccttggagttcagggttaacaacatgtggcaacttgtttgggatattatgaaagagaaaagtattctattctgccttaaccatggcggaagcagcccttgaggagctgctgtcatgacttccagtcatccttctaaaggaagatgtctagaagaatgtggggcaaaagtgaagtttgtacagagaatgagaggaacttacagataactttgaactggcatatctgtagttatctctattaatgtgaatttacaaaaagttaactagtgaaatagggacagataggcatttgttctctgaagccatttgggtatgtcttcataatcccaggacattgggcagaggcttcctctatcctcttactcagagaaatccaaatatggcaaatgatccctgtagcttcctgggcaaaggcccatttgcttctgattctttcaagggtaaacaggaaggctttatagaaagcttcagcttgtttctccaagagtttcctaacacagagataaatacataccttcccctgacatctctccaccctgcccacgtgaaacccttgctggctctctgtctctgtaacccctctagcctttcctttctgggggacttgccagcttgctactccacctggagaacagaacaggatggagtagaacaggaattttcaattctctcctttatatacagaagctctctcaagtctctctaagcttttcagacttaacgtgtctcctacaaaatatttgttcctgactcaccactaagaagatgaactttaagaattgcacagtttgcctctcccccatgataatatgcatagctaagccacagcaaggctacctttctcattcttgctgcctgccgatggtgtgatcttagcccctctctcagtatttgaatttcctcggtctttatgaatggtaagagttgtttaagtctctccttgcaacactccgccacccaccattcatcccataatctttcacatggaagactgcatgtattttgtaaaaccagggggaaaagtcctgattctaaatcaagaggcaattattaagagtggcacgcaggtcatttttcttccttcctccaaccaccctgtcaaccaccacccgccatgttcacaaaagcctccaaggctacctacaagaaaatacccagctttcctctagggtgacttgactcttcaaactgcttctcagtggaaaactttttaaacgctccgttttatttattctctaacagttttcctgttaactaggtttggaggtgttttctgaaacatgaatgccattaatccaacaccaaaaagattccagaactttccagggcacacatggccaagccttccagaccagtttgcactggaggagcgttctgcactggcaggcgtttctgcagcttctgacatcagggaaaaggtgttattcctacagtgctgctgacgttatgtaacagcagagccattgctttttttttttttttttttttttttttgacggagtcttgctctgtcgccaggctgggagtgcagtggcgtgatctcagctcactgcaacctccgccttccggattcaagcgattcccctgcctcagcctcccgagtagctgggactacaggcatgcagcacgcacgcccggctaattttttgtattttagtagagacggggtttcaccatgttggccaggatgatctcgatctcctgacctcgtgatccgcccgccttggcctcccaaagtgctgagattacaggcgtgagccaccatgcggccccatagcttctttagttgaatggctgcctctggaggcgggacccacagggactgcctgggtggaagaaaggcagggaaggctgctttcactcatcaccgcagactcactgccattcagctaggccgatcttgtagaactgacgtagaaaagattacttctccataagtataggttctggtcagaaccaaactctctttccaaggactgcttcctgcctgtttgtgcacacatcttgttttcttagggtcattgggactgaatactaattaatcgaggtctgcatgatcagcaccgaagcaagcgcctgaaaagagagtgaatcttttttaaaagttactttattatttgtatttattttctgggtgttgtttctgattccaagtagttacataaaagttgcaaagccagttaaacaccctctgaatgttcctgcagaacttggactgggcgctccctatttagaggttaataatggtcagtggctttctcttcctttctaactttatttggggtgtgcctagccttgagatctgggttgtggccatgaataggtctctgtagtccaagaaacatttctcagactacggaagatgtgtggaaagacagtgccaagctgcctgccgctgtggcagcaccaacggagaagaaaaacaagccaaaggatgcgggtgtgatcagggcctgcgcaggggttggagtggtcatttggggcttccagagggataatgacaagtttatccacaggagtaaagggttagagcagccagaagacgcttgtgtaatgtcccagcaaatcaatttaaagacttaaatatgacaacatgctaaagaaagcctggaaggaattggtgggtgaaaaggaaatctgccggccttcaaaagtgaaaaacgaagcaaaatggagctccaaaaaatggtggctcaacgagaccccagtgggcttggctagaggctccggaacagaaggcctcagtcacctcattgtattcagcacagtctctaaagctgagagcaggaaatcctgttgccccacccatgtcctcagctgaggtcccatgagacaatattccttagataccagcagaaacttttcttacatgcgaaggggtgtaattcacaatattctttagaaagatggttgaaaggtcacgtcattcaggccataaaacatttatccacacatttattcatcaataatttactgagtgctataccagggggaggggaaagggtggggggggtgggttatgatgatgccaacgattaaagagaccagtcaagacactcaagtgagcctgtggtctaaaatgatgctactgaaggtggcagatgcccacctgggagtatcttaggaatgcaaattccagccccgcccagccttactgaaacagaaaccctgggggtggtgcccagccatctgtgttttaacaagctttcctgatgcacggaaaatttaagatgtatgggaacatggtgtctcaaacaatgatgtgtcctggccatttgcgagatgtgtggaaagtaatatattattaatgatagttagcataccgacatttgtgaataatttatatgtatgtcacctgcaaagattttgtaaaaatacagatccctggctccacccaattccaacggagtagaaatatccaggtgtggcaggcagtatttagttttaagacttcccaggtgactcttaggatccgtcaggtgtgggaaccagtggtctataagagccatttgccccataacaaagagaaaaaatcatggaattctagagggtggtccctcggagagcaggtttccccactcccctaacaaatgttaggcagatctcaattgaaacacatacaagagaaactccaactgcagcagaaatggagtggaggttgcttcatactttcctttctgcagtggctgttgcagctcttagtaaaaatctagagctctcggccgggcatggtggctcacgcctgcaatcccaggactttgggaggccaaggtgggcagatcacgaggtcaggagatcgagaccatcctggctaacacggtgaaaccccgtctctactaaaaaatacaaaaaattagccgggcgtggtggcgggtgcctgtagtcccagctactggggaggctgaggcaggagaatggtgtgaacacaggaggcggagcttgcagtgagcggagatcgcgccactgccctccagcctgggcgacagagcgagactctgtctcaaaaaaataattaaaaaaaaaaacctaaagctctcaaaaatatggtttgaaaagcatggatgtttctatcaccacctcctcctcctgccacatacgccccattcattgatgaagaaaccaaggctcagaaaagtaaaatgacctgaaaacatgtgactgaccattcaggtctgcccaagactaaaggcatcccagaaattagagcgttcagttttaaaacagggacagtcccagaccaaccaggatgaattcgtcaccctaggtcggagacttcacgacacccacagttcttgcgttttggctgatttattattgttgttgttgttgctattataccatattactgcaagaagaattcaaattactattggtttttaatttttttttaaatttttctagccccttgagaagttcttactaaattactatggtttccttttaaaaaccatatttgtttttattccctcattccagaaggatttaagggagtaatacccttattttatgtgttttgaaatacttgtaagtattctaaaatactctggactattcctgtgtccatgtctcctctatctgacttcagacccaccataccatatgcattttctctttggcttccatatatttgtgtgatgtttgctatggcacctactgtgccctactgagatctgtgtattagtcagaactctttagcttgccagtaaaagaaaacaaaaggatggagtatgtcagcttgggtagcagaaaagagcttcaggcacaagtggatacaggggctccacctcatcaggacatggtccctctttgaacccatagcaagatggtcacatgcagctccacacacccgcatcctcccagcaacccagctgacggcatcttgtccccagtagcttttgtaaaagtccctaggatgaactctgtttgggctgacttgtgctatgacccttccctaaaccagttgcagcccccaggacaatggaatactctgattgtccagactgtggccatgcacccacccctggcaccagggtctaagaagagagaaatgcaagtctcccaaaagaaagtcaaaagatggttcctagaagcagaggaggaacagatgctgggtaggtgaaaacagcaaatgtccatggtagtcttaaacagttcaagagggctgaccaactgattggctgatgcacgggcaacagcatgcagctccatgtcttcctctatccccactctgctgagatctaggtactattttcccctgaaacactaggttgcaagactccaaggtcaccattgtcagttctaattttgaagacacgcaccacatttagctgaagctagcagcagccccagaacccatgggactccatccgaaaaatgataagccctttgctgggctcccaaatatggagctcctgagagtgaggagctggtgactcatgttctctgtgctttggttgcccccacgttttccagctgggttggtgacgtgggactcagtactttcttcaatgcgtcctgtacacaaagaataaatagccccagagctctttctttttcttcctgcctttcttcctgtaattcattctcagcccaactcagctttgttcaaaccacagtatttcacattgcctggcaagttctgacacagctgcttgctttattctttcagtcttctgttaagccagaggtaaagttataccttgtggctaatttttagtctgtaaaccttatcccttgttcaagccgaaatcttagattaatcagcatgaaaatgccagctcccccaagaccgttgaattatggcccccatcactcttcctgccctgacattcatttgagtccctttcaacttttacaagttgttttctcttatccatgagcaaggtggtggcttgggcctttttaggcaattttcttttcttcttaatcacctgcccctattccatccaatctatttcaatttctatataatcatgtaatacatctctaatttgagtcaccaggttttccacgttaaaggtgggctttaggaatgtttattttacaaactaatagaacttccagtcctatggactctaactagtagtggggccactgtgtcagcttcccagagctgctgttacaaagtaccataaactgggtggcttcagatgacagaaatagattttcttacagttctggaggccagcagtctgaaatcaaggtgctggcagggccacgctctttctgaaccttcaaggggaggatccttccttgcctctttcagcttccagcagccccgggcattcctgggcttgtggcagcatctctcacacctgtgcctccatcttcacagggccgccttctccctctgcgtctctttcacacagagttctcttccccttttacaaaaacagcagtcatattgtatcagggctcaccttcatgacctcatcttaacttgatgaaatctgcaaagatcttatttccaaataaagtcacattcgcaggtgcaaggagataggactcccacataccctttcatggggaaggaagacacaattcaacccctagcagccaggaaagagaaaaacagggacagaaaaataactctttgatcttggtcaaccaaaaaggggatcctgatgttctcagaggatgttcacccagaaagagcctgggaccccgacaggaacatctggagatggaggcgaaagcctagcagcaaaggtgatcgctcaagagggcaggagaatccactggagggcaaaagccaaggacacatttgtgcttgaagagcctactgtgtgccacatgtgcttttatcccattgaatcctcaaataactctgccaaagagttgctattattcttttttaatacatggagaaactgaggctctgattaaataatgagacccagattataagtagaaaagcgagatcatgattgctattaccgctgtcacttctgtttttaataggcattggatctcttgtgctactatacaccaaggatgttacctgtattaactgagatcttcacagctcacaaagctagatattgatggccttatagagatgaagaaacagaagctcaaagagtttcaatcacttgcctgaagtcacacaagtattacataattcagccaaaatttaaactctggtctttctgactggcaggaccattccttaccatgatgccatgttgctggtggacattagggtatctaaactagggtagtcctagcttcagagaaagaagctgtataaagaaaccaaatgattatgcttgaggcttaaccaaagcaatataaaaagtgtatgttctcaggggaatgggcaaaacagaagagaaaaaggccggccaccgagcggctgtgggtgaatgagttaaccaaagagcaaatgtctgagttggatcatgaaacagcagatcaagtgggctcagtgtctgtaaacatctacactgcccatgaggacaagatctgtatgctccatctacacccagaggctgaaggaatgcctgtggtgtagacaactcacttttctagagaaatggagaagggattagacatgttaaccctgaagaaaaggaaacttggggtagggtaggctcagaaagtcttcagaggttgggaacgtggcccatgaaagagcagggagactggaaagggaccctgcctgtggaggcagctctgggccccacttgaacacacacgggtgaaccacttgacccaccttacagtgaaagaagctggcacctgtggaccactggagaaacctcagtagccatctggtgttccccaatgactgtgttgctcacaaccctcaagagtcctttgttgcttttggaattgtagggctggcaagatgtcttcacccactgctagattcatggctgaggcccctataatgaaggacagatgaacaagagaagaacatacaaacgcatagaatataagttttacatgacacagaagcctttgaggggaaatgaagaaccagagaaacagggaaacctgtgtatttgctatgctcgattggatgaagagtggacagtcatggagaggcatgaccgagcaaagcgggtgataacctggagggaatgtcaccacatctgttggctcagattctcctctgtgtccttgtgtcttcagaaaaaggatgttcctttcctctgagtatgcgggcatcactcacaccagggtccaatgtcctacttcaggggaaagtcaggaaatccttcctgggactgatgaccggcctcagagagaagggtagaacaagggaaggtgagagtggcctttctgcttttgctgttttctcaaatgccaattttctattttcaggggcaatatgtcctgaaccccatcaggatgaagccccagctccatgaagcccctcttgaactggtccatcctactgttccagtctcagctccctctgctccaggccttgaacttcacattccagcctggggactcctggcagttccctaaatatgcaaagagctcagctttctttcctggtcctggtcctggtcacttggccctctctgtctctcccttccttcttcccatctctcttcctttctggctcatgtccctcgcacatgctgtaaactcttcctggaacatctcccttccacctgtgaatctcttgccagctcacttcttttctccctttaagaatccacttctcaaaagaaaatggcaactctgtgaggtgatagaaatgctgattcgcttgatcattgtggcgtccacaatgtatatataaaacaagttgtacacattaccatgtataaatttgtgtttgtcgattatatgtcaagaaagacaaggaggtgtggaaagactgcacctctgtcaagacgcctttctgaccaccccccgaccctggttgacactccctgacatgagcccccgagtgtttacctacgctatgtgtatcagggcatcccgaccacttgctcactcacctgtctccccactgtgaggtcagcggcagggccttgttcagtgtcttagtcatatcccctccagcacccaccatgacctctggcactaagtaggggctcaataagccaatcattgtgttgatgtaccagtgacattgagggaagaccaagctcgccgacctctaagatcctgtccactctgagagtctgtgagtctgtatttctgctcccacagttagtcacggaggaagttgccaaagcagatgatgagacttctgtttggggttgcccaggtctgcctggcctttgcaatttgtaatcaggtcctttgaaagagaaactgaactgagagaaaaacacagtttggatgaggcaagagttgcaaaataatgagttatgtaatggtgatggtggcctgtggtagcatctttggccctgcccagatgatacaagactttgtatgtatacccttgagcatggccaaaaggacaattgtcaaaaccacggcttaagtgttcaaaagcctcttttcccataagatgttgcctcttgaggtcagactgaaatcctgtacctgtaataatttcctccttaggactggatgtacatgaaaagattggagatatatatgtaccttttttatatgccatgtaaatggtataacccttgcactctttggccattaacagccaattgtcaattagtttattgtgtattagatcaaactgtattgcccaggccagctcctgaagaactgtgaactatgaacatctcagcctagaaggataatgtgaccttcaatttgcacaccatccattgtctctttcaaactaagagcctctctaagctagataggccaaggattatttttttaacttttattttaggttcaggggtacatatacaggtttgttacataggtaacctcatgtcatgagggattttgtatagattatttggtgacccaggtactaaacctagtacccattagttgttttttctgctcctctccctcctctcaccctccaccctcagttagttcccagtgtgtgttgtttccccacatctatccatgtgttcttattatttagctcccacttataagtaagaacatgcagtgtttggttttctgttcccgattagtatgctgaggataatggcttccaattccatccatgtttctgcaaagaacatgctctcattctttaatatggctgcatagcgttccatggtgtgtatgtaccacattttctttatccagtctatcattgatggccattgtggttgattccatgtcttggctattgtgaatagtgctacaataaacataacatgtgcatgtgtctttatgatggaatgatttctatttctttgggtatatacccagtaatggaattgctgggtcaaagggtatgtctgtctttaggcctttgagaaatcaccacgctgctttccacaatggttgaactaatttacactcccaccaatggtatataagcattcccttttctccacaatcttgcaagcatctgttatttttttattttttgttaatagccattctgactggtgtgagatagtatctcattgtagttttgatgtgcctttctctaatgattagtggcattaagcttttttcatatgcttgttggtcacatgtatgtcttcttttgaaaagtgtctttttatgtcctttgccaaatttttaatggcgttgttttttcttgtaaatttgttaaagtttcttatgggttctggatattagacagatgtaagatgcatagtttgcaaatattttctcccattctgtaggtcgtctgttccctatggtgatagtttcttttgctgtgcagaagctcattagtttaattagatcccatttgtcaatttttgcttttgttgagattgcttttggcatctttgtcatgaaatctttgccagttcctaagcccagaatggtattgcctaggttgtctttcagggtttttatagttttgggttttacatttaactcttcagtccatcttgagttgatttttgtatatagtataaggaagggatccagtttcaatcttctgtaaatgcctagccagttattccagcaccattattgaacaggactcctttccctgttgcttgtttttgtcaactttatcaaagatcagatgattgtaggtgcacagctttatttctgagctctctattctgttccattggcctgcgtgtctgtttttgtaccatgctgttttggttactgtagccctgtagtatagtttgaagttgggtagtgtgttacctcccgctttgttcttttaacttaggattgctttggcaattcagactctttttttggttccatactaatttttaaatagttttttctaattctgtgaagaatgtcattggtagtttgataggaatagcattgaatctgtaaattgctttgggcagtatgtccattttaatgatgttgattctttctatctatgagtatggaatatttttctatttgtttgtgtcatctctgatttctttgagcagtgttttgtagttctcattgcagagatctttcacctccgtggttagctgtttcctaggtattttattctctttgtagcagttgttaatgggattgtgttctgctctcagcttgactgttgttggtgtataggaatgctcgtaatttttgtacatcaattttgtatcctgaaactttgatgaagttgcttatcagctcaaggagtgtttgggcagagactatggggttttctagctataggatcatgtcatctgcaaacagagatagacttcctctcttcctatttggatgccctttatttcttctcttgcctgattgccctggccagagcttccaatactatgttgcataggagtggtgagagagggcatccttgtcttgctccagttttcaaggggaatgcttccagcttttgcccattcagtgatgtgctggctgtgagtttgtcacagatggctcttattattttgaggtatgtttcttcagtacctagtttgttgagagtttttaacatgaagggatgttgaattttattgaaagctttttcttcatctattgagatgatcacgtgggtcttgtctttagttctatttgacccatcacatttattgatttgcacatgttgaacaagccttgagtcccagggataaagcctacttgattgtggttgattagctttttgatggctgctggaaaggtttgctagtattttgctgagggcttatgcatcaatgttcatcaaggatattggcctgaagtggttatttttgtttgtttgttttgttttgtttttcttgttgtgtctctgccaggttttggtatcaggatgatgcaggcttcatagaatgagttgggaaggagtccctcctcctcaatttttgggaacagtttcagtaccagctcttctttgtacatctggtagaatttggttgtgaatccatctggtccttggctttttttggtttgtaggaggctggggatttttatcccagatttataaataaagaaattgagtctcagagagaagtgacttgcccaaagttgcagctcatgaaaataaaaagaagtggccagacatccgatctttgtaccccagtgctcctctccactttgtaccccagtgctcctctccaccctgcacctcttgggcttgctcttctggtggaaacacaaggacctgaggtgaagctggagagtggaggggatggtggagagggctgaggagagcaggctggtgagttgtgctttggggcctcttagcccatggagatacatgaaggatgaggggaaggggttggagcatagaaatggagtttggggagcaggtaacaggagaagctggctgacctttcacaacacaaatttcaggccagtcctgactaagatgctctgggctgaagccaactgagcatgagctcccacagagaaaagaggtttgcacatcctctccacatgggtgcccatgagccagccccctactaagcacaaattcagggttgctgccctaagcagctactggctgagtgatcaaagcaagtcaagagccttgaaaagttgaaagtggctgctcaaccagcagtcagtccagatcctatctataactccagtcctccccagccccctccttccccgatgagagtccagaccagcctcaaacagaaactatggagatgaatcaaagacagagccaagacatctttgcctgggaattctagtgtatccatcataattgggtttattttacccagtaaagagagggctttccactcacctcggggggggggggcctccgagccttcttataacagtacaacgaaagtgaaccacagacatttgttcccttaattaacagcgttgctcttttgggtgggtcttgaactgttagcactggtctcccacattctttagtcagttaagggctgccaccatcatgacatggaatagtaggactgggagaatgtactgaatcagtacctagtgcagaacaaaacccttccatggaacataaaaggtacaaatattacattcacagccatgtttgttcattcaaagagcatcttctgaagactttctgtgtgccagacactgtccccagtgctggagaaaatagacaagatccctgttatcatggagcttatatgctaatggtggagacacaaaaaagccaaataaataaataaacacgctagaccatgtcagagagtggcaagtgccatgaagaacctgaaaatgagacatggtgttgtaggagatgccttagatagggaggtcctgggggcagagtacctggaggtctgagatcagagcttttacgcaaacagagcaggtgcagaagttgtgttcgaggaacaaccaggaggccagttggcctgcaaggcatgagccagggaatggtggtacaagataaacttggaaattgtttatgctctgtctctcacactgacttggccttcgatctcagctaaaatgctgctttacttcctactgtattggtgtttgcaaccaatgcatgatgtgtcatgtactttctactcagagaaaagtcctctaccagtgttgatgagggtgaaaagatcattcctactccaggaagtctctttggaaacttggtggcggaagacaggagagctaagagcagttcccatcttgtatgatctaaggttcccctggaagtgaagccacgatcccctgtagctatcacagcatagggatgtgcggagatcctggctccacatatagttggcaggaggtgagtctcctttaaggtgttcaaatgtagcacacacacacacacactctctctctctcacctgctgtcttgctcgatgctccatctcttctattgctgtcctgagaaccaagacagctccatgtacaagtaactcaaaaccctgacactccctcacactgcccaaaacaagacactgtcaaaataagtcacagatgtcacagttccttgtcactcagttttcttggcttagatttaaagcattaaatcagctcatcttcatctctcattccctagccccagctcttccctgctgagttatctttgatattcccttgggtggatttcttctccctccttcttctctaagaatctgtaagtttattttctctcttactctcactccccttctcatcctgcctcaccccggtccctctttctaagccctcttctccaccgccctattctagacaagatcttacaaaaatacctttcttccataatatcttctctacttccacaagaattcccccagattcctttcctttttgttgaaagggctgactcctggcatttataattttaaccagcagaagggcttgaaatgagaagtatgagtacttcgactcttttccacacctgttcccaatctccacttttttttgaatactgactctgtaatgggtggagagtaggggaaaagaaagagagatgggaaaacaagaaatgaaagggatttttagtaataaaagcaaatgaggagataaggtaactgtgttctgaacatcagggctggagaggctgatgctcatgatggacacaggaggagaggcgcagtgctggctaacaacctggacacagcaccaagcagattgtagtcacatgctaaagcatgtgctatgccatctaggtgcagtagagatcagccataggctggagtttgccccgaaggaggtggcattgaggtcacacactgcagagtcatccacatgactttgtagattggaatcttattttatcaactgcttacctgaaataaacatgccccacctgaaacttaaatgcagcttgatcttttctttggaagagtgtgatgcttacgacaggaatgtgttgccatgggatgctgctgatattttgtccacactcctatcttagcctttcgccactttgaaggtgccctctttctccaggataaacatcttcaacaacggggactttccaacagagtggaccaggtgaatttttttaactctctggaatttgatgttatgtgagatttctaactgtggaattgcgctcacattcatgttagaatattatgtctatcacatattcttatcagcacatttttgtagccagagatgtatgcaacccaagtgtcatgagcccactacacctaagagtttagacttactaattcactgaaaacttaaaagaggccaggatgtagtagattgcttggtgatagatagcagcctactcaccctgtctcttgagaaataacttcacttctctcccccttatcctaattctctaaaacagtcctatcttccaatggataaagtacagacagatatctggttacctttattgtaaacatctatagttcacccaagagcctagatgaagcacctcacatagcatgccaactgctggcccgtgtatttagtctatgtttaatacccttttacttaggtttcttgccctgtaaattggaattagactaaaatctggtgtcttgagtttcacagcatattgagtttcacagtatgattttagcctgtctactcatcttatatctgatagcagtaaagaaggtaaattcattcattcatatattcctttattcattcattcatgtaaatttattgagcatgcattttgtgctaggcactgttcttggtatggtccacagctctgaacataacaggcaaaagttcttgcccaaatggaagttacattctaggaggtaatataaagcaagacaaaaatatccagtgtgttagacagagatatgtgctagggagtagtggagtagtggggtgcagttttaaatagggtactcagggaaagcctcattgagaaggtacttttttttttttttgagacagagccaccttctgttgcccaggctagagtgcagtggcgccatctccactcactgcaacctctgcctcccagattcaagcaattctcctgcctcagcctcctgagtagctgggattacaggcgcatgacaccacacccagctaattttttgtacttttagtagaaacggggtttcaccatgttagtcaggctggtctcgaactcctgacctcatgatccacccgcctcagcctcccaaagtgctgggattacagacgtgagccacggcactgggccgaagttaccttttttaaggttttttttttcagccaatgttaccatggtgtaatttatcttctgtaaaattcccacattttaagtgtacagatgagtggcttttgactaatgtatacatccactaccctaatcaagctacagaaaatttccatttccttgaaacgtccctctttctttttcatatttagtctcctactcccactcaagctaccacagatactatttacatcattataggttagtttttcctgtcctagaatttaatatgcaactatgcatgttaagtcttttgaatgtggcttcctttggttagttgaagccatgttactgcatttatcagtcattatttttttattactgagtctattgtatgaatgttttataatttgtttactcagttacttattgtttctattactcttcattctttgtgtggtttcttcctggtactattctctttatactgaagaacatcctttagcattgcctgtagttcagatctgcttgtgatgaatcttctcagattttgcttatctgaaaatgtcttcatttcaccttcaattttgaagactatttttattcaatttatatagaattctgtgtgaataggatttttacatctccaaagatgttgtttcattgtcttctagcctctactgtttctgatgagcactagtaataattcttaactttgttcctctgtatgtgtctttttctttggctgcttttaacattctactttatcttcagtgttcagtcatttgactgatgtacttaggtggggcttcctttatcttcatcttacttgggcttcgtggatttttaagtcattttttaaaattttgggaagctcttggccactatttcttcagatattttttctgctctctctctctctctcctccttctgggacaccaaatagacgtaagttagactgtctgatattgttccataggtctttgaccctttgttcattttttccttaatattttttatttctgttcttcagatttgatattttctactgctgtgtctccaacttcactttttcttctatcatctccaacctgctggcaagctcttccgatgaatgattcacttcaggcattgcacaattctagaatttccatttgtttctttttagggttcccatttatctactaaaaattcctcatttactcacaacttagggccatttgtctctaattaattaatatattttttgaatatatattgtaaaacatatatgttttaatgtctttattttctaaatccaacatttggtccatcttagaatagttcctttgctttcattttttactatggattacactacccttgtatggtttttgttggtttttatgtctagtgatttatcattgaatactgggcattgtgaatgttacattgtagaagctctagctcagcactcttcaatagtacctgcaatgaagaaagtgttctgtgtctgcaccatccaataggacagctgctggccacatgtggctattgaacacttcaatgtgactagtgtgactgaggaactcaattttaattttaatctaaatgttcgcatatttacacccagaacttctcaacctctgttatactgtttcagtctcaacctcatagcagctgacatctggcaagcctctgatggttttccctgcacatatacagtcaagccctcagccgtggactgagggaggggcttcccatacgcatgcaaggacttctagggctttgtctttgcacagattccagctatttcagttgcctcagattctgatccctgcctcttcagcccagcaagagtcctgtgctctgctcaaactcaagtctccaggcagacagctggactactgtggggctcacctcacactcccctctccccatttttgcagtctggtgttgtttattttccattgtctgaaaactatcttgcttcacataccttgtcctgttttctaattgtttacaggagacgaaatagtctgaaactagtcattccatcacagtcagtagcctgagaagtgtcccttcaggtcataatccaaagaagattgtgggataactaactaggggaagagagtttcaaacagggggacgtcaatggaaagggtgggaggcagaagcatgcctgcctgacttagaacggtagggaggcaacatggctgagcacgagagctaaggacagagagagtaggacagtaggtcagagaggcatggtggtgggaaagacactgtttggcttcataggccattatctgcactctagcttttactctagtgagatgaaaagtcattggaaagtttggggccaagaactgatttaggttttaacagaatcacactagctcttggaaacacctccaggacaaaagcagggtgctgaattagaaggccattgagagaatctattgactaaacttgcaaatctaattaaaattctgaattattcaaggtcgatggctgagtttttattcatttcctagagtttggggctcacgaggagacaggtaccttagtgtggaagatcacatcatctgaagtctgattggctgtgtgactttaggcaagtgacttcaactgtctttctttatttctatacaatggaaataataagaatacctattacataaaagatattatgacgattaaatgagataattcctgtcaaattctctaaattatacctggtgcatataattcctgtcaaattctctaaattatacctggtgcatatgaagtaagcgttctacaaatgttaactattactatctgagaggctgaatgtctgatgattattactgtaccctgtggacattgacattgatctactctgtgaataaagggtaccacactcaattctgattctcaagagatatgtgcaactggcatagaaaaaatatctcaaaaacaagactgaaggaaattagagccaagtagaggtccatgctgtcagctcttgcataaggagggaaggctgaggcgttattcattcaggctgaggagatctttgaagactattgagaggcaatgagttagggtttgaagaatggattagatacagagactgtggaaagggaagggaattctgaaggtcacctgaacttgcggccatcactaatgtttaaagagcttcttaaattcaaagtgaaaaattatgagttcaacatggttattatccccttaagctcacatttggaatcaaccataagaagtaggatatcattaccgtacagctgaatggctttattaacttatttttggaaattagatgacaaatgcaagcacagtcttgtttaacaagaagcatttcccagttgtttctatgagaatttaagaaaggttctagaaatgcaaatagagagaacccagtcaagtcctgaaatctcagtgcagcagaattgagaaagtgaataatggcccacaggtcacaggaaggcaatgaatacgctaatcaaaggttgtgattaatgaatgttgtctcacatttcatctggcataacatgtgtccaattgatcatttttagcatagctcatcagaggagaaaaacttggtgaaatatgatctggtggggcaggatgcaccagttgcacaacagacataagctgctccactttggccacacctgtataaaacatgagaaaagtaggttttcatagaggttgaggcatatctaactacctcaagtagaaaaagagtatccatttatttaatgagggagagagcagtggaaaggctcagcctcatccaggctgagaagtgattaccttggaaatgctgtttgttttgattgagaaagtcagctgagaatgtattttaaataggcagaaaatatatctatcaaagaaatactatgcagtcatcaaaaagaatgaggcatgtttggtattttaatagttatctccaatgtttataataaagtgataaatgcaatatatagataattatatagtgtatgacaattatgagaaaaatgaaatgtacatctgcacatacataaggttgcacacacaaaggatgcctctgggggagggaaattgggtagctgggactgaaaataaagataaacaggagacttatgtttcagtctatatcttttgaatttatttgtatatgcacctagatccagatagttttatttctcggttgaaaaaattaaaaaagaataggaaaaaagaaaataacaaccatagtttaattttttttttttttttttgagacagagtctcgctctgtcgccaggctggagtacagtggcacaatctctgctcactgcaacttctgcctcccaggttcaagcaattctcctgcctcagcctcccaagtagctgggattacaggcacacaccactacacccagctaatttttgtatttttagtagatatggggtttcaccatgttggccaggatggtctcgatctcttgaccttgtgatctgcctgccttggcctcccaaagtgctgggattacaggtgtgagccactgcgctcagcctaatttaatttttaaaagagctggaatgcgtccattcctttcccatttgcaaagggctccagaatcatcccagatgatggctttcaaaatgatagttcaataagggagatttaggataaagtgcttctttctgatgcttcacttaagggtccctgagagtattagtttgctagggctgttgttaaaaaacaaaaacacaaactgagtgacttaaacagcaaacatttattgtctcccagttctggagactaaaaggctgagatcaagggtgtcaggaggattggctcctttcgagggctgcaagggagaacctgtggctctctcctaacttctggtgtttgctggccgtctttggcattccttggcttgtagaggcatcaccctaatctctgctttcatgttcatgtgtcactgtccttgtgtgcatgtgtgtttatgtccaaattttccacttttataaggacaccagtcattggattaggggtgtgctctagtgacttcaggttaaccaatgacatctgcaacaaccctatttccagataagatgacattctgaggcactggggcttaggacttcagcataagaatttggaggggacagcactcaactcatgacaccaagggacacttacccagagttaaactgcttactgaggggaggtttttgctatgtgtctatgaagcacagatagtaacatgcatctcctcatgcccgagatgtataaagtgaatacacgctggtatgattgaaaaccttaatattttttaacgcactaccatcctctgaggaaagaagagagcttaaacttgcttaactaagaacaacagcttgttggagcgataaatccatgaaacaaaactcagatcccctgctcttccctccccatccatgccagctaaaggcatgtgcacacagcaatgtttattaaacacctactgatgcccgatactgcactgagagccagggacggagttggacagaacatcctcctgcccttcaggtggagaaaagacacataaaataatgcaggcatgcactaagtgactatgcttcagtcaacaacagaccgtatataggaccgtggtcccgcaagactatgatgaagctgaaaatttcctatcacctagtggcattgtagccatcctaacatcacataataatgcattgctcacatgtttgtggtgatgctggtgtcaacaaaactactgcattgccacaacatataattgtgtacagtctataatatttgatgatagtgaattactattttactagtttgtttttactatagtatacttttaatcattattttagagtgtacaatttctccttatttttaaaaattaactttaaaacagtctcaggcaagtccttcaggaagtattccagaagaaggcattgttttgtttttgtttttgtttttgagacagaatctcactctgtcacccaggctggagtgcagtggcatgatctgggctcactgcaacctccgcctcctgggttcaagagattcctctgcctcagcctcctgagtagctgggaccacaggcatgctccaccacgtccagataatttttgtatttttagtagagacagggtttcaactattggccatgctggtctcgtactcctgacctcatgatccgcctgcctcagcctcccaaagtgctgagattacaggtgtgagccaccgcgcccagccaagaaggcattctaggagatggcaggtccctgtatgtcattgcccctgaagatcctccagcagggcaagatgtggaggtggaagacagcaatactgctgatcctgaccccatgtagggctaggctaatacgtgttctagtgtctttctttttaattacaaaagagtaaagaagttttaatttttcttaagtttataaagtagaagaagttatagtaagctaagggtaatttattattggagtaagaaaaattgtttgataaatgtagtgtagcctaaatgtacagtatttataaagtctacagtagtgtacggtaatgtccgaggccttcacattcactcactgactcacccagagcaatttccagtcctgcaagcaccattcatggtagctgctctatacagatgtgccactttttaccttttatatccatattcatactgaacattttctatgtttaggtaggaagtatttacatacacaaatacttaccattgtgttgccattgactacaatattcagtacagtgacatgctgtctacttttgtagcctaggagcaataggctagaccaaataacctgggtaagtagtaggctctaccatctgggtttgtgtgagtacactctatgcactttgtacaattacaaaatcatctaacaatgcatttctcagaacacgtccccatcgtcaagtggcacatggctataattatatcactatagtatagtaaatgtagagccatgaccaaggcagaaagaaaaccgttaactccacttggcgatgccaaggaaggtgccctatgagaagtgtcataagagatgactgtgaaaggctgactctgagggaggtgagggcaggaggaggtgactagggaaaagggagtcctggggcatgtcgtgtctcaagcgggggagcccagacagactcctggttaccaggaatggagacaggagttggaagtaaatctcaagtgcagacgagcttctgaaggagcttatcttcagcctgaggatttgggacttctttatcctccaggaaaccctggaagatttagaggagccacttggtcagatttccttctttgaaatatattagattggtgcaaaaggaattgtggtttgggactgtgaattttagatccttataactagactcaaacacatctttattaattcaaataggaacaattactatcaacacatttttgccaatgagaaataagtttgtttattcctgtagcataaaggtctgtgctttgggattcaatgaacacttggaaagcattttctgcacactgctggttgtggaagcaaaaagttgttgagatgcttgaagaagtggtagtcggttggcgagaggtcaggtgaatatggtgggtgaggcaaaactttgtagcccaattcgctcaacttttgaagcattggttgtatgacgtgcagtcgggtgttgttgtggagaagaatttgtccctttttgttgaccaatgccagctgcagccactgcagttttcagtgcatctcattgatttgctgagcagacttctcagatgtagtgatttcgccaggattcagaaagctgtagtggatcagactggcagcagactaccaaacagtgaccatgaccatattttggtgcaagtttggctttggaaagtgctttggagcttcttctcggtccaaccactcacctggtcatcactcgttgttgtataaaatccacttttcattgcatgtcacaatccgatcaagaaatggttcattgttgttgtgtggaataagaaaagacaacaccaccaaatggtgattttttttactttcagtcaactcatgaggcacccacttaccgagctttttcaccctttgaatttgcttcaaatgccaaagaacagtagaacagtcgatgttaagttcttcggcaacttctcgtgtagttgtaagaggatcagctttaatgattgctctcaattggtcattgtcaacttccaacagctggccgccacactcctcatctttaaggctctcgtcctctttgcaaaacttcttgaaccaccactgcactgtacatttgttagtggttcctgggccgaatgtgttgttgatgttgccagttgtctctgctgctttacaactcattttgaacttgaattaaaaaattgcttgaatttgctttttgtttaacatcatttccatagtctaaaataaacataaaataaacagcaagtagtaagtcattagcaaaaaaacataaagcgagaaatgcccattaaaatgatgtataacataaccacatttatttaagaatgtattccaatatcaaacagcaaattccaacaatgcaaaaatgcaattaacgtttgctccaacctaatattttcagagagaatgaataatggggaaagaaactgaagagaaagtaacaggcaaggagatatttgcaggtgagaaaaaaattatgaccaatagtctaaacagtggtagcggtggcatgaatagagaaaacaggggcacccttatcttccccgatttgtacaaattcagttaattctattttaacttatttatttgtgttatttttcagatgacaaaagataatacatactcactgtaaaaaattttggattaaaacatttaaaatgtataaggaatacaacaaaatcgccccttaattactcagaaataagcattcttattaatgtttgtgtatcctattaagttcttttcaaaatcatatctatgtacatatatagtcatttactcagacttttataaacagctttttccactttatatatttccctattagtaactttatagaacttgatttttgattgatgtgctatatttatttagctaatctagaggacagatttgaaaactgttaaggaattataaattgcagtaggaggtgattaattagctgatggggtatgagggaaaggaaaaaaactgagcaaccccaacttttgggctaaagcccttctttttacagctttcttcttgttttggccagaactggagggtccatcttgtgaaaaggaggtggcagaaggatctgtgaatatatgttacattcaacctcaacgatggtgaacataagcactgttcagggcatgcagacacagccccaggttcacaagctgccagaacattcattaaagtggataaaatggcctgcaatgaaatcctcaaaggatgtggtagataaagcaaatgccctcctaaacacagctgcaggctgccaaaacccccagccacacctggtgagcattctcagagaggagcaagtagagacagccttccctgccaggagggagtccctctccaggctgtgtggccctggctgtggtctctgcacctgccgcttgcctgatggctttcttgcattctgggagggcatgcctgtccgagcacttcctctgctcagtctttccatagcgagaggaggaagagcaagaggagtcaatacctgtgaggcacaataaatccagctgaggtgaataataaagcgtattcatttccaaaaacttagaagacaatgttagggcagatattgggaaagaaactgactaattgacccaggctttcatttcaggctcagtttggtttccattgcctaacacaactctcctacgctcctgtgcctcttcagaaatggcttctgattgaaacacaacctgtgtcttttgattgattgggaactgaaagatgttcctcttttaatctcatggatggaacccaatatatttcactttcttctttgtgctgatagacaaagcctcggaaaaaaatgctatttaaataatagctttcactgacagtagactcatgggaaaattgtccttccttccttccctccctccctccctccctcccttccttccttccttttttccttccttcctttttctgaagtgtatggaccattattgcttttactttgtcttatttggcttatgggaaaccgtgggactcctcatatatctatgtgctgagctgacataagggggactattaaccgcttctatgcagcatttattctgctgaagagaaaacatggagtgtggctttgttgaaaagctccccatcattcacagttcactgaaactcatccattcaatcatcaagcacagatctacctctgctccacttgtgcctgggatggtgctagatgctgagaacgtgccattgcccacatgttctcagcatctagcagaagaatcagttccagagcacactcacccagcttctggaatctcacaggttagttgggaggtcactcaaatagaacacgacgtgtgctgtaaacaagttaagcacagagtgcaaaggagcatctaattcaagagctgcttaggatggttttgtagagaaggcatgtatgattctaaaatgaaggcatggcacgtgcaaggctgtggtgttacaagagaacttggagcatttggagaagcggacgtagcgcaatgtgaggcgagagatgagagtggtacatcctagcaaggaaactcccagtcttggaggtaatggagaaccattgatgaattttaaggattttaagaataggcataatgtagtcaaattcacactcagtgaagtagtccttgaaccattgttcactgcaccacatggtcacagtcttattaagctgacagttgaaagtttcattggaaaacaaacctggcagttcttgaaatggaaacatgaaggtaatgcagggcctacaactctaggttgcaaaaagatcaaggacatttcatagatcttgccttacttttcctcttagggcaaaacacacattacaaagaccctcaaatgatgctcactgttaccaacatttttttctaatcttacatctttcatcctaaatgctcatgaaagacatgttgcttctggttcaaacttgggccaatgacaatgcttttcatgtttgttgacccaataatcagccattgcactcaaagacttagagcggatcagtttaaaaacagctattactgcatttgaactacagctcccctccagccctctgtatgtctgggcttgctgctgccacaggaaagctcctagttctacccagggagggattgtgtttctcagcctgtttcagcaccaacccgtaaaagctgcttatgtcaaatgtcagttaattgcaaacttacccgtgaggtttaattgaccttattccacaacaagtgtggccatatgaaataaacccaaagattcatgatcaggcaggtctaagtgttgcattttggagaatggcaaggggtcgtttttggaaggagatggagcacctcctatgctaatctcatgagattagctttaaacatcttcagtttcctccagtcaataatttgttatggaactgtcattttacatttaaacattttttgaacccttttatttttgcaccctttagcgttgggataaaaaattcttaagtcatatctcctccccactcccaccaccgccacactgttttatataatacttccttttactattttactgttttaaatttatctaccttcctgtccacaccccccacccccgcctcaccctgttgcttcagaaaaactcatgatttgtggaggagtaaatgctcacaactatctattctctcagccctacatctctctcaacttgcgtctctctggacagaacaatttttatctttttagcaattcttataccgcagttccccttcactgccataattctggtgaactcactgtttgagatcagtctccactgttccccatggagatcaccaaagccgatactaccagaagctcacatttgagccctgcagaacattgaggaaaagagcattttgggtttggtttgatttgtttcagctattttttcccctctctagaaacatgggtaggtggagcttaccaggtgaggttgctgactttcttctctagagtctgtagagtagagtatctacacaatattccatttgtgaaaatttgcacaatagactagataaacaacggattacggagaaaacagccctaatactcagaccctaaagcagtgctaggttaacaacaaggtgcttacttgcttggggtgccagccaaagtcagaacaatgaggctttcatggacttatccagaattttataactgataaaaagaaatcattttatgttttgtggtttagtattgctttaatctgggtttatatatgggaggaggcaccaaaatatttcagtgcttggggacttagactaaaagccacaaggaggaagagaaaaagcaggaaacaggctgccctttgtcacggaccttgtctttcctggcactctttggctctggttttcacagacatgagtctgatgagaatgctgagtgattggcttccagtctcagcagagtgtatatgaggaaagaaagcactggttgcctttgctacgtctagcctatgtctccacctcccccagtgtatcctagttagcccctccccaagcttaccccctggtcattctcacggggtcctgttttttaccctaggcctcttagtgctctctgttcccgccaaaatatctttcagatccgttagtcatattaaattagcaacagctctttacaagttaaaggtcttctccctcccacagataatgtcataccaacacgggttaaagtcttagctaaagaaggagtgtctaactttggattctcagtcataaaccagtggaaaggacatctgactagggggcaggtgatctcagtgcatctaagctcccgctgtatggactcgtgctgcctaacagagtagctaccagttgcatgggacgattacaatttaattaattaaaattacataaaataaaaaactcactacctcagtcacactggccacgtttgacccactcaataaccacatgtggctggtagctcccacatcggacagcacagatactgatcatttctggtctcacaggaagctccccattggatggtgcaaatctaagtaatttccttcttggcttatgcaaaggcaaggccctccccagtgcagggttgctcaggcttagcactattgccatcttggactggattcttctttgttgggggtggggatgtcctgtgcattataggatgtttagaagcctccctggtctctatcccctacatgccagtaacagccaccgccccccccacccagttgtggcagtcaaaaaacatctcgagacattgctaaatgtcccctaggggacccctacactgaagttggctggagctctggggatcagggaggacatctgcaagcgtgcttatgagttgtaagctctaagaggggagggacattgcacagggcaggtcaggcacattgtaagtgctcttaaaacattacagttgagaagaatttcagagtaacatttatagccaagaaagatattcttcccccaacttgggcattcccttgatgttaaattgtcctgtgcgtcaaaaccctaaagaactgcagggaagcctataaccccaaaggaaggcagagaaaggtcctgggggacaggttgtggggtgagttaacttattccagccaaggtgaaggagttgccccgggcttcactctgagacttggagcctagtgtgctaagctcccagttcccaaagtgaccattcccacgctgaatgtcattactgcctcatcagcagcttgtcagctgtaatttctaatcccaagccgggtctctcttcccaggaccaaagtcataaagatgtttgcccttgcacgggtgtttgacatgtgctaggccatatttgtgcatttgtcttagggccctcttgagggcttagcacttctctctgacccaggcaagactttatgtgctgtgcattcctcctgaacatgatgtcatgcttgtgcctcaccatggaattctgcagccaggcactggggctcaagtccaaagacgggaagacttaaaaggctcaaacaagcaaatgtttgtcattatttaagattttaagacaactgaattctgaaatgtttatggtcctggcctcctttgtgggtcatcaatgacctcttcccttttaggaggtatctcatggagagggcgtcttggcctgctcccctctggggccactaactcacaccagagctgactcaaccattccaggggaagattggtaagaagtttattcaccagacatgtctagctgaaatgaatgaaatcaaactcagcagaagtcaacacttagcacggaaggcaaagtagagacaaagggtcacccggctgctgcacaccggcctttagctttagctcaagttgttctgctttaaaggacaatgccaatcatctcataagtaaatgaagacaatgattcaacagtgctgtcaagtttgagagaaaagagaagccatccctacacccaacacttaatatattgttaggcttggggtgggttgcccagtgccttctgggatgacctgtgctcttttcttttatccaggagcaattagaatcaatctgcttcatctggaagttctgcccaagggtctggcaccataggaagttgtccaggattattttaaccctgttacaggatccaagtaattcctgatatgtatgaatgtaaagcccattcttgtattcagcgtttctcagtggagatacttttgacattttgggtgggatgaatcttccttatgggagtgtctccagcacacaacagggcacagaatgcaagtggtgtcctcctctggtcattgtcacaaccatccacccaccaatgcacgcactcccaggcaccacgtggtgggtggcactgcccccactgagcacattgcaagcttattgccacagaaactagaatgctagtactacccatgggagcaggcagcaggcctgttctttatttatttcactctttgattctgcagacctcagatttacccactgttattgatctgtggaaggcttttgactgtccattttccccctagggtgagctcatataagtggaagagaagcaaagagatagctgttgcacagctgttccattcctgctccctgttgatctcctaatgttgtgaatacaccctaagaattctcccaggtgtggattaagacgacttaagccaggaggaaatttgccccaaggcaaagcatcctcttttccctctgcagaaactttgtccaggcaccctagcatgagggattgcctccccatctaacatcttcacacaggccctcttgctggacccacattaatggacggcagcttctgacttccagcaggccctctttcactttccatcgtctttctctgtctgtgttttatagcatgaggcactgaagttatcaggtgatcagagaagactagaactggatataaaccaacagatcatcgagtaacgtggctttcaacctccagacttcgaggtctattgactgtgaagatactggaggggactcaaaagctattatcattttctaaaatggtgtcagaactgttcgatgtactttaaataggactcacaggtgtattaaaatgtcaagttttcttttgcctaaaactgtatgaacgcggtgcaataactggttatttcaatgctgacaaaagttctgattgacagaacttgcactcattatatatcactcagtacctaattgatatgataattttgaaatcaggaagactgtggagagagattagtaagaggtccttagtggtaaaaggactaaggaaattgtagtccgattgtctctttcttcaaaagttgaggcccagagatgttaagtgacttgctgacagttggatgattaatgccctagaactatggtggccatgccacaccagtacagtccctatgtgctcctgttgtcccagcatcatcaccagtaggaatccctgtcgctctcaaaagaaatccagtttgattaataagttacatggtcactctacctaaaacccaagtctccaactgccaattcatcccttttctcaccacacaactctacctctttctctctttttcctggttctcaaaattgtttctcctatctgaatgcatctcttatgttttcacaagtaagtcatcctcaaagtttgggcgactataaatgacagctccaaatccagatggcctgaaccgtgggaccttttgttcctgagtggagggggaaggaagatggtacggggcaggggcagctgggccccaggcaagcccagggccttgcccaagcctcagacagccacccatgtgctcctgtgttctcagtgacaaaggccaggaggggcagagggaagctggtgaatttttatgatttaaaaaatatgaatccacactggatagaaaaaaatacaatgtaaaacaccacccatgccgctctgaaagtctagaatgtccaggtgactccagaatggtgttcatagactttggcaatactttgaaaacctctgtgaacaataaaagttaagcatgagaaagaaaatatttcccataagaaaatgtaaacccttttccttgtctgccacatggggccaaacataccagtgtgtttaattggtagatcagtaccactctcaagaatttcttagatgccataaacacagaatgcaattttggtggagtcccacagcaagctataatcatgagcagggaggacctgggttcagcagctgtgctttattcctgtgttgctttgaactcacagcagagctaaatacccggctcataagaccttctgataacaaagtccagcggacttgggagaaacttggggttttttttgttttgtttttccttttttttttttttttgagatgaggtttttgctctgttgcccaggctagagtacagtggtaagatctcggttcactgcaacctccgcctccagggttcaagagattctcctgcctcaacctcccaagtatctgggattacaggcatgtgccacgacacctgtctaatttctgtatttttagtagagacggggtttcgccatgttggccagactgatctcgaactcctggcctcaggtgatccgcccgcctcggcctcccaaagtgctgggattacaggcgttgagcctctgcacccagccaagaaacttgttaaaatgaaaattgggtctatgtagactgggagattaaaaatgactcctttttaatgtaaggaactttgctttactgtttcattaaaaggtttgccagtgcaaaccgaaaatgtaggagccctttttcaaaagcaggaacaaaaacaacctctgctgtgaaaggtactaaaataaaagccgctttttttcttctgcagtctctcttttgacttgtcacaaggcttttaaaatcattcttattcgctatttaatgccactctaagtaaaggaaaattaaaattttaaattgttagcatgaatcttaccattcatctttatattgtgcaaagccagctttaaacgaaaatataagagcatttaatttgtatgctaaattgttccaaatgatgcaatttgcatatttcattcttaccagaacagtggaaaatgctgcacaaaactaattcaatgcttttatttcgcttctcaataatgcacattctttttttttttttttgagacagagtccctctctgtcacccaggctggagtgcagtggcatgatctcagttcactgcaacctctgcctcctgggttcaaatgattctcatgcttcagcctcccgagtagctgggattacaggcacccggcaccacaccctgctaatttttgtatttttagtagagacagggttttgccatgttggccaggctagtctcaaactcctgacctcaggtgatccaccacctcggcctcccaaagtgctgggattacaggcgtaatccaccgtgcccggcctgatacatgcacgttctatcaatgctctctacctttggcttactgacaagtaaggaagaatttaaaaaaggcctatgggttgccttatctttctatttctttctgtgtcttcattttcagtttaagttgtttgcaaatgcaaagaagtaacatgagtaagaaaggtcaaaccaagtttccttggtcatatgtgtttcttagaataccactgctgcctttgtgtttgaagcaagttttggttttcaaatggaaagtgtggcctctcagggctgtcagtgtccctccccctccccagctaactcagtcatagacaaaacacacttgggagtcacttagaagcttcatgaactcccacacattgtgaatacaccagaattctgagttcatggcgaatgctccatgtgaatagggtgacaagaaaggacaggcacacgtatctcctgtgtttctgctcattccatgctgtctcatcagaagtcacttacaaaatacaagtttcaagaggaaattattacaattttaatacggtggccgcagagcatgaaacccatcaagaagtccttctgagcaccaagtcctatgcaagcacacaggtgacgtgccatgaagctggccctgcacgtggggtggcaccatgcatgaaaatggtgaagagatcccaggggatcgggcggtgcactgagaaggaacaccaggcatccagacctgcacacagggcagtgtgcacagcaggagtccagggcagccagagattcactaccagaggtacagcccgagagcacatgccatgccaggaaagaggagacaggcagagacaggaagatcaaagtggagggagaaaagccagattactggttaactaagacactcagccggcagtgtcaggagagagccacaaaatgaaggcaagggaatcacggaagccagatactagcaaaggggcatcggaaaccagtggccacgtggctctgatcccaagcactgagtgccctccccggcatccttgtggggctgtgaggttcgtttcatgtgtctggacgtggctcctcagcgtggtcttccagctcctctcatccctctaccctcttggtaaaaacaagacatcttctaggagtgaggcaacctccccgctgccctgtagagagccacacttctgcttttctagtgttctaagaatgcttttcctgatttatcatcgttaagaatgggtgggaaactagctatgttgaacatgtgacgtgcaaggtggttaatggtgatccaccaatgagcaggacgccaggaccttgtgcaactgggagactttgcaacaccacagcggaaggctgtccctcagaggtttgtagccacctaggggcctccttctatcacccatgactaagtcttctgcattagcttagagcagggtttttcagccttgaaaccatgaacatttggggccagacagttttctgttgtggaagactgtccagtgtaccgtaggatgtttagcagcctctctggcctctgttcactgcatgctagtagcaaccccctttccctaccctgtgacaaaaatgtctccagacgttgctagatgctccctgtgggaaatcatcacccttggtgagaacctgtgactttgagcccatgagccctgcagaggatcatgtctgagaggacgccactcccaccacatgctcttccagctggaatggttgtctttgcagtgcctgcttttctgaaagtgtctctttattgctttggcttccttctagcactatattccccactcctgggcaagttagtaaggcctgggggtatagtaaagtcactcagtgggcaagtctccttgctctgtgttcatccaaagagagttagatcagccttgaaagtcactgcaaaatatatatatcctgaggcctacaaagatttttgtgagctcaccgtccctttgctaactctctagggcactgtgtactactatgtagcaagagctcaatgtttgccagccttgtcatatgttttgtctcttttaatcttcaaagagaaaaaaataactcctataacataacagcgtatctcctataacttataaaaaattcctataaagtagtattgactcccatgccgggaattaataagtaacttgcccaagaccacccaggtagtaaatggatttgaacttgggttttttggctgctggtctaagaccttttctatcaatgcttccctggcttcgtgcatgtaagaatcacctgtgggtgtttgcaaacaatgcaggtccccaggcctcgcccctagagccttggtaggcaggtttagagcaggccccaagaatcgggatttgaaacatctgatgaaacacgtcattccggtaatgactgtgcaggtgactgccccttgagtaacactgaactccattattctgtgcttcctggcaaaccatcagggaaggagggaaggagaaaagagaaaagagaggagaagggttgagagagattgaaagcactcaggctgatgcagggttgagaggagctggtttcctccttcctctctcatccttgcaggcttagccacatgtctgacaatggcaataccgtgtccaaaactccacacccacgagatgccccttgacctctcctgcctctgtgtgtttgggcagcctgggtgtgggttcccccagctcagtcctcaggtgccaggaccaaagctcccatcagtgaacctgactaattcacaaagcatttctttttttttttaagttctgggatacatgtgcagaatgtgcaggtttgttacacaggtatacgtgtgccatggtggtttgctgcacctatcaacccgtcatctaggttttaagccccgcatgcattagatatttgtcctaatgctctcccttcccttgcccccggcccaccaacaggccctgctatgtgatgtttccctccctgtgttcacgtgttcttattgttcagctcccacttatgagtgagaacatgtggtgtttggttttctgttcctgggttaattggctgaggatgatgatttccagcttcatccatgtccctgtaaaggacatgaacttgttcatttttacggctacatagtattccatggcgtatatgtgccacattttctttatccagtctctcgttgatgggcatcaattcacaaagcacttgcatcagcttcatttgattatggaaattagcccactaacattgcatttctttgttcacagatactttctaaaatccttggccttcgctagagactttcctggaaggtttgtctcccctggctagatcatgaaaaacctggatcagccttaagttggatatctggtcacttttgcttttaaatagtctggcaaagcaagaggtacaacacatcctggtttgatgtactttccagcaaaaagtattagcaaaacaataataatattcagagggctcagttcccagtagaattcagcacatactccagatctcctgaggttcaggtctagttgaagggaaaggaatgactgagatgagtttgagtttcagacttgagtttctcccagctcccttgagaggcaaagaaaatctgccgataaacacgaaacaaagctcattgtcctgctacttgtttgcaagcaattgtatgtctgtcctgcagacctcactgggctcacggcattttgaatagctttctgtgatgtaacgcacacaggttttcactcacactatgcgcagggaattcagctctcggagtcatgactacgtcatccttcacctctcaaaccatcgctgctggtggccttcgcttttatttgttaagctgtagcttcaggaaagagccaattccctccctccctcccttccttcctccctccttccttctttccctccctccttccttctttccctccctccttccttctttccctccctccttccttctgtccctcccttcttccttccttcctttctttgcccctccatttccctccctctttttctttcattccctatctccctcccttcattctctctctctctgtcatggttaacaacacatgcttcaacaggttttttttttaacctcttaagaggtatatggttaaaaagtctctttgctattcctgtcttgtacctaagccacctacccccaccccacccctgccatacacacattcatacacacaagtaaaccattggtactgatttgatgtttttccttccaaagtgctttcaatatatatgaaagcacatttgaatagatgttgtcagcccccaaatgacagcctgtaaaacacagtgctctgcatcttacacttttcactcaccattatatcttagagatctttccaaacgtaaagaccttgtacattcttttttatggcatcatagtactccagttgtatagattagcatcatttatgtagccaatcctctattaacaaaaattcaggttgcttccaatatgttgctgtcaccaacaatgttgtagcacgtagccctgcactatgtcttcctgcacatgtgccagtctgtgtgcagcataaactcctgaggatggcatttgaggatgagtggctgtatgcacctgcagtctggatagatacgaacaaatcgcttatcgtaggcaccgtgtggacctctcttccaccaatagtgcaacgggacctggcagtccctattgcaacaagttcctgaggctttcctgggataagaaaaaggcgagagagtatagaaggttatttaattagaagaccaggttccccctctcacttcccaagccacaaccatcaaaattctcaaacctgattctttatgatacaacccaagaaagatatatttttatttttaaaatcgtaacctaatgaattaggatttttttgactgtgagtaacaaaatacagttcaactcagcttggcagtggactgggggagaaagagcggcagggcgtggtcactgtaagaagaaggacacatctcatggtacagtaggcaggagtgcagccgtgctcccaggagggacagcatccaggagctgggagaccacaggacagccaaggatacagggcctgtcacccattgctgcttctatttggatcttctttcttgaaatatttttttcctctcttctattcaatcctcacaacaggtaaaggtggaagctcatagtgaccaaattcacagttggagacagactttgtgtgcatgtgtgcatgttagtgtgtatgagtgtgtgagtgtgcatgagtgcgtgagtgtatttgcttgttagtgcaagtgtgcaccagtgtgtgagtgtgcatgttagtgtgcgtgagtgtgcatgttagtgtgcatgttagtgtgtgtgtgcatgttagtgtgtgagtgtgcatgtttgtgtgtgcatgtttgtgtgagtgtccatgtttgtgtatgtgtgcatgttagtgtgtggcatgtgtgagtgtgcatgttagtgtgtgtgtgtgtgagtgtgagtgtgcatggttagtgtgtgcgttagtgtgagtgcatattagtgtgtgtgtccgcatgttagtgtgtgtccgcatgttagtgtgagtgtgcatgttagtgtgtgtgtgcatgagtgtgtgattatttgcttgttagtgtgagtgtgtaccagtgtgtgtgtacatgttagtgtgtgagtgtgcatgtgtgactgtatgtgagggtgcatgagtgtgtgtgagtgtgagacttgtgtgtatgttagtgtgcatgtgagtgtgcatgtgagtgtgtgggtgtgtgagagtgtgagtgcacaggatgcttttctgctttgattccccattcccagaaaagggcgttggccctgaacttggggccaggcacccagcctgggccaggcagctgtgaacagcagagcttggtcatgttgtccaagctgaaatgtgggtcccgctgttctgagtgggcagaagagccaggggaatcttttcaagccgagcagatattccacatggcatctgcacaaccacaaataaagttgtttatctttgtcactttaatattataacaaaagcattataaaaacaaggcagaaacataatgaactctaaggcccaataaatctcttggttaaatggccctcgtggtttctgaagttatcccagaatgggataatggcagaaatgaattaggtataaactggacaaattctcacctctcctgttgtttcttttcagccaatagtttcctaaaaactgggttatcagagacgctcttttagagtaaaacaattttttttttttacatttttaaaaacagagcttctctccaatgaatgtccagaaagaccatacatttcagggctggcctacaggacatatttcaaagtgatgtgtaatgtcattttagaagagtgagctgttttctgttgtttttttttaacttaaagacaaaatggccagggaaaaagctgccaagtctctgagtaatcttattgagggttcagctttctaagtatgaccttatgctagcaacagcccctgagtaacaagaaaacaagccaagctaggaagccttgtttctatgagacgaaatggtaagacagcaaagtctgaaggtgaattctaattatgtaacatgagtgagtcatcaacgccgtcagcgatcacagacaatgatgcagtgacccgccgtctccccacacttgcaaagcacagaggctgtgtttctcatcccccgctccacaccttcctctcacccctccttccttccttcttttctatttttctcttttcttttccattttgtgctgcattactcagggttctcagaaccaataagatacacatatatatttagaaagtgatttcttgtaagaacttggctcatgtgatcatggaggcaggcaggtcccaagatctgcagaatgagttggcaaactggggacccaagagagctgatggtgtggttcctgtctgcgtctgaggctctggaacccaggagagcggatcacatagctctagcacaaaggccagcaggtttgagacccaggaagatctgatatctccatttaagtccaaaggtgagaaaaagccaatgttctagttcaaagacgaccaagcaggaggatttctctcttgctcaggggaaggtccacctttttgttctattcaggccttcaactgattgaacaaggcccacctgcatcgggagggccacctgctttactcaatttactgatttacacgttaatctcatttcaaaacaccctcagaacacccagaataatgtttgcccaaatgtctggacatcctgtggcctagtcaggtggacgcatagaattaactatcacgtgtgccttcctgttctcgggtgcactggccacgcatgctgtcacccatttcccgtttatcatcttttctttacagccaagtttctagaaagagaagtctagactgtctgcagtttctcatctctcattcacaagtcaacccagcggcagttggcgcctgtccccatcattttcttgaaactgatctcaagaatctgcataatctaattgtcaagttctttcctctgttctttgtgtaataacgcaccatcctgaatctctccttcaggcctctcttctctgtgcggccctctaggagtgatagtccccaggatcctaccatcttcctatctatcttttttttttttaatttatttttttgagacggagcctcaccctatagcccaggctggagtactcactgctacctccacctcccagtttcaagcaattctccttcctcagcctcccgagtagctgggatcacaggcccgcacccccatacccagctaatttttgtatttttagtagagacggggtttcaccatgttggccaggctggtctcaaactcctgacctgaggtgatctgcccgcctcggcctctcagagtgctgggattacaagtgtgagtcaccgtgcctggccccctatctcatttaacaagctctgtctggcagatgttataagctctcttgctttaactgccagctctaggctcatgactataaaatctctgtcttcaacattctctctctctgaatctcagacttgggatatataactgcttacagattctctccccattggatagtctccacatgaaactggaacttaacatgccgcattcaaattcaccatttcccccgtagacttaattcttaatttcttctttctcagaatgatactagcatccatgcagtctccagaggttttatccaggagacatttattaccaacggctccgtctcccaccttgtaattcaaatcagttactatgctctttcggttctccttgctaaatatccatttcctctcctcttcactgtccctgtctccagcttaatccgaaccttccttataattctcaactggagtatagctttataatggatttctctccacctccatttcaactgccccttcaatgaattagtgactattttcagtgtgattcttatgcaagaaaatgtgatcgagttaattcccactgaaagcatttccaagcctaccccattgcctttaggatacaatatgaagacaattgcaacagtccaggagagagactgtgagctaagacagaggcaactgagatggagacacaggacagaatgaagggagctgggagatcctacaagctagaaatgccaagaccccattacccatgagacgatcagacgtgggagtgagagtaaagggagatgaaggaaatcctctccatcctgactttgatgataaagtgagtcatagtcttgttctctgagctggggaactctagatcctgactttcctcaaagcaaacagcaagtgaacttacttgggtggggcaccctgtctggggaagcaaagccttcaggaaactcaaaggtctgcgtagagatgaatcagagactcaataacgaagaaataaaaattaataccagatgggtgaaggaggcagttgaaagtccttgtaaatagtcagcatccaagagtgctgcagaagtggaaggtgccacaaacaatgctcttctgccaggagattcctaaaaatctgctggcaaagaccagagaaagaatcagagccacgtgcccagcaagacattacctaagctcaaaagggtttaaaggacttataaccctgccttttaccctcaattatttcatgatcaccaccatgccctttttcctggtcaggtggttggcagtagtttggaataccttgctgtttgtagaacatgttaaagcatgaattatttgttgctatgccttctgggtgcatatttggatgccctaacagatgaactaatagctcttttcatctcactctctttattgagtcttgcccatttacaacaaaggagagacttgttttgtagatctttaaaacacacctgaggattttgaattcatttataagccaatcccctccagtgatcattcagtaagaaccaaagtcatttgcaaagctatacaccaacaacatttaaactggttaaattgagccaaaccacccaatttggctgttcagccaaattcaagtatgtccaatgcattgggatattaaatccccaacaaattcttctttggcatggcctgacaagatcactggtatttattggttgcttttatacaaatggaaagaaatatatcataaccaaaaagttttcacaggcaacctcattagaatcttgcatgggacccaagagtgggctgaagaacacagtctttcctgccaaagagcagccttttgctctgcaagcaggtggctgatgggctgttttatgaagggtttaatgatctctgtctgccttagttacctaccaaaataaactgtgtgaatcccaacgtggtagaaggactccctcattaactgtcaagcaaaatcttggtagggctccacagcctgaggaaataaagttgctaaggaagacaagtcagtgattctgtagtttctacagacctctgcttcagatactgttagcagcccaggaagtagttctgttggctgcattgatcctgggcccagaattaccctaaggcagaaccatcagggagacagagctagatcagtctccattcccctaggacactactcatttggcgacaagctaaccagagagcttcactcaatttataatattcataactgataaaggccttttctggtatcccactaattatatatccaggttataacctaaataagatacaaaactgaggatgcatttttgtctgatctctttatttgatgcctgaggaaactgagactcaggaatggctgaactgcctgaagttgcacacctgagagtcgagcccaggtctcctgacttgcaggccacagttcttcctgctgtgaataccatcatgtgctgccagctgcacatggttgaatgggagttacagaagtttggaaaacctgggtcagatatcagactagagaaacatccaaagagagataagaaaaaacatagactggatggtccacaagcctcagtgtaggaaatgaagtggattagccaggaaatcaggaacctaggctgttttgagggggcataaaagctgccttgctcaatcatgcttatttcaatctatagagagaaacaccctacaggcagaagacctgccatttttacccatgcttggtccaagagtacgccttccttcatccatatttctagctttctccccacccactcctttctttggaaggaagttattttcctttcctatcactgaaaattctaacagagccccactgagagtcttcttcatcctacgtcctcatttaaagccaaattttactgagcacttactatgcaccaggtgctgagctggggtaacaaagatggagcagccacagttataatccacaaggatctcctcatccaaaggtcctgtttatgtagagtgcttgcttgcaccatgtggacagtgagcatacttctaaaccccaaatctcaacatatggtccaagaaaagcctgcttttctaatttgcgaatgttttataagggtgtctttaaaaggcttacaaattgaattgtgttagtaagtcctataacaagttcctttactagaaaaaaataaattttattaaatcaggatttttgagaaaaatctgtgctgtgtgttctccaaatccatatgttttaacttgtaaaacctccctataatcacagtctattgcagttgggaaggatctgaaatgtcacctaatccagaagatgtaaattttttattttttaacaatgaaacaatttttaaaaacaaatattaccgtgacttccaaaataataaaagaattaaaattggcacctttctcctaaaaaatgagcttgtttactcttcccgtcgcaaatgaggaaactgagatccaaagagagtgagaggtcaaaggtctcaaagaaagttacttgcagagtgagggtaggaacataggatcctttcctattctctttccacccatccatccatccactcatccatccatccatccttccattcacccacccacccatccatctattcatctatccacccatctatccatccatccacccattcacctatccatccacccatccatctattcattcatctgccatccatccatctatctacccactcatatatccatccatccatcattccattcatccacccacccacccatccatctattcatctatccatccatccaccccttcacctatccatccacccatccaccatccatctactcagccatccatccactatctatccacccatccatccgttcattaatccacccatccattcaacaatccacccaattttctattcatccatccatccatccacccaccatctatctattcatttatccatccatccatccatcatatatctacccattgatccatccacccatctagatattcatctatctacccatccaccaaccatccatctattcatccatccattcatctacccatccattcatctacccatccatctatctacccactaatccatctatccatccatccacttcacaaaccttcaataagtcctaggggtcctgcacttgaaaaacaggtagacagaggccagaccatgcatggccttatgagtcaccttaagaattttggacattgtcttaagaacaataagaaagacattgcagtactttttgttttgcttgggtttagggattttcttttaaaaacattttattgtagaatgtttcaaaagtagaaagagtagtatcaattacctagcttcaataattctcagcacatggaaaaccttgttttacgtctccccactttccccaccccactgggttattggcctgcaaatactcagtatgaatcttcaaaagacaaagactctttaaaaatatatatatatataatatatatataatataaaattataataccattatcaaacttaaaacatttccatagtaattccataatattaaaatttcattagctgactaaaaagtttagagattgggaactcacatgacacagttgacattttagagacatcagctctggctacagcatgaagaaagggttatagagagatgagccaagtctcaagggccaatgcagtaatccagatgagaatggaagtggcctgaacatgacagcagtagggacagagaggaatggagaggtacaagagcactgcaggaggcatcgtcgagaggacatcttgaaagccatggggaagatagacaatggaaaccattaggatgaggccatggggaagatggacaatggaaaccattaggatgaggcccagcatctagtgtgggtggtggtgccattcactgagaggagaccaaagctgaaaatatccatttggattaacagatggggtgtgtcttttggagaggtggagcacagggtgggagaggggcatcacggggagctgtccagggccagctggagagaatgcttgggctggagagacaggttcaggagtcctgaagctgtaggtggaaactgaagttgtggctgcaggtggtgaaagtagaggaggctgaggacagaactggaggctcagtgccatgatgggaggtgaagagaaacacccagacagactagcaccaaggaaagagcatcatttaaaaggggaaacgtggtcaatggtgtgaaatcttgcagagatgtcaagtaaagtcagactcaaagtgggccactgggtttaggaaaaaggatttagagcaagggatgttgggaagagcccggttggtgagggagagaaagcaagcaccagactgtcaccagtgaaaacggaggaactggaatttcttctgcgcccgacccaaagtgctaggattacaggcgtgagccactgcacccgacccagtctgtaatattttattatggcagctctagcaaactaatacagccaggcactgtgattaacatgttacttccttctttttatttaatattcacaaacatctcatgaggtaagtgctcctgtatctccttttcttgatgaagagattgaagcttagagagggaaacaaactaacttgcataagatggaaaagtcagtaagcagaattctaatgcagtttcccagggatgctgtcacaaagcaccacagactgcagggcttaaacagaaatcgatcgtttcacagctcgggaggctgggagagaccaacgggtcggtagggttggtggcttgagagggctgtaaggaaagaatctgcccatgtttcttcatatcagctttcctctccgtattgctcctctttataaggacatcagtccagttggatgaggggcccaccctgctctagtaggacctcatcttaactaattacatctgcaatgactttatttccaaataaggtcccattctgagatactgggggttaggaatttaacatatgaatttgggggtacacaattcaaccctcctgccctgcctggatgagtgtgagctgaaggactcagtcagctaggggaaaacctgacttcagggtcttaaaggaaaggggtgactgctgggagcaagtcaggagagaggtcatatatggagaaaagtcccatagaaggcaagacaggatggcattcagtggcaggtgacaggtggagggattcacttgggcatgagaggacacattttccttattgttacaaggatgagggaaggaaaaagggatgagttgaaatgtgaagtcaatctgcagatgtggaggagggaagttgaggaagttcatttcagagggcgcctgctttctttgtggagcaggtggggagactgcctactgaggttaacagcagggtttaagattggggctcagaagaaagacagcaaataaaaccagagacattgaaaaacatggggaaagtttgaaacatccgctgtgtataaactgcaacagcctgctgtttctagactaggccccattcaatgtagcattgcagaagataatctactctcattttaattagaaaaataggagaagaggagggtgagctggccagggaactacagaaggctgcctgacagtaacaagggtctagatggcattggtggccctgaggttgcagtggcaccatctgcagggtgtgtggttttgccagccatgctcaatagctgggcgattgatgcagagtaagtaaacagttgagttcatccaaagctgggctttggccagggcaatgcattaaaaggacaaacggcaaggaggttgagcatattggcaagaggagggtgaagtagggaagctcaggggtttcagtgggcagagagggaagtgggcatgtgaggaggctgtggctatttctgctgaagaggcctgctcatgccccttgctttcggagcgcatggctgttgctgcttcctggaggaacagatgctgccagatgtgccatactaatgagctgcaggctgacaggctccccagatggtctccctcctctgcagtggtcctgactggtcccagctgggcaattcagcaatttgtgctcagtgctgccacaacgctcagagcatgctctggggacacacacccctgtgaaaggatgaggttggtaccagctgccctcctagtggcgtgtcgatgtatcccctggatcagtcagctcatttctctgttactttaaaatgcagtatggagtgactctgtttacatcttggattttattgctgtaatcttctaagactaccaatcttcccttagctgccatatttcaaataaaaactatggatattattataaatattattgatattactattctatacctctactgatgttattagcagtcaacttgaaactccaagttaccatattcacttcagtatcttcatatacaaataaaggagaagaaaaacccataaatgttttagaggggtggtgacacactaatgttattcctagtacaaaatggtcaacatttaaaaaaaatactaaacattgtcagaagcaatgggagctattataccttgttgatgagaatatcgattgatacgaccactttggaaacagtttggtattttctgttaaagctgaaaacaaagcaggcaaggttctgtgagcctgtagtcccagctactcaggaggctgaggcaagagaatcccttgaggcagcctgggcaacacaaagaaacaaggaaggcaggaaggcagggagggatggagggaaacctatcatccagcaattccacataaacacaacagaaacagataaagatctacgtagcattattattcataatgggctagtactggaaacaacacaattgtctgtgaacattattaataggatggaaaaatgttggcatatccatacagtggaataccatacagcaatgcaaattacaaactacagctacaggcaataacacagatgcattgctcaaacctaatgctgagtgggagaagctgacacaaaagatcatatgctgtgatccatttatccaaagtttaaaaacaggggaagtcactttattgtataggagtgccaagtgacatagtaaagcacagagaaaactaaggagggaatgacgagaacagtccaggtagtcacctgtaggcaggcccaccgttaacagacaactggcacattcagtaattgaggacacataagtatactttagacgctgctttgcttatatacaaataaaaatctgcaatatatatcatatggaattattcttttcctttgacatcacttcaaaatgtatattatctgattcttatcatgagtttaaaacaaaggatcaatgcctgatattctcccaaataataaattatcaggattccttggagcatgacaaaaaacaattttttgtggggcttaaggtagaagtacagatggagaactgcatattatgggtctaaatattgtaaaattataaattaaactaacaagctgttaaataaaagatgtcccggccgggcgcggtggctcacgcctgtaatcccagcactttgggaggctgaggtgggcggatcacgaggtaaggagattaagaccatcctggctaacacgatgaaaccccgtctctactaaaaatacaaaaaattagcccagcgtagtggcgggcgcctgtagtcccagctactcgggaggctgaggcaggagaatggcgtgaacctgggaggcggagcttgcagtgagccgagattgcgccactgcactccagcctgggtgacagagccagacttcgtatcaaaaaaaaaaaaaaaaaaaaaaaaaagatgtcccatcctcctacttggacaaatgtctcttcatagtgacctgagaaaccacgttggaccttagaattcttggactgcttgggtcttcctgctgtaacatgtgccacaggaagaagccacccctagacccagccatctacccttatgccccagccctgctccatcccataacccaagggccttggtgctcatatgtatcactcttgagccctcaagtctaccttcacccatggccttttacgaatatctgcttccaggccccccgtcaggaataaggacttaaggaagagcccacaaagaccaggaagtaggtttggaatcgtctgaacaggaagtcccaatgtcctggtccttggcacggggtctagaaagggagacatggatctcgggtgggcatggtctcttggccccacagacctctttccccttgagaaagttcatggctggaggacagccagaagcccaaaagcacaaggcccaacacagagaccccggtgcatggggtaagggtagtaccaccttaatgggaaagagaggggttgcactggaaagggctcttggaaagcttctggagtcctggcagtactctatgtcttgacctgggtggcagttaaatttataacaatttattaagctatacatttattttatacagttttctatatgtgtgttatatttcccagtaaagaattaatgacatgtgtgtgtgtatatatatatatataatttctggtactgtagtttatggtatccccatagacaaatcagctctgagaggttgtcttataagcacagacaccttgggcagttaaaatgcctcaaggtgtgagtacctaaagaagcaatagacagacagggcgctggaaacgcagtaaatctcccttttgtttctccatcctgtgtggggccaagacactggggtaaccacacatgggttcaggcagagcaaatgagtcatgggcctgtgtccccttgcctagccactgcaagtgcctcagaggaaaattcctttttcccccctcttagccaagactataaatactgcgtttatcaaactgaaattacaggaggctgttcccatcctggtagaagtgaaaggagaccaactcccaattatcctgtttggaaaggagttctaggaggacttctcttcctcctaagggcagctgcataggttcattaatttttttgctgagcttctattatgtgccagacactcttcttatttttctgcttccccttttaaaacaacctcttacttattcttgataggaaaacactgtccttttacaaagattcacattaccaattctcaaaaagatattcacgtgccccgtgtggtttaaatatcagggtttttctaaggatatataccccaactatagcctacaaatacatacacatacatacacacacaccatctcaaaacagccttacagctgcaagatattgaaagagagtgaaaaattggccagtactaactcaccgaaagcccagtccatgtttttcccaaaaaatcaaattctgggctttgcatctaagctatttaaaagccacatttccaaaacactagtttttctccttttctggaaacaagaaaagcatatggctccagtgaccttcacaagctgctggtaagaggtagagtcaggcacatcttgtggcttcaaaatgataaaagtggtaacatattaagttggtataaagggggatggtggggcctcagggatgggagagtagaaaacaatcaatgaaatcaatgacaagactaaaactgtaggttataggcaaggaaatttcactctcacctctactatccatacaaaacatctggcaaacgtctacccatctctcaagactccacccaagattgaccttcctttgtgccctcaccagacccactgcacatttgacccgaaatgatgtaacattttattgtgctgtatttttgtttgttcagtgagactgtgggatccttgaggacaggactatattttatgtgtctttgaagttccaactaaagcatagtaagaaccccataaatgctttctttgattgcatgaatgaatggatgatggattccattcacaagactatggatttggcttttccagctgctatgatgcaacccttaaatgatgaaaagcatctcaatttttttcagatcttaccaacctttccatctctatctcctgttttcagattcagtaagctgtgaggtccgtaatgtcagacactggcaaacatcatatgttcttcaagtagagttatgaaaacgaagaaactggtcagaagagtaaaacgccggaattgtcctttccaacatccagagctgcatcattccttggggcaaaatgtggacaagggtgagtactgatagaaaaaaacagacaatttgtgattcccctttttccagtttgctcagcctaaattctctgcaataataatacaaatcatgtttttttgtcatacgggcctgcaactaacatttggggaaaatactgttaagtttagactgccagattttgctgttaggtgaattttttacatggatgcactgatgcccacagggcatcctattccatccagaaatctctggggaagcagtcttctgggatgcagatagattattccacttaacataatggtgcccgagcaagcctggaagttacactcactgaactattcattcagaagctgattgcccacgtttggaaatagccagttcttggtgccttgtttctctgtttgccagtcaccttcaaccattcaacttccattcggccattcctcaagaaaatcaagttggcctggagtagagtgtaggatgaaaataatcaatttttctatctaaccaaggcttcctaaaggttttatgaaaattcagtagaagaaatgatatgtaattttacctattagttggcctctaaaagaggcaggcatcatcgcatggcatagtggcattgagggtcacaaagatctgaattttggtccttgcttttctgtttagtagtagagttgacctggagccagtgacctgacccttttgaatctctgtttctgtgtttataaaatggtgacaggaagattgttcagaggatgaaatgagaaaatgcacatagagtaactcatgctcaaaatgaaaaaaggtaaattcccttatctattgagatcgatcaactgttttctgtatctcagagaatcaaccatcaactgcacacaaataaaaaagctctgggcaccgtatcaagccaagaacagcccaatctcctttctgggcaaacgttccaaggtaaatataataagaaatgctttctttaaataatttgataagtaacaaaaggatttccctggaaggcattaaaaacaagtttgattgtcatatcactgtgggtttttttaattatattttaagttctagggtacatgtgcaaaacgtgcaggtttgttacataggtatacatgtgccatgtgggtttgctgcacccatcaattcatcatttacattaggtatttctcctaatgctatatctcccccaggcccccacccactgacaggccccggtgtgtgaggttccccaccctgtgtccatgtgttctcattgttcaactcccacctatgagtgagaacatgcaatgtttggttttctgtccttgtgatagtttgcttagaatgatggtttccagctttatccatgtccctacaaaggacatgaactcatccttttttatgactgcatagtattccatggtgtatatgtgccacattttctcaatccagtctatcattgatggatatttgggttggttccaagtctttgctattgtgaatagtgccccaataaacatacgtgtgcatgtgtccttatagtagcatgatttataatcctttgggtatatacccagtaatgggatggctgggtcaaatggtatttctagttctagatccttgaggaaccgccacattgtcttccacaatggttgaaccagtttacactcccaccaacagtgtaaaacccttcctatttctccacatcctctccagcatctgttgtttcctgactttttaatgatggccattctaactggtgtgagatagtatctctttgtggttttgatatgcatttctctgatgacaagtgatgagcattttttcatatgtctgttggctgcataaatgtcttcttttgagaagtgtctgttcatatcctttgcccactttttgatggggttgtttgtttatttcttgtaaatttgtttaagttctttgtagattctgaatattagccctttttcagatgggtagactgcaaagattttctcccattctgtaggctgcctgttcactctgatggtagtttcttttgctgtgcagaagctctttagtttaattagatcccatttgtctattttggcttttgttgccattgcttttggtattttagtcatgaagtccttgcccatgtctatgtcctgaatggtattgcctaggttttcttttaggatttttacagtgttaggtcttacatttaagtatttaatgcttctagttaatttttatatacggtgtaaagaagggatccagtttcagctttctacatatggctagccagttttcccagcaccatttattagatagggaaccctttcaatattgcttgtttttttcaggtttgccaaagttcagatggttgtagatgtgtgatgttatttctgaggcctctgttctgttccattgatctatatatctgttttggtaccagtaccatgctgttttggttactctagcttgtagtatagtttgaagtcaggtagcgggatgcctccagctttgttcttttaagtagttttttccaattacgtaaagaaagtcaggtagcttgatggcgatgacactgaatcctataaattaccttggaaagtatggacgttttcataatattgattcttcctatccatgaacatggaatgttcttccatttgtttgtgtcctcttttatttcattgagcagtggtttgtagttctccttgaagagttccttcacgtcccttgtaagttggattcccaggtattttattctttttgtagtaattgtgaatgggagttcactaatgatttggctctctgtttgtctattattggtgtataggaatgcttgtgatttttgcacattgattttgtatcctgaaactttgctgaagttgcttattagcttaaggagattttgggctgagacaatggggttttctaaatatacaatcatgtcatctgcaagcagggacaatttgacttcctcctttcctaattgaataccctttatttctttctcttacctgatttccctagccagaacttccaacactatgttgaataggagtggtgagagagggcatccctgtcttgtgccggttttcaaagggaatgcttccagcttttgtccattcagtatgatattggctgtgggtttgtcataaatagctcttattattttgagatacgttccaccaatacctattttattgagagtttttagcatgaagcgctgttgaattttatcgaaggccttttctgcatctattgagatgatcatgtggtttttgtcattggttctgtttatgtgatggattacatttacagatttgtgtatgttgaaccagccttgcatcccagggatgtagccaatgtgatcgtggtggataagctttttgatgtgctgctggattcggtttgccagtattttattgaggatttttgcatcaatgttcatcagggatatggcctaaaattatctttttttgttgtgtctctaccaggctttggtatcaggatgattctagcctcataaaatgagttagggaggattccccttttttctattgattgaaatagtttcagaaggaatggtaccagctcctctttgtacctctggtagaattcagctgtgaatctgtctggtcctggactttttttggttggtaggctattaattattgcctcaatttcagagcctgttattggtcaatccagagattcaatttcttcctggtttagtcttgagagagtgtatgtgtccaggaatttatccatttcttctagattttctagtttatttgcatagaggtgtttatagtattctctgatggtagtttgcatttctgtgggatcagtggtgatatcccctttatcattttttattgcatctatttgattcttctctcttttcttttttattggtcttgctagcagtctatctattttgttgatctttttaaaaaaacagctcctggattcattgattttttgaagggttttttgtgtctctctctccttcagttctgctctgatctttgttatttcttgccttctgctagctgttgaatttgtttgctcttgcttctctagttcttttaattgtgatgttagagtgtcgattttagatctttcctgctttctcttgtatgcatttagtgctataaatttccctctacacactgctctaaatgtatcccagagattctggtgtgttgcatcttttttctcattggtttcaaagaacatctttatttctgccttcatttcgttacttacccagtagtcattcaggagcatgttgttcagtttccatgtagttgtgtggttttgagtgggtttattaatcctgagttctaatttgattgcactgtagtcagggagagtttgttgtggtttctgttcttttacatttgctgaggagtgctttacttccaactaagtggtcaattttagaataagtgcaatgtggtgctgagaagaatgtatattctgttgatttggggtggagagttctgtagatgtctattaggtctacttggtgcagagctgagttcaagccctcgatatccttgttaaccttctgtctcattgatctgtctaatactgacagtggggttttaaagtctcccattattattgtgtgggagtctaagtctctttgtagatctctaaggacttgctttatgaatctggttgctcctgtattgggtgcatatatatttaggatagttagctcttcttggtgaattgatccccttaccattatgtggtggccttctttgtctcttttgatctttgttggtttaaagtctgttttatcagagactaggattgtaacccctgcttttttttgctttccatttgtttggtagatcttcctccatccctttattttgagcctatgtgcgtctttgcacatgaaatgggtctcctgaatacagcacacccatgggtcttgactctttatccaatttgccagtccgtgacttttaactggggcatttagcccattttcacttaagattaatattgttatgtgtgaatttgatcctgtcattttgatgttagctcattattttgcctgttaattgatgcagtttcttcatagcatcaatggtctttacaatttggcatgtttttgcagtggctagtaccagttattcctttccatgcttagtgcttccttcaggagctcttcttataaggcaggcctggtagtgacaaaatctctcagcatttgcttgtctataaaggattttatttctccttcacttatgaagcttagtttggctggatatgagattctgggttgaaaattcttttctttaagaatgttgaatattggcccccactctcttctggcttgtagggtttctgccaacagatccgctgttagtctgatgggcttccctttgtgggtaacccgacctttctctctggctgcccttaacattttttctttcatttcaaccttggtgaatctgacaattatgtgtcttggggttactcttcttgaggagtatctttgtggtgttctctgtatttcctgaatttgaatgttggcctgccttgctaggttgaggaagttttccaggataatatcctgaagagtgttttccaacttgattccattcttcccgtcactttcaggtacaccaatcaaacgtagatttggtcttttcttatagtcttatatttcctggaggctttgttcatttccttttactctttttttctctaaacttctcttcttgctttatttcattaatttgatcttcaatcactgatatcctttcttccacttgatcgaataggctattgaatcttgtgcatgagtcatgaagttctcatgccgtggttttcagctccatcaggtcatttaaggtcttctctacactgtttattctagttagccattcatctaatcttttttcaaggtttttagcttccttgcaatgggttagaacatgctcctttagctcagagaagtttgttatcacagaccttctgaagccaacttctgtcaactcatcaaactcattctctgtcccgttttgttcctttgctggtgaggggctgcaatcctttggaggagaagaggcactctgtttttttggaattttcagcttttctgctctggtttctccccatctttgtggttttatctacctttggactttgacattggtgacctacagatggagtttcggtgtggatgtcctttttgttgatgttgatgctattcctttccgtttgttagttttccttcttacagacccctcagcttcaggtctgttggagtttgctggaggtctaatccagaccctgtttgcctgggtatcaccagcggaggctgcagaacagcaaatattgctgcctgatccttcctctggaagcttcgtcccaggggggcactcacctgtttgaggtgtctgttggcccctactgggaagtgtttcccagtcaggctacacaggggtcaaggacccacttgaggaggcagtctgtccgttcttggagctcaaatgccatgctgagagaaccgctgctctcttcagagttgtcagacagggacgtttaagtctgcagaagctgtctgctgccttttgttctcctatgccctgaccccagaggtggaatctgtagaagtagtaggccttactgagctgtggtgggctctgcccagtttgtacttcctggcctctttgttttcactgtgacactttgtttactcaagcctcagcaatggcagatgcccctccccccctcaagctgcagcgttgcaggtcgatctcagactgcagcgctagcagtgagcaaggctctgtgggcgtgggacccactgagccggcacaggagggtatcttcttgtctgctggttgctaagactgtgggaaaagcacagtatttggtcaggagtgtactgtttctccaggtacagtctgtcatggcttcccttggctaggaaagggaaataccccaaccccttgcatttccctgatgaggcaatgccccaccctgcttcagctcaccctccatgggctgcatccactgtccaaccggtcccagtgagatgaatcaggtgcctcagttggaaatgcagaaatcacccatcttctgcatcaatcttgctgggagctgcagactggagctgttcctattcgtccatcttggacaatagcccgcttactgtgatgttttaaggtcaaggtaatgacctcttaacaatcctcgctagtactagattctatggcaaaagtctgtcacagaactggatacttcagaggcttccaccaaaccaaattagtaatccaaactggaacaaactatatttatttgtgaattctcaatccattcaatataaataccaatttctctatgaatagtgaaacaaaaaatgtctctcttctcattttttatacctactcagccaacattactaaactgagacaaaaacagagagatacagggagataaaacattccctgaagcaagtcagtatttcattccagctgtaactctgcaattaacattagttctatggtatttccaatacatgctgattctcaacttttggaattctaaacctaaaaaccatataatttcaccacctcaattttttaatttgctttagaattatctatgttgagtcaaaagggcctttgaggtctttaatttcatgacttctgggtgattttttcccccattattaaactttattttaacttttcatacacacagatacacacactcacacacacacatcacttcacactacgcatacatatattcctactgctctttttcaggtaggatgctggttaaaaatatggactggggctgggtgcagtggctcatgcctgtaatcccagcactttgggaggtcaaggcgggcagataagttgaggtcaggagttcgagagcagcctgaccaacagagtgaaaccccatctctactaaaaatagaaaaattagctgggtgtagtggtgcgcacctatagtaacagctattcagaaggctgaggcatgagaattgcttgaaccccagaggcagaggttgcagtgagctgtgattgcaccactgcactccaacctaggcgacaaagcgagactctgtctccaaaaaaaaaaaaagaaaagaaaaaaaaatacggactagaagccatactgcctagtttgaatcccagtcttgcctctattgagtaatagggccttgaacaagttattaaccctctttgtgcctcagtttcttcatctacaatatgagaatgagaatagtaccgacctcaaagggtttgtgatgattaaacatgcatgttgcttagaattgtgtttggcacgtactaagccctcaaaagaagcttcctgagttttatagcacataaaaagtcaagtcagtgcagctaaaagaaatcattgaagggagaagatgagagacacagagcataatgaaaggcctggtgggagaatgagccttgggaatctggatggggctagacttggtcactcacctgaacttccttaagctgtgatttttctggttccagaggtgacaatgaagacaccatgagtgaaggcatggacagaaaaattcactggggaagcctgtgctaaactcataaatactcttaaaagtaaaccccttacaagaagcctcagcaaataaaagcaagccctgagggaactgcactaatatcagtgtgaggaggaaggcggagaggtctcctcacacctggagagctgtccctggctgcagagaggctggcaccctgcagcattcttttcccaggatggttctgttttatttcattttcaaagagctggtagttaaacatttaccattgctccactgaagacaataaagaataaaggggctggctcagaaaaaaatgaaaaccaaaaaaaaaaaaaaacaaaacaaattaaactgcaaagctttttcacctttgcattagggcaggaagcctgcagccaggcatggcatgttatagtttatctaaagaaaaaaagccaaatcggctgggcgtggtggctcacgcctataataccagcactttgggaggccgaggtgggtggaccgcctgaggtcaggagttcaagactagcctgggcaagatggcgaaaccatgtctctactaaaaatacaaaaattagccgggcatggtgatgtgcacctgtaatcccagctactccggaggctgaggcaggagaattgcttgaacccaggaggtgaaggttgcagtgagctcagatcacgctactgcactccagcatgggtgatagagcaagactttgtctcaaaaaagagaaagaaagaaaagaaaggaaggaaggaaggaaggaaggaaggaaggaaggaaggaagggaaaggaaaggaaaggaaaggaaaggaaggaaggaaaggaaggaaggaaggaagaaagaaaggaaggaaggaaattttgccattctttcccactaaatgcaagttcactgcagttccaaggtacttatccacaccgtgtatttacatctgcctcaggtttgtagtaaatgctgtaaacagagagatgtgatgaagagaggtaatgcatattctttatcacctctctaaaaacatgattatcctgacctattgtagggaatatgaaaacactatgtagtgagaattaccatcctgcttcattatacttaaaagagaatttaacctgttcagatttctgagttgttccttaagtataaaagtgaaagaatcaggatcaaaacgaagaacctctaaatccgcctattgtatctgcttgggctgccatgacaaggtatcacagagtgggggcttaaacaacagaaatttattctctcacagttctggaggctggaagtccaagataaggtgtctgcagggttgatttctcctgaagcctctctccttgacttgtagaccttcatcttctccctgtgtggtcttccctctgtgggtggctgtgtcctcatctcctcttcttataaggactcctgtcatattggattagggcccacccatgtgacctcattttaacttaattacttctgtgaagaccctatctctaaacacagtcacatttggagttccttggtgttaaagtttcaacatgaatttggggtgggggtcacaattcagtccatcacacacctaacgtgggtgtaatgtgtctacaggaacagtttgattgagcaacaccacaggttgcattcccagagaagcaaattttgagatggagattggcatgctggaagtttgtggagagtgctcctgggaaactgtcaaggcaagagaggaagcaggattaggcagaggaggaagctgaaatcaggataaagaccccagcaagtcacagaggccctccaaagctgggatgtccttccatgttgtctgaactgaggcaaggtagttggaagtttatgccccttcctagacagtcactgtaaacaggccacccgagggaggaggtgtgctgtgcctcagctggggacaatctcaagaggggactctgaagcaagctgctaggtgccaacccttccatagctgacagaatgattgactaagcctgaagtggggtgtcaggtcatggaccccagtgtccactacaaatctgaaatttactttcctcaagtgagtggaaggacttaccattatcttcttaagaaatatctcgcaccctacagaatgggagaaaatatttgcaaaccatccatctgataatgggttaacagtcagaaaaataaaacgcactcatacaataataacaataaaacataatctggctaaataaatgggcagagaacctgaaaagacatttgtcaaaagaagacatacaaatggccaagaggtacatacaaaggtgtgcaatatcactaattgtattagtctgttctcacactgctaataaagacctacccaagactgggtaatttatatagaaaaagaggtttaatggactcaccattccacatggccggggaggcctcacagtcaatgcagaaggcaaaggaggagcaaaggcacgtctttcatggcagcaggcaagagagcttgtgtagtggaactgccctttacaaaaccatcagatcttgtgagacttactcactgccataagaacagcacgggaaagacccgtccccatgattcaattacctcccaccagattcctctcacaacatgtgggaattatgggagatacaattcaagatgaggtttgggtggggacacagccaaaccgtatcactaatcatcagggatatacagatcaaaaccataatgagatatcatcttaccccagttggctatcatcaaaaacactaataagtgttgtgaggatatgggaaaagggaacccacgtatactgttggtaggaatgtaaactgatatattagttcgttcttacattgctataaagaactacctaagactgggtaatttataaagaaaagaggtttgatgggctcacagttctgcaggcggtacaggaaacatggctgcagaggcctcaggaaacttagaatcatggcagaagacaaaagggaagccagcacatcctatatggctggaacaggagagggagagagcaaagggggaagtgctacacactctcaaacaaccagatctcatgagaacttactcactatcacgagaacagcaaaagggaaatccacccccatgatccaacatttcccaccagacccctcccccaacactgaagatcacaattcaacatgagatttgggtagagacatagagccaaaccatattagctggtatagtcgttatggaacacagcatgcaggttcctcaaaatttaaaaatacaattatcatatgtagcagtaactccacttctgggtatatatccaaaggaaatgaaatcagtacctcaaagagttctatgcacctccatgttcattacaacattattcacaatagccaggatatagaatcaacctaagtgttgattctactaatacatgagcagataaagaaaatgtgatacacacacacacatacacacatacacacacacacacacacttacacaatggaattctattcagccttgaagaagaaggaagtcctgtcatttgtgacaatgtggatgaacctggaggacattatgctgagtgaaataagccaggcacagaaagacaaatactacatgatctcactttatatatggcatctaaaaaagacagactcatagaagcagaaagtagaactgtgcttaccaggggttgggggactgggaggattggaaagatgttggtcaaagagtacacattttcagttacaagatgaacaagttttgggaatctaataaataacatggtgacatggttaaaaatactgtatttaatatatacttgaaacttgctaccacagtagatcttaaatattctcaacacgcacacacacacacatagacggtcatggtgtgaggtgacagatatttcaattagcttggttgtggtaattatttcacaatgtatatgtatatcaaagcatcatgttgtacactgtaactatatacaatttttatttgtcaaatatgcttcgataaagctgagagggggggatagaaaacaaagaaatttctcacaatgtctctcagtagatctaagggtaacatattaaaaactcgaaaatatttggcccaatcctgggctgctaacatgggttagtggaaaagtgcactgtggcgccagaaaggtctgggttcaaatctctatcttgctgtttgctaatatttcttaacctctctgaacctccaatttctcctgtgcaaaatgaatataataatacccatcttattggactgttgcaagatttaaacaaaaaaaaaaacatagacttagattgtctagcaacaatgcttgacacaaagaaggcatttaaaaagcatttgttcccttcccctttttacagcaaatagttcattggcagtgaatgattacaaactacaagtgtttctcaacttggagtggtttctcaagtatgtgactggaaccacctgtagagattgttaaactacagatccctggaccccaccccattcttaatgaatctagttcatgggttctagggtggagcccaggaatgtataattttagcaagttccatggatgtttctgatacccagaaaatcatgaagccctctgcttgaggctgagctcagtaagaatattctttgtattagaacccagggaggtctgtgcttagaggatgcctgaggacatttgcacctccctccttgtcatgagttctgtggatgtacatctgcacatcacatcacagagacctctctccattgcataaattctgtgtattccaaaactaaaacatgcataaatcacatcagttatagactcaaaccaattctcctttttgagatgtcattttattgagttataaatcaccactaaaaggcaattttgtgcagacagaaattttactggaggatgcagatcccctgagcttgtctggaaaatgagaagcctattcaaagacgaagtgtcctgctggtggaagagtcattgggcctgcaaagaggcatgtctggatggaggtttaactttttcatttcaaccaaacaaaatggagcccctcacccagatgggattgctgaaggctttctgggtttgattatgggtcacaaagtccagctgcattgcagaaattacactgtcaagaagacgctgaccaaggtccagaaaataaacaggagctgagatgcagaaagtgacctcgaagcttaaacaggctttcccatgcctaccagacgcttttcttgatttaacaccgggtcatgtggtttttcagtgtcttctgtggctttcttttcccatagatgggcctcacttattctaaaatataaagctttgggggtttcttgaaaatggcactttcactcagtaaaaataagtccagatgaaaaccttatctgtgggaatccattctgaagaaggattaaagtaagtctattttccccaaatgatcaataaccacccagacctaatcactatctctgattacatgatgaaaaagattctggaagcagcacagcaaaaatatgacaatgacagagaactcaaaggtgaccctgtactcaccatctccatgcagacatcacaagtgcagggatgagtaagccctttagttggagatctatgttgctaataacaagacattctgagttttcttcttcttagtgagagagccttccatgaccattttcccatagtttgcctttattcgtttctaagaaactatttttccagttttgaccatggtgctgtaacccacagaggcaccgttacactgaaactatgcaaccctatctgttaagtattatccaacgcccacttgggttttcactggctcatttagagaagcacctttgagtacaatatccaattaaacagtaggtttacatggagtgcttcctgctcgtgttaaaaatctcattctggccgggcgcggtggctcacgcctgtaatcccagcactttgggagcccgaggcaggttgatcacgaggtcaggagatcaagaccatcctggctactacggtgaaaccccgtctctactaaaaatacaaaaaattagctgggcttggtggcaggtgcctgtagtcccagctactggggaggctgaggcaggagaatggcgtgaacccgggaggcggagcttgcagtgagcagagattgtgccactgcactccagcctgggcgacagagcgagactccgtctcaaaaaaaaaaaaaaaaaaaaaaaaacctcattctatttctgccctgtgctctgccattccctagatacacagaattttggacccagtagagcaccttcacgaggatagtgctgcagtgaaccgcagtagcaaggaaatcgtacaagctcagtggctcagcacaacacactgttctcactcgtggtccagtcagggactctcctggacagctgtcctcggggatctgggtctcttccatcatgggctccagtatctcggggcctttcacttccagcatgtgaaacactccgtcttcttcaagagggagtgtgtgggacatgttagggagcaggctagaaagcagagtacatcacttccactggcactctaccgtctagcactcaatcgcatcatcaacctaaatccgaagaaagcagggagatgtagagatgagcacagctgctgacagtgcctgcctcggagagatgttagctgcccctttctttcaatccctttttaaggttttgcagttgaggcgactgagactcggaagacatgttacccacagctagtcagtgacagcccagcgcagtgttcacccaggggcctcttgcccacccttattaattccaattaatggataaaagggctcatttggtctcgaggtacagctggagctttgtttcctgctcttctacgcaggactccacggtgaggaggaggacgaccactctgctgcaaaacccgcagttccagggcaatgcctcttggtctgggagctgcacagatgaatacctcaaggagcaagtgccagtagccaaccgtaattatgggaaatgcttcttggctcctaagggatataaaattactttggggaaagtcaaggaaaatagaaacagaataccccataatgctttatttggaggccagaagtcacatactaaggcttgtgttttgtgtttgattctgtcaagagagcttaaaaggtggagacagcctttggggggaatgaaggtctggatggtatcagcctggcttgcaagcgtcgctgtggctcatgaaaacatatgtcttgaaaggttgtcctgctcatagttccgagcaaatgtgagaaacaacagaggcttccaacaaatacctgctaaagaatgaggaaatggacacaggcaaataggcaaatggagtctccttaacggaatcgtaaggctgtctggaggtaatacgagtggaaagaactcctgtgtgaaaatctgcatgcatctttgcccccgtggaaccgtctacacaagtgctaatggaacagttagttacatacctatttttttaaactctgactttaccattacagaggttatatatctataggattttttgcctgaatttttagattttcacctggagatctggtatggaataattaaatgctgcatattgtttctcttattcttaaggatcttggagaaattatttaacagtctgagatctccttctctccttccctaccctccccacccctgacctataacagctagggagagaaaataaatacaaataatatctgctggccaggcacagtggctcacgcctgtaatcccagcactttgggaagctgaggcaggcagatcatgaggtcaggagatcaagaccatcctgtgtaacatggtgaaacctcgtctctactaaaaatacaaaaattagccaggcgtggtggcaggtgcctgtagtcccagctactcgggaggctgaggcaggagaatggcgtgaacccgggaggtgggggttgaggtgagccaagatcgcgccactgcattccagcctgggcgaaatagcgagactccatctcaaaaataaataaataaaataaaataaaatatctgccatttggctgcaaagtatggtgctgatttaacctgaatattaccacataaaatcaaataacaataataatagaaaataggtttatagcagtaccagaattatattacttaatttagctgccttttcccaaaatataatcacacttcctagattttacaggtcagatataaaagagtacagtggaagaattcaatcacatgtgccttcattgttcactttttcatctcaagctcttcttttcatgctagctgttccagctcttcaaaaaatgtttgttcttgtgagtcagaaatattgtatccattttattaacagcctgtttgaagccaataagatgaatgcgtttgctgagcataggttagtttatggcaaagtctggactcaaatcaatggcaggagaggagaggcaagctagttagatacctccaaaggacttggacataaggaagatttcagagttaaattagcaaaatgcatacattcaatacatacacactagtaaaacaaaatggctgcaattagtcaattatggaagtaaaccaagaaaacatccatctgtctgtaaaatagaagagtgtgggaacttcttaaacttcagtcctgctgatctggggtatagtaatgaggaagatgaatatatggttgtaagtcagtgagcagaatgccaagtggctgcattgtgcctgattggatgaaatgttatccatgttatctgattggatgaaaggtatgtgaacagaaggggctggtcagccaaagaagcaagaaagaaggagaatcagagggtctgaaagcccctctagatggcaaagcccttggacatggaagcatctaagaaaaacatagtcttggcagtgttgaccaaaagtatggttccctttatgagacgttccctgttgtgagcaagagtgcctcaagccattgacagcagcattctaagatccattaagagcacttgttctgatcctgtggacaccaagcaaccttgtgataatttggctcctcacatagtgagactattggcagctctgcctcaacacattctggtctacttgtcagttgtatagacgaatttaattatatctgacgtggtgtgctgactccaccctaagcacgccaacaaaatcacttttatgagcctaacagaccttagaccagggtgtactctttaaggtaaacaccaccctcggcatgcagctggacaggcagtaatgttgcccagcaacaccccaggccacacgccatacgccacttgaactgcagctgaaccagcctgcgtaattttgactgagccacatataaagtcaagatcaggatgttctaacaacatgaccacctctagtgatctgaccaaacaattgccatatcacaagccaggagcagtctgcagagtggaggaatggaaagaacctaaaccattttaacaggccatgtgccaattttcaactgtacccgggaccccaccatagacagcttcatcaaagatatcaatgctgttgacagagtaatgttttccaggttttatcccaccctactcagttgcagtaattgttaggtgataaagacagtgacagctcattacaaaattcaacttccagaagctggaaggttaagtgacacctcttacctgctgggtgatgggttagcgtcttaaccttatccttttgctactctctgccccaaactccaaccccatctggaagcttgtgcacttgaggcagtagatttcacatgaaaccaagtcagaaggctttacaacagaccattaagtaggaatgtgtaggaaaagtacgtagaggagaatggatgaaggggatgaagaatattgcctaaaaactcaagaccgttatctgtagcccttataacactttttatttatgtgttctgtgtgtgtgtgtgtgtgtgtgtgtgatttgtgcactactgtaccttcataccagcttgtcacacacgtataaacctatgtccacagacattaactacttggtttttgttttgttttgttttgagatggagtctcgctctgccacccagactggcatacagtgacaccatttcagctaactccaacctccacctaccaggttcaagcaattctcctgcctcagcctcctgagcgtctgggattacaggcacctgccaccatgcctggctgatttttgtatttttagtagagatggggttttgccatgttggccaggctggtctcgaactcctgatatcaagtggatccgcctgcctgggcctcccaaagtgctgagactaaaagcgtgagccaccgcgcccagcctacttggcttctttaaacagctttattgaggcataactgacatacgataaactacacatactgaaaatataaattattttaatctgtaattacacctttattttttaaaaaattgtgtgagcccaaccagataaccatgaaaagttccatattaatgatgattgtactgagtagagaagcctccaattaaagtaaattttgataacattgacatatatatatgcactggtggaaccatcgccaaaaccaagataacaaacacatccatcacctccagaagttttctcatgcccctttgtaatcccacctctgctgcttcctacccccagccccattcctaggcaaccgttaatctgctttctgtcactatacatcagtttggatattccagaaaattatataaatgatacatatcttatataccctttttctggcttcttatactcagaatagttactttgatttgtatctatgttgtaatatgtatcaatagttcatttattttcattatggctgagtgttattcttcatacggatggaccacagtgtgtttatccattcacctttgatagatatttggtttgttcccagttgggggcaattagaaataaaattctaaaaacatttatgtaaaagggtgtgcatggcataggctttcttttctcttggataaaaatctaggaatcaatgactagattatatgatcagtgtattcctaacttcctaagaaactgcctaactatgttcccatcaccagtgtttgagagttccagttcctcctcacccttgccaacacattttatggtcagattttccttctaattcttgctattctaataggtatgtagtggtaccttctagtggctttaatttgcatttctctaatgactaatgatgttgagcatcttttcatatgcttatttgtcatctgtgtgtgtcctcattaataaaatgtctggtcaaatattttgtccattttctatttggtttgttttcttattattcagtaatgagagtttcttatctattctggctacaattactttatcagatttatatattgtaaacattttccgccagtgtctggcttgtcttcttagtctaataacaatgtctttagaagagcaggtgtttttaatttttatgaagtcctatttattaattttttcttttatggattgtgcttttggtgtggtaactaagaaatccttgcctacccaaagtcacaaacattttctcttatatttttatagttttaggttttatatttatttctgatccactttgaattaatattcatataatgaaagatatgaactgaagtgcactattttgaatactgatatccaagtgtactagcaccatttgttgaaagaactatgtttctccactaaagtttctttgcacctttgtcaaaagtcagttgtccatataggtgtgtaggcctctttctattccacttatctatttgtcagtctttaagccaatatcacattgtcttgattagtatagttttgcaattcttgaaatccggcagtattaatcctccaagtttgttcttcttttataaagatttttgtttttgaggatttttgttttgctttttgtttgtgctgttctaggtcctttgtgtttctatatgaagttcagaatcgatttgttcatttctacaaaaaaaagcctactgggcttttgattggggtgatatcaaatctataaatcaatttaggaagaactgacatcttaccgatataagtctttggattcatgaacacattatatctctccatttatttatatcttctttaatttttctcaacagttgttttatggtttttggtgtacagagaactgtacaccaaaatatcatttctcagtatcaaagtattcaaagtacatcacttctcagtatcagactgtcaggaaaatgatcaatttccccttcaagactgacaagctaaaggcaccagaggcttaggcttcttacagcaacacaatgcagggactataaaaagcaaacgatagcacctatttcctaaagtcacgaatgttaagtgagtttaacatttatgcagtttaacgtaacaccggttgtgaaggtaaactgcctgggttcaaatcccagctgcaccacttataactgaatcaccttgggaaattcacagtctctctagaactcagttttctgatcagcttaatgcagaaaatactagcacctccctcataagggtcttcataagaataaaataagctcactaaagacttagaactattcttgtcatataagaactaataaatattagttatattaatatataaatcttagcaagttttatattatatttattatattaatatataaatattagcaatcattgttgattttattattagtagcacttaacatagtatttggaacaaatgagtatccaataaagggtagatattattggcttatgtagcaaactagtggttaacaccttcaggtatgcttctcaactgttttgaataaccgaagctgaactgaatttgctagaagtaggtctgtttgttctttattttttattttttatttttttgagacagagtcttgctctgtcgctcaggctggagtgcagtggcgcgatcttatctcattgcaacatccacctcccgggttcacgccattctcctgcctcagcctccctagtagctgggactacaggcgcccaccaccatgcccagctactttttttttttttttttttttttttagtagagacggggtttcaccgtgttagccaggatggtcttgatctcctgacctcgtgatctgcctgcctcggcctcccaaagtgctgggattacaggcgtgagccactgacactgcgcccagccagtaggtttgctcttaaaaggcctgaccctgaacaggaacattccattctttggatgctgtatttaagatgctatgtcagacatctctatgcaggatctcaccatgataggcaaatctccaccacaattagctttactactggcttccttaatctctctctggcctatcttgaggtctaaaaccctggaggagattgtatgaattatatttcctcattgctcctgcaatccttagagagatgacattttcataaggatgcatctacactaactctggccctttctctagagtaaagaagtgaccagatcacctttcatacatactagactggttttatattgtgatatgatttccaaacccaggaaggctctgtgtgcctctcatcactcaccactactaccatccacccttgcacacacacacgtgaaccctccctcctggcttgctgacacaatctgtctaattggaaatccatttctgtgcttgatgactttgttccctataaaaatacgaattatctttgaaggaaaagcaatcattaacctttgtgtgtaggagacagtattaaagtaatagaaagagaaaagcactcaagattcaagaaagaggcattcaagattattagatcccaaatctttcctctcttgcaagaagagtttgccatggtcattaaagccatggcactgggtgaggtcatcatccatgtggtgactattgctagagaggaaaactctggaatctaatggtctcaaatgcctttttccctcctctgtaaccaagattctactcaagttccctgatctacaataacaggatggcatttgagccattcattcattcattcatgcattcagcaaatcctgaccaccctctcaccatggtcaggtattgttttaagagcaggggacacagtagtgaacaaaacaaaatccctactcccacaaagcttatatccaagccaaagagacaggtaatcagcaaataaacacaaaggttgtaataggttgtcaaggagtaagggatttcaagaataaaaataaaatagggtaaagagatggagaatgccaggaatgctagtttagatagagtatttaaggatgttctttctgaggctgcaatggttgaatagagacttgaaaacagtgagtgaggcgacagctgggcagctagtagaacattccaggtacgggactggcaaatgccaaggtcataaggtagaagtttgctcaaagtgtttgaggaaaataaaagaagcctgtatggttgcaataaagagatcgctggagaggcatccaaaggccaaaccatatagggcattgtaggtgatcataacgacttttctgtatattccaagcgagatatgaaaccactggagagttccagaaggaaagtgacaagatctgaccttatttagaaaaatcacttgggccgatatacctagaacagatcaccagggagccagagggaaagcaggacagccagcgaggagctgttgccgtagctcaggagagagatattggtggcttagatgaacaaggaaggtagtagtcaaagaggcaagaaacagatatgtgatatatgttgaaggatgggatgtagggtttaggttccatgccatgaaaaaagtaaaaaatgactctaaaattggttatagcaaaggagaatgccatttactgagatgtagaaccatggagaaggttggaggagggacagcaagtctgttctggacatgtgaagttggcattgtctatgagatatccagggttcatgttgagcaggcagttgtatacacacagctgggcttcagaggaagagtcaaggttagagagacttccgtttgtggtcatcactgtctgcatggccattaaagccatggcactggcaccatgtggtgacttgctagaaaagagaagaggagcatccaagaaaagacagtgagagggaacagccagggttgtcggaggagtatctggaaagcatggtaacatgtaagccaaactgtaaaaatgctccaaggagggagtgagcaaaagtcgctgagaggttcagatggcgtttttaatctctactatttattactgaattaaaggagatgaacacctgaaaccatgtattaaagtaccttgtgctacaggtcaagtaccagaaatcttgaccaaaaatagcttaagcaataaaagcattcatgatgtcacataatataattctctgagaagagtaattctgagggccgggcacagtggctcatccctgtaatcccagcactttaggaggccgaggcaggtggatcacttgaggccaggagatctagacaagcctggccaatatggcaaaaccctatctatacaaaaattagctggttggggtggtgtgtgcctgtaatcccagctacccaggatgctgaggcacaagaattgtttgaacccaggagtttgcagtcagccgagatcacatcacagcaccccagcctgggtgacagagcgagagtctgtctcaagataaaaataaaaataaaaatatataaaaaaagagtaatcctgaggttggttatctcattggctcaaacatatcaaggaccaagatttcttcatctttgggctctgccaccctgttggccaggtgtggtggctcatgcctgtaatcccagcactttgggaagccaaggcaggaggatcccttgagtgcaggagtttgagaccagcctgggcaacacagggagaccctgtctctaaaaagataaaaacaaaagaaaaaacggggggactgctgtagctccagatatcacatcttctcacaccaatgtccagaggtggaataaagggaatagcctttcattgtgtctctttctaagagtgaagaaactttaccagcaacctcctgcataattatcttttcaacgaacccagaactgtaccatgcacccatgtctacgacaatcctggaaggcagaatgatagaaatcgatatcacactttagggctggggaagagcccagggcctctcaaaggacatggctgctctgaggaaggtggaagaagtcagggttctgtaagcaagaaagaagacttaaaagggtagttcttggttcaacaactgataccatctgcaacacaagcatttgggcattctaaacatgcctatctttcttccacagcaatgatacaaatataggaagttatgaataaatattcattatctctcagccaagaggacaaggttttccttttcaggctagtgtttgagcaaccattgaatgcttatgcatgtcgtagaatctgtgggttcaaagaggccttgaaggtccatgtatcctcaatataaaatccccatgacttcttgtattagaaaagatcccagcaagacatacaggacacactcagattatcctaatgtaacaggaactcagaggatttgatgccaggactagctacaagtgaggccagggcttggcaaacaccaagggcaatgcagtggccagggctagtgtcagggaaacctccctcaccatgcctaggaggcagaagagggctccaagcgtggggcccccaacaggagtcaagaccattggttgagggacatagccaagccacagtggccttgtacggatgggagaggcaggggaaaatgtccagactttacttccttctccactcaactggaagccaaagggcagaggagccgcccagtggaataactgcaggtcagactctggggtgcagagcaggggagaagagggtggagatggcaccggaggagcaaatggaagacacccagtcctccccatggtgggggccagccactcctcaggctgctcatttcccctggccagttctgactgctggaaagttcccagtcaatccagggtccatgcaaaacaggtctaactcttcacttacatgaaaatactttagatagaggacaacagcccacacacctcacagccaagtggtggagtgaacaaccttgagatgttagtttagttccttggccccagggtacccagtgtctgatggaattggaaagctaaggtctccatacatcttccccttggcatgttgtttctcagctggaggtaattgcatcccccacaagacactggcaatgaatagagacatttttcactgtcaaaaatggtggaaggcatgcaactgacatctagagggtagagaccagggatgatgcaaaacatcctataatgcacaaggcagcccccaccatgaagaatgatctggccccaaatgtcaataggccaaggatgagaatcctgcccaggcaggagctgagcctggacaaggctgtagctgcaagacctttcccgggagccacccacgatgtttctctgggacatctttgttttcaaggtgagctaatgctgaaatctgtgttttcaaggtaagataacgcaaaacagtgctagagtccttgaagaactggagggaaggaataagcagcaatggagtttcaggggtgcggggagcgggaggagatgagagctgtttgtttgcagtgggaatggcaattgttgaatttccccttgcctggccccggcttctcaactaatgcaagggggagccctgagccacccttgatatcctgcgagccatcctcacatcacaacatcagctttcgcaggcaagcatgtaaacaagaagaccagccacgagaaacataagaaagaaataaaagttgtttggtcttctgtcaggaacagattgttggaatattccaaccccagtccaaaaagaacaaccaacaataacaaccgggagaccgcagcccacgctgagacacacgaagccttcgcttttcccggtgccgcggaccgtttccaggagaacgcgccgctggcatcgtcctctgtttttgccatggcctggggagctctagtgtttgtccaagcacccgcattagggccaagaaatatgaaaatgtcatctgtgagcatgaatcaggagcaagtgaacttctcatctgctgaaagtcagcaggtgtgagtattctgacaaacatctgcagtcctgcagcaattcctcatttatttggcatcaacagatcagctggaaatatcatattttaagtgaatcttccagatagctcaagttcaccctattaaagaatatccttaatgatgtagccttttagggtgaagacaactttccaaaaggtatctattgcctttacttcaatcaagtatattgacaatatttctattttttaactggctcagaataatgagtataatgtaataataaaaataataagatgtctgcagacctaggggtagtttgcccagacattaaatgaacccagatcagaacctttttccccctgctttttttttttaactctttatcctccctttgtgtagctgtcagctgctactctttacttacatctcccgacctgtccatctgtaatccctgccttctagtaattgccgctgtgggctaggacagtggttctgaatgttggcagcatgctgaaatctcctgggtcccatctccagaattgtgttttcactggcctaggcaagaggacagtttgcaactccccaggtgactgtgttgagtagccaaggctgagaaccactgagatgggaaatccagtatcttatctgttagaattgtgcacaaaataagagttaatatgatctgagagattttcctacaaataagctttagtgtataaacctttggcatgtattttgagctcttcgaatctgcaactttctcattcttagctgtacctcagcaatgtgacctcaagctaggagagaggtagaaaggaccagtggttaagtgtttggggtctagagctcaattacctaggttcaaacctcaactctgtggcctcgagcaagtatcttaacctttttgaacaccagcctcatctataagtgttggaaggactcagtgagtcagtgcacagagagggctggggacagggtctggcacgtcacaacactcagcacagtcagcgttacaggcagggtctggcagggtacagaattcgcttcagatgaacaaggaggagaggcagaggtgcgaactgggaaaagagcgcaattcaaggctactgtggttcccagaggctggcgagtgagaagcttgactagcctggacaggaagcgggaggggaagaagatgtgttatgagatcccagggaaagctgaggctgtggagagaagcagggaggcagcagagaggaagcacccgactcccattctccctccagcctccgacctcttgcaggagcctccctcccgctggctggatccagtgagaagccagggagtggaaaagaagtggccctcaggctcagcttctcaagaggcaaggcaaggcaaaggaagaaagagaatgaatctgggtgggtgggaggcaggcaaatggagaagaaccagccgagttagctattactaatcattccgtagctgggaagtcaccaaagaaagtccctattgccctagagtgggtgaacgctacacaacatccgctgtagaatcagaaagagaattgcccctcaagttcccacatgctggaagaaatgtgcctccaccacagacctttagcaccaaactgagatggttcaacactgctatgggcaaaagtccaattttttaagatgtcctagcctccttgagaatctcagggctgagggcaacgtgcctcatccctgtggactagttcgcgctgctctctgagccttttctcaccagctggcctctgtctcttttccaccccctgcccatgcctgtcagaactcagacctcctagctcacttcctttgctaattgaaacacattcctgagccccatttgtaacatgctttggaatttcttcctccaccacttccccacccccaaacgccacctctctcttctcactcatgaatgttgaccttttgtctaataaaagcttcattcttccaacctcccactattgacttaagtagccattcttggctgtgtttacatttgctctccaaaaccatagtctcactacctatcaagtactcagtggtgtaagtagaggcagaaacccttttcttccagcagcttccattttaagtgtaaggacaagagacattgctcagagtggctggtggctttcccagtggatgtctttgcagcgtgatagttccgccccatgctttgccactgcaccatattacaaatgaaaattagtcacttccagatgcaccccccgggcatcagagccctcttgtactgtgctggtacacttgcttcgctgccttggaaactctgcagtgactctattttcatttccatcactagtttgtttgtttgtttgtttgtttgtttccagatcctgtaaccaaagagctattcctttgccaggatctaattgaactattcatccttgttcctccattatgttccttccaaattcctttgaatccctctttcccatcacatatgcattatgctataataatggccactatttggctctgttttcccttggaagcctggcacatgttactactgtgctctcctgagtaaagagagaaggtggaaccaatcctgttcccctctggtactcagatgcccttctgcaaaagcatcagaatcagggaaccaggacctccagaaagagctgggtttgaagttaaaaaaaatcctaatgaggtttgacttggcagaattttaagcactgatttgggttcaggtgggccaaaagcgtgagtagcagcaacagcagcaccctctgtgtacccactccctgcaaacccctgttctaggccctaggaattccatcaatccctaccctcaaggaacttacattttagataaggagagaagactcagcatgtgtgcgcgtgcgcacacacacgtgcacacacacatgcacgcacacacacacgtgcacaggtgcacacacacgcatgcacacatacatgcacacacacacagagccaataatgcaggctagcatagaatgaatgccaattaagtagtagctaaataataataattaacttgcatttaaaaatctgtaacacaggcatttctcttaatcaagactcattttctcccaggtaatttccattttaattggtattggtggaggttttaattagatttcttaatctatctctgtttctgtttgcacaactgaaagatgtctcccacttccaaatctagcgtattgtttgaaattttgaatttatgacatctccacaaatttactatagattgatccatcagtatctaatgatgtcttgagatgatttcttatgattaaaacactttaaagtagtgattatctaaagtagaatctaacttcccgtttgaggaggttgaaacatgtgcttcctatcttcggttctcattttttttaatgtgggtgctgctttagcaaagccaataactacaagaacatcctcccccagtttgagtagatgtgtcaccagaaaagcaaaagtccaatgctgagtgatttgagtggcttggaagaatttcccagcttgcagcttatactgaacgagcattaatacaagtaaaccattaactcatcagtcacacctgctctgtttgctctgtgcttgtttctatcctagcacccttgacaaagtgctgagcttgctgcctgtgggcatgtcggcctccttgctagaccattcactagctgagaacatgcaggaggtcttttaaaaaaaattttgtatatatatatatgtgtgtgtgtgtgtgtgtgtatgtatgtattttaattgacaaataagaaatgcgtatattttatgatgtacagcatgatcttttgaatgtttgtgcaatggctaaatcaagctaattaacatatgcattagctgacatatatcatttttttagggtaaaaatatttaaaatccactctcttagcaattttcgagtatgcaatactttactattaactatagtcaccatgacacacaatagattctctgaacttactcctcctaactgaaattttgtatccttttactaacatttcctcaatccctgtacctcctctccccaaccttagcctctcataaccacctttctactctctacttctatgagttccacttttttacagcctgcaagtaagtgagatcgtgttgtatttgtctttctgtgtctggtttattcccctgagcaaaatgtcctccaggttcacccatgttgtcacaaatgccaagatggccttttttgaggatatgtagtattctactatctatatgtcctgcgttttctttattcatctacatttattcatttatccattggacacttaggttgattccataacttggctcttgtcaatgctgctacaatgaatatgggggtgcagagagctctttgacacactgatttcatttctttagatttgtacctagaagtgtgtatatatctagaccagaatggaattgctgggtcatatggtagtcctatttttaattttttgaggaatttccctactgtttttcataaggactgtactagtgtacattttccccagccgtgtgtaagggttcttttattcacatcttcaccaacacacatcattggttttttcatgctttattttttggtaatagcaattctaacaggtctgaggtcatatattattgtgatgcagtaggtattattcagcttggtacagtgagtacagcagagagtacagttcccaacagagagtacagtgctctgtgcccagcaggcccagaagtggattaacgagttgattgaataactgattagtgggaaataaggaaagcattaatactcccagagagcaaggatagacctaggggtgcttgtgagaaaccaaggttgatctacagcattcacagcctggtgaaaggggcccagagtgtggcaccagctgtagccctgtctgcactgagggccaggtgagtgagatgtgactgggtaccccttccaggtccagggaagaatctgaagagtggggcccacatcacccttcagaacataagacatggacactccctgatcacagggacagcccaggtcatttagccctatcccatacccctttataacaaaatactctattattacttccgtaaaacttggaaattgagatatgtgcaaatgagggtatgttccaaaaagctcctaacaaatactaactccaattctcatctggttcttgggcttgacatagagagggagagagagtggaaaaaggatttggtctcaaaacaacttttggattttgcctggaaacagtatctcgtagcatgttcattgcagcctttggctgaattctttcattagaaagaggaaaagcacatttggatgttgacgtgacattcaggtaggcaacatttctttgctcgacttgggaaaatgctaatgaagaagaaaccaatcctataaaaagaggtcagagtacgtcaaagtacctgtccacccccatagtcgttttccttaatcttgacatctgaatcacttgctgtcgggtgaacacaggaattttccagggaacaatctcatattgagtgaggctctactcacggttgccctacatgtcatgggtgtccatttcggccttccattgtatgaacaatgcccagggtaattcggatcttgataacattgactcacaacctcaaataaatgaagtcatatcaagccactggcaagacggaatctgccggccggaaagggagtagaaggctagaccacaggcggggactgtgtggagggcaacacaggtgaacgcacacagataggcgcagtccccggccgttcgcacctcagcatcggtggcacttgtcatgattcaggttgcccttgctttcagcaaattcaacccttttgaatgcttgtttttatagaaactaaattagagagggattattcatttacaaacaaattgttcattttaaccagagtcttaagtaactgatacctctgtgctagttataatttttttaatctcaacttggatacacattttcaagaatatatctattaggtaaagtacactcacataaggaaaagtagatggttaattgcctggctatttaattcccaatatcataatcttggacactcctttcaataaaccttcacctagccaattcccaagaaatcacttcctcaagtgagttaaactgggcaacggttaagcaataggagtgtctttttttcagatgccagcacagagccacttgtccctgttaatcacgaagactggaaaacaagcagagctatgtgacggatatattcaccagaccctatctctgtgggaggcggtgttttggcacagacaggctgatgatttcagggtcaagagggaagtgattaatcaaactgggaagaagacagaggaaaatccagcaaacagctatgaagaacatataaaaacaacaaccacccaatatctgtatgggtaaacaacgctccgtttgcacactggagaatgcaatgaagtgtgaccaggatgaagccgaaaacaaagaaatgatgcttccaactgcggctcccaggcatggcttttctttctgcaccttggagactcctctgcagctccattctcatcccacacctccagggtctgtgcacaccaaggcaggtggaaggggaggcaaggaactgagcaatctgaggttaggtgggggaaaggaaacacaccttctactattagtgcaaaacgagaattttcccagttaccgatcttgaaataaattcatcagatgatagcgttctccttcttcttttgccccttcttttgctcacacatcctaccttaatttgaaacattgcaatgaaagagaaatgtaaaaagcaaatctagaccaagctgcgttcaaatgtgcatgtagccagaaaccttaaaagtagaaggtgatcattttgttttgtttgaattttttaaaaagtataacatctgtcaggtactgactgtgaattctacatcttgtactgagtcgcccctctcttctatggaacattagaaagcaagaggaactaccatttgtgatagacgaagacagatttgcaggtggagggagtgacaagacctgatttgttttctgcacataatgagtaatccttcagacacagagatcctcatctgcagcacgagagaaaaggtaaaccaagtccccaggctcagcacccatggaaaggagcagagggagagagtcctctgagttggcacacgagttctgcaccgggctgtcctttgatatgacagctctcttctgtggtggggccacctaagaagtgcttgggaaaatatcttgataggagaactagacggaaacatgctttcagagaagggatgtgtcttgttgcttattgtggtttttcaatacatgagcctagtttacatagcaggggcccaaatgcagctctgtataatattgtcatacttcagctatgtgcgtgtttatcatttctttaccaacaacagctggagaaaatggctgagattggagaggagggagcagaggtagagaggaagtcaaaaccttggaatggatgacataccacttccccaatgaatgaagctgcagattcagccacatgtagttgatgtcgccatgtcaagactgcatttttccttccaaacacagaagtatggggtaaacttaatgcaggactatgaagatgaagccattgaggcccaagactttatcttgatttcttcaattccttggatatgtttactccctccccacactgggcccttgtagctgcttagactgaacctactggcccttctcttgctggaaagttgccctccaagaagtgcaagagctcagattgcacctgctaactgttaagaccagacttggccaggctaccagatctttctgcaacaaggccagcttcacactgcctgagcagacctttctgttctgccaaaggcagctgaagcagggaaaatggatcagcaaagggatctgggccaggcgcagtggctcatttctctaacctcagcactttgagaggccaaggtgggaggatcacttgaggccaggagttcaagaccagcctgggcaacaaaatgagaccgcatttctacaaaacaataaggttaaaaaaaattaatcaggtgtggtggcaactgtggtgccaactcttgagacactaaatcgggaggatcacttgagcccaggagatggaggctggagtgagctatgatagcaccactgtattccagcctggaagatagagtgagaccctgtctcaaaaaaagtaaataaaggaatctgaacttgaagaatgggccaaaaaagagtgatacttgactgcggttcctctttgcctgtgccgtcacctgggattggaattctgcatttcccacccccaattcccttctccagtcatctaactcctctgcttcctccaatactcagctaaggcattacctcctcctagaagccttccctgaaatcctcaagcagttctctttctttgacttccctctttggagcctcaactgtctctttgggtttgtctgtcctgctagactgaacgtaaataactaatgagggtatctgcatggaaagaaacagacccttctaagtgctgtgttaagtaacttcactgaaccagatgagagcattagagcagctgctttctagggttttgccagctcctgtatgcggacgtgaggctgctggggatgttgctattagtgataaagttaagggtccaagaggttctttgcttcacgactacgtcattggaggctgataagccatggccaagtgtgttcaaggtctccagctgtcataaaagtgtctgcttgtttattttaggtagataagtgttgctattattcctgggatggtaggaaaagccgggggcaagaaatcactctgtgaagatatattgagatccctggaacatttaaaaaaaaaaaaaaaaaaggttgaggggagggagagaaaccacatagcctgcatttggtgatactgtaattctagctccctttaattacagttaatcactacttactattttgtaatctaaggtaatgaacactgtagctttgcttgctaattgaagttgacagaatgcgagaaagcgccctatggcaaacccctttcatcaggagagtgttttatctttgtttatcaacaagagagtggattttttgtttgtttattttaaggagtcacactctgttgcccagactggagtgcagtgatgcgatctcggctcactgcaacctctgcctcctgggttcaagcaattcttctgcctcagcctccagaatagctgagagattataggcacgcaccaccacacccggctaatttttgtacttttagcagagtcagggtttctccatgttggccaggctgtgctacaactcctgacctcaggtgatccacccgccttggccttccaaagtgctaggattcaggcatgagccaccgcatccgcccaagagtgtttgtttgtttgtttgtttgtttgttttttaatggtttactctaggtttaattcagaggaagtaagagattattctgcagaacacccttgggtatttaacctggcacaactcaattaataagtgatccattttactattacaaactaaatttatctttggaaataatgacagaccgaaacaacccagaaactacatatatctattttgtatgaattaaaaaggaaagaaatcaccagaaagaaaaaaaaagagttatttaattgagtgcatggccccataagggcaattggaaacctgtatttaagtttgtatgcaattttgtgtatgcattttctggaaagaaaagtcatactttattcagatacccaaggaggtctgtgatatcccctctgccaatctcaacttagatattagtgtttagtgaatgaaatagtccataaactagattgactataaatctggtaataatgttgtaaaataaaggttttccacgctctacaaaagaaaaccaaaacaaatagcatagctatagttctctcaatcctcatccccaaattctctgcagctccctaaatagcctaagacaccagagaaagtcagaaatttattgtcacagcagctagaatgacctgtcacctaaccagacaaagtccagagcagaactgaaggagcagaagttcttagaaggtttaccttgcactgccatcactcacttccagcccaaaacctttaacaggtactttgtttgtagtgaatggcttaacttcactgaattgcagttaacctcaaacgtttgggttttttgttaaatgttttaagacgagaggaaaatagcacttttacgtaataagaaatttcagatacttgacctctctaagttcacaaattcccattttaattttcatttttactgaaatttcttacagagaagtaaaatccctcttcctaatttcaagctgatttaaatacctctgaaaccaggttaaaacctaggatatgatatagttctcccatttgggccagttgaaataaatataaatttagccctttttccccaaatattggttgtgtgtgtgtgtgtgtgtgtgtgtctgtgtgtgtgtgtgtgtgtgatggagcttcgttcttgttgcccaggctggagtgcagtggcccaatctcggctcactgcaacctccgcctcctgggttcaagtgattctcctgcctcagcctcccaagtagctgggattacaggtgcctgccatcacgccaggctaatttttgtatttttagtagagacagggtttcaccatggtggccaggctggtctcaaactcctgacctcaggtgatctgcccgcttcggcctcccaaagtgctgggattacaggcacgagccactgcacccagctggtaaattctttattatcattaaaagccaacaattttgactcagtcttattctatatatctgttctttcattcttcttgtatttcaatgaatgcttctataagtatactgacttcagccaggagtggtggctcccgcctgtaatcccagcactttgggaggccaagacaagatcacttgagcccaggaatttgagaccagcctaggtaacatggcgaaaccccgactctattaaaaagcaatacaaaagttatgcagtctcggtggcgcatgcctgtagtcccagctactagggagagtaaggagggagaatcgcctgagcctgggcagttgaggctgcagcaagccgagatcgcgccactgcactccagcctgggcgacagagtggggccctgtctgaaacaaaataaaagtatattatagatgccgtttttaccttgactcactgacatccagtttcagagccagcaaagctgaggcccaactctgctgtggtctaaatctgttgtagggtgaagcctgagggtcagtttggtgcccccttttacttttctctacttaaattcaatctattcttacggcataatacttagaaataaactttctattataagccttagatataatattcaaaggtaattagtttattggagaactggagaaaggccattttttaaacagtttattggagaactggagaaaggccatttttctcccccagacaagacccgtatctccacaggcattgacaatagcttcctaatttttttttcttactagctgattagtgctatgtctaatgaattgcccatacccttgttccctaggattgttgttgaaaatatatgcagcaatcagcatatgtatttagttgaaaaccaatgtctccaacagccttaaaagcccagctttctcttctaatatcaaaatattctattttactaataaaccatttcttaagccatgtaaaataaagtctaagtacaaatcttaaggcattatgaaaagatacttgggaactacatccctgcagccaaggaagtggtggtttttttttttttttcaaagacatctgaccttatcaaagcttcagaccaagaattcagttcatcagttcatctgctatctaataagcacaagagccatttgtccttcacatgataaggtcatggtacattacaagccacttgcaggttttgttttcttgaaaggacacatttgcagggagcactgccagagagaaacgactggctgaaatcaaatagtcgacatcaagggatacctatttcagaaaaagcgattgaaggcagcagccagaaatgctgagattttcatatgagggatgtttgtaatcataagccagcaggtaattccagcatgtgcagattctctttgacatggtgctataaaaactcttgggctaaaagcaaaatctctacctgacagaagcaatcctcactcccatctattgatactttgctcctgattcacagcaataaatggtccttaaagtgaatgagaggagggtaattcattccctacacacacaccaagatgagcccagtcttcttgcattaacttcttgctgaatgcaattgatccggaccattggctggttttccagagacttcaaatagcctgacttggcttgttcagccagtagggttgagatcagagacccctacatcaaggtcactgaaggtaccattggaaactacaactatcctggcttagactcagaccactggttacaacttcccattcctaggtgacaaatataaacccatacagtagttgaagactaaggaccaataaaaagcagaaaagttttttttaataataataaatacacctggctaaaaattccagtggccagaaggaataaatttagcatcttagctttcgttgctaaaataggatctgcttccaggctcactcttgtaagggaattgtgtatataatggcttctttttccagagtttggggcagggtttctcagcatcagcactattaacacctggggacaaataattatttattgtggagttgccctgtgcattgtaatacgtttggcagcatccccagatgctactagatgccaatagcactatgtctccccctcccccgaatccacccaagtttgacaatccaaaatgtctccagatatggaaaaatgttccctggagtaagtgaggggggaggggtgcaaaatcacccacaggtgagaaccactgctttagggcattatttgtttattaattgtataaatgtatggggtccaagagcaaatttgttacatgcatagattgcactgaggacaagtcagggctttagcctatccatcacttgaataatatacattgtacccattaagtaatttctcttggtcccctcccttcccaccccctctcccttccaagtctccattgtcaatcattctactctctatgtccatgcatacatggtttttttagctcccacttatgagtgagaacatgtggtatttgactctctgtgtctggcttgtttcacttaagataatggcctcagttccatccattttgctgcaaaagacatgattttattcttttttatggctgaagagtattccattgcatttatataccacattttctttacctaatcctccattgatagacacttaagtttatcacatatccttcttattgtgaatagtgctgtgataaacatgtaaatacagttatctttagggcattatttaataaacacatttcatctgtaccaatgacacctctcccctgattccttgctctccaaaagtacttccttccaaaagaattgcctccaaaagaattgccttttcttctgtaaaaaggtgaccagtcttagtttgaacaatttttctgccaatattactagtcataaggacaatacattaattgatccaattgttctttcaggatagagaaaagtgcttccatccatacatgctggaaaactttaagcatagatttattgaaagaacaaaataagttaaagtccagaaaatactgtagcaatattcaagtcatcgagaaaaccagaaaaaaatgaaaatttaaaactcatctgaaatcttcacctgaaaccacacagaaataaccattgctgatatttggtgagcgtttttccacttatctctccttgtccatataacagatataaagcctggtagacacaaagaagttcttctgtgaaataacccaggattcattatcccgtagtttcatattgacatttagaataatgagaggatactcatgcaattttaaacttgaagtatttgatttaattttccttgaattaacagattaaaaaatctgaaaactgaagaatctgatgaactttggacatttcttcactgctagagatattagttcttaaaaggtccctataatttaagaaaatgtgcaaaacctatagagctggctgggagcagtggcttacgcctgtaaccccagcactttgggaaggcaaggctagaggatcacttgagcctaggagtttgagaccagcctgggcaatacagtaagacccccatctcttaaaaaagaaacaaacaaacaaacagaaaaacttaaaagagctgaagttattgttatttttaaactgtgcttttcactgttgactccttgacaggaaagatgaggaagtcagttaacatatttttttcaacctcttttcttctcttaccagtatgattagttatattaaaatacttacttgtgacctttaaattctttttttcagccttactccccaaattgtttggtctcagttctgttttaaacgaatccacagcctctcagtttctgagttctttattttgattcattttttatttggctggattggttttcaagacacactttttatttgcaaaaagaacccatggatgctgtgttccttgaggtttgattcgttcctaaatatctgcctcctgctttcttactcaaggaacaactgggctagagattgaattcttggggaccccttctcttgctcaatctttatagacaccactccactatccctggtggttccccaagcagtgacctatgagcgcgggatgctggggcatgtggttcctcacagagccctgattcttcctctgggggcgccatctcactcagactgcagcctgggcatgctcctgtcacctcgaggaggtgatgggagtccagcttttgttgggccccctctcgccactgcccagcccctgggctcaatctgcatttccagtggggaggtagccggttgcaaagccccttctccatctacaagaatggcagcagaggctgaccctccttccttgccccagacctgccttccacatccggggaactctgatggttgccgtttcccttcttccatgaaggaggctctaccactgtccctattttaaagatgaggacactgagacatagaggaattaaggaatatgcccgtgttcagatagctaataagctcaagtctagacttgaacctaagaagactaagagatgctctgatatctacatggattattgtgagagaaatggtctctatcttgactaaggtttgcaaggatgtaggcttacagaagcatacattaaaatttgggttaggactaagaacaaacttcctttcttgagagcaacagggctcagtctaccaaaagaggttataagtaccctgtgtaaatgtcccagacaaaaatggcacctatgcacatgtgacctcatggcacctatccacgtgtgacacccttccagccaaccaaacaatgacctcatgatgtcaaaggccaggaatgtgaattgggaaggcgaaaataacagcttgctttcactttccaagcacaagccagccagcccaagacgtttctctctgccatgtgctccctgcagttcaagagggccatccatgcgccagacagattaaacactaaaggaattctagacgatcactcctgggagggtttttttccactactttctaatccaatgaagcctgggctggcaaaggcagttgaattgagagtggctaaatatgcagagtccttggaggttagaatacagtctgtctaccaagagaaggcattttgccttcagtctgtctggatttctaatatctactgcagactattaatcatgaaggccagactcttgaacctctttgagttgtttcacatttaatcagaatcctcccccttacacacacaaaaaagctacaaaatcctgcctggttatctgatttaaatgaattttaacattcaaacaatggtttatctggaacatatcccctgcatcgaacgtatatttaatagctttgaaataaagtcaaacaaaaccaaaaatgcaattactatgcatgtcatgaaatcatcagaattaaaaattagccaaggtcatattgttcatttcctttagatttcctgttaaaacactggttaccccagattttcaccatcaggaaatgggaaaaaaattgaataactcattttctataagacaatttccatcaaattgtattgggtgagaatttggcccagaatttacactttaatgtatgattttgcattttaaatgtcatctgattttatttgtgattttcacattaagcagatgtcataatttacctgaattccatgaatagctctgttcatccacatacccattttccatgtatttaactgagctttaacttattttattcttttaatgaatgtatactgtgtttaactcagacttttctattttggctttctgagatgtgaggatggaaatgcttttctctaagaaccctattctgggatagggaagccaaattggaaatgtggagccacactgatatacagcttccagaatagtcatatttccccgttccaaccacacataaattcctaaacttgcttcacacagagaatctgggaagtgaacaaagcctatgttttccctcttctactctccaaagtgtgggttgtgtgttggcaccttaggacaggaagggaatttagaccgcatgctcttgattgcacagtctgggagggtatggggtggtaaggagagcaaatgttcagctaggccagtagaatgttgccaccaatctgtcactaacgcagctgccaaaattttcacattgccgagaaagtaagtctttaaagcaaaggctctttgtgccttctttttggaagtttcttgctaatttcctcctctgcttccctggcgatctgagagctagagcttttgtaccatcaactctcagcaaatagaagctgggccagcaggctgcaaagcaaagggtctcattaaaccacagccctttgcaagtcaggtccgggcacatgtttggcatcaattttctacactggggcatattccaaaatacataaggctctcaatttttctgtttctttaaaagaaattctccaaagtcagataaagttaaggaatttgaaaggtgtttaaggtggaggtttccactaggaataattattccaaggagctgagttccaaatttgacatcctcagggtaagacgagaatctaacacatcatagcaataatgactgtctggtggtctgcaagcttcaccgctgggccgaagtgctctttcactgcacacagacttttagttgtttgggaattttagcagagcaaaaacaaggggaagagagaaaataaggtaaaaacaaggttcaagttgtcacaacagccatatattctggattttccatgatccgcatccatataatctctctgattgttcccataaaggtagtcatactcactagaattagaaaagttaaaagcataaacttggtatagtttataacaggtaagacacaactctattgttctttgagagcaatgattgtgccatatttatcttcgtgtttctaatgacttgcacatgacaaagagctcaatttatgttgaatgaatgaattgaaacataaatatgctaatgaaaatcaacagaaatatgggaggatagttattgtattaagcattattgttttacctctatgactgattttaacatacactaagaatgcaaagacataggttctaattgtggttctgcagaataccagggagaaagttacttatcctccaaagactcagttttgccatatagaaaatggagttaataacttccctgacttagcttatgttatggagttgttatgtaaaccacctgagacactgaatgtgaaaacgcttgataatcggaaaagatgcgtaccaatgtacattttcatcattatcgttattattaccaatcatcacggctctggtactcagggatgctcagtcctctcaaatcttgcaaaaagaaaactgctgggagccacaaaacatcttgtgccacatgtgagcttactttccaaaatggcttcgtttttatagtcattaaaacacaactcaaaacctgtcattctttgtccctagtgagccaaccaggacatgatcaaatgtggagaattatggagcatgaatcccaggaagaattcttttacaacacacacacacacacacacacacacaggctcacacacgtgctcacacatacatgctcacacacaatatcacacatcctttcagcactgagaatggttaatagtaggtgtgaagactcacccacagaaaactgagaaatagtgtgtgactatttctgtgactaacacactttttatatcatcttcctcttcaataccatccttaccccagatgtccaggatcttcaagttacttaggacccagcatacatgttgctaaacttctaccacttctgtaagtcatttaattcaagcccattcactcaatgcccagaactggagtgacaacgggtgggatgagaagtcatcaccttcttcatcaccatctttgtgatcttcatcatttcatgaacacttactctgtagctttacattcatcatctctgtctattgtgacaacatcttatgaaatatatactattaaccccattttgcagatgggcaagtcgagactcagaatgattaattttcccaaaggcacacaccctaatgtgacagactctggatttgaaaccaattccacctgattctaaagaccatgtttttaaccacctcactgtaatgctgagtgttcttaatcacaggaaatctttggtgtgctaggacagaggtttgcaaggccttccgggagcttctcaatgtacattctctactctgtttatttttgtctgtataccaacatatatttttgaacccttttttatatatggccaatgatgctaggcctggaagaatattaaaaacaattatttctataatgtaagtgactaccagttatttaatttccgttttttgggttatttgtattttaaaagaaaggctatatgctataagccaagtgaatgaatccctaatggtacgatttctgacaatgagactagcagatggagaaggatctttgtttctgtggtggggtgtgtgtctgtgtgtgtgtgtgtgtgtgtgtgttaagggcgcagtcaagcactgcactactcgtaccataccatgcagacaaccatctaatctgatctctcaaaaggtttgacagtattggcatcattctcaatatcctcatcctacacgttaaaattgctaattaatattagtatttggttgctttatcttaaaacaatacctacctctgttaataggaaaattagaaattatatctattgttcctaaagatacaatttgtttctctaactccaagggaagtgaatgaatatgtttcagactatacttgtctgtgtattatttgtttttgtaaggtggttttttcttttgcttcaaattgagagcatacaaacaaaattccactgtataagcagtcaattttggtaataataacacatgcctagagcactcagattaaattattacacatactaataaaattattcacagtagtactccttggtaatgttggtattagggaacaggatagaacccatcttcaaagtcaaccctattacttcaagcctttgcagggtcctgctgtttccaaggatacaatccaatgcttaatttacaggaatccgaaatcatttgctgtgttaaaaacttgagattagcccttgctgcccccttccaggttggcctttggaagcgaaaggtctttaagcttaagtaaactggagaatatttctgagtaagcaggctccaggtggagggtacactccaagataccttcacttgccaaaacaacactccctgcaaggttatcagcgaaaaggcagtagaaagagccctcctgctgccagaaggtcttgttttgcaaggcttctcagcctgcctgcagccattgggtgaggagaggaaaggacacctcacctggcagagcagcacaaaggtcaggcatgtttccctcctgacctggaagctgggtcctgctccttcacatgaactgtccagggcttggtcatatacccaggtccccctcagtcctgcccagagtgactccactggtctccccagaaaacaccaacagcagagagaaatgaagtgtgtctgttttctggtttcatattgcagctcctcttgctcttcttaggacagaaataacatctgcaatgccagagacctgtgaagtaataaacaacctttcccccagctcttgacaagcattaccttgctttgaggtgcaatcagttctgacaagtttatggctttgtgtccttcaacccaatggacattaccctctgggggagtttaatgacccctctcagcttcacactcacttgaaggaaagagctagaagtcagtaatgatgtgttatgacttgcatggcttcaggtagttcagaacctgcaacctgtagttcagattacaggagaagaactcagacgataaattggcttccaaagaaggccaaatagaaaaaaaaaaggcttcttcagaccaatagctgagtgacctgaaatttaaatgcaaaaaatgcattaaaacccacaaaaccacttcctttaaaattcttgataccaaacatgttacagcattaagtgaaccttaatctaagcaaaattcagagaagagcattcacacctttgatagaagagccagccagccagggtgctggggctcagctcttgagaaaaatgttgatgtaaaagccttggtggcctggttcagcccctgagcctccctggtaagcacatggcaggctcagaacatccataactgaatgctctgagccctgtaaaaatgcagttacaatgggaaatcaactcttaagtatgctatgggatgctgtgataaaatttgagtttctctaccttctgtttgcactttggttcatttagaaaagagtccataattgtgtgcttcaagagtgcaattccatggctgtaacagaatagagtcctctttcttctggcctttgcctctttggggatattccaactctgtggaaggtgatcatttgcgattatgatcagttatttatatttgactgtaaatgaaaacttcagagtcagtttcaaaaaacaagagatggacataaggacatgtgcttatgagtaggggacaaataactagagacaagaaataaaaagagacaagatatgagacaagataacctttgatgccgtactgcacacacacacacacacacacacacacacacacacagaatctacattgtttctgtcactctgcggggctgctggaaggcagaaatgagaagcctcggccctcatcttgtttagagttttgcctgggccaggctcttctgctgcattggaattcaactttgcaaatctcagtgtttccaggttgacctcgggagaaaggggaccccagaaaaaattagaacaaaaaggaacaagtaaggagcagtgtctagaatgggaacactgacaaaaagaagcaaagtcagaacacatggtctatttggggggctgttagacagacctggactaggctaattccagggttgcctccatgtactcacgggccctcagaaggcactcttccctctcttccctctccagatccttgtcttcccattagatcaatgaggatggaggactacaccagggacacccaactaggggcaattttgcctcccaggggttatttgccaatgtgtagagatatttttggctgtcaaaactgaaggtggtgggtgctactggcatctaatgtgtgcaggccacggctgttgtgaaacatcctgaaatgcacaggatactctccaacagcaaagaattatccagcccagaatgtcaatcatgccaaagttgaggaaccctggctccaccatttgaaggatctgatgcaggtgatcgatggtcccccagaagagtattggtctgggaccaagagtccaatggccatactttacatttttccagggcctgagtgccaaagtgacctacaatccttataaatgttaccctgttttctggcattcatgagcattggaggttgaaaaatgattctctaagagaggcttggcctgcagtcaagttgaaaggtgagtgagagtgggtcagcctacaaatatgccatccacatggggctgctctgagtttgcacaaaggacagaatgtcacctaaatcaattcacatctactgatacaaacagcctactgcaaaggctctattgaatccagggtttgtaataagtatatcagaattcgaccgggcagggtggctcacacctgtaatcccagcactttgggaggtcaaagcaggagaatcgcttgaggccaggagtttgagaccaacctgggcaacatggcgaaaccctgtctctacaaaaacaaatataagaattagccaagcacggtggcacgcacctgtagtcccagctactcaggaggctgaggtgggaggatcacttgagccggaaggtccacactctagcctgggtgacagagtgagacctgtctcaaaaaaataaataaataaaaattaaatactaataaattctgtgaaagagataccacctacgcttcttggtaattgtttggtgaatacagccaacaagagcagaggcgcctctgtggtgttagagtgggctggagtgtttccacaagtttgccaaatattacagaaatatcctgccctcctgctgcacatacacctggcaggagaggaaccaatgggagaaggtctcgccgggaagattccagccagatgggggccctgccttggcaggtgcttggcatgggaaaggtggttctgaagcaccaaggcaggtggcttgtgaatctgcctacattcccctaactctctgaggcttgaaatatcccctcagggctccagagagttgctgttgttcagttatgatgccccatgccctaccagcctctagcaaaaaccatgcatagtgacttgggaaattcttttcactttgctgggccaagacccagatgctctgtgggcatgctgatgggggcctagtggtgttactcctgtattcctccgtagcaaaaaaatagtattaggagagatacagggagatcaggagaatacagcgtcccttcaacttctgcccaaatttctgcagtagcctcctaaccagtttccttatagctctctggttcccttccaatctctcccctcctatgcagccagagggattccttcacactgaaagctaatttgttacactcctgcttaaatacataaagtgattccatagtgctcagggattaagggaaaaatccttaacagatctcaaaaggcctcgcatggctccagcggctatgtggatccatgcaaggccttttggggtctgttaaggaattttctgcctctcaagcctaacatcccaccatgcgccaagcttgctttcatttccttggatgccccaagcttccttctgccacggggccttcacacatgctgtttcagctaccttagatcttctcctcccaggcccccaccacctcttgtcaccagactaattctattctcctcagtccttacctctctcacaaggccctggccaacctccctcaccagatcatgcctcatacaccacctatcatggcaacgcgaatttcttttacgtagttctttacaaaattgcagttttacattaatttatgcattggaattcaataaatatctactgaataaacaaatgaatgaatgaatcacccccttctggggtggaacagagaatccctccgaccacacattcttacttccatctctttggtggttctgtcctctcagcatggttagctgttgatttgtatctctgcccataagattcttcctttctggccaatcccattcatccactcatttctccatgaacccttctctcatctcctactcctcacagaacttatttgtctcactctatgaatcctgttgcattttctctatttttccacactttgccttgaatagcatcagctgtagacatgctagtcttccctttggggctctgaactccttgagaaaagagactcaacccaacatattgttctgcaaagcagcatgtacttaataaatatttgttgaactgaaataccacttgtgaaagctcaggtgataggaataatcgcaggtggcaactttaagatcacaccaaaacaccaatgccactttcattccacccactccgacttctaagagaggatgtagaatgtagctgggaagagggtctctctccatggggagagagcagctagaaatgctgtgagagttttctaattagcagtaagttaccaccacctttggggcccagtgggatttctcctcttgctccagatggctgtcatggcagtaactatttctctgcatgtaagatggtcagatttagcaaataaaaatacagggttttaggtacagtttacactgtttgggtgacaggtgcagcaaaatctcagaaatcaccaccaaagaatgtatttatgtaaccaaaaactacctgttccccaaaaattattgaaataaaagtttaaaaatagaaatatttaatttttaaaaatacagggctcccagttatatttaagcttcagcttcagaaaaacagccaggcttggtggctcacacctgtaatcccgggaggctgaggtgggcagatcatgaggttgggagttcaagaccagcctggccaatatggcgaaaccccatctctactaaaaatacaaaaattagccgggcatggtggcacacacctgtaatcccagctactcaggagtttgaggcagaagaattgcttgagcccaggaggcagagattgcagtgagctgagatcatgccactgtactccagcctgggtgacagagcgagactccatctcagaaaaaaaaaagaaagaaaagtttcagataaacaacaaatacatttttgcacaaatataacccaaatatttcatggcatgtacttctactaaaaagttgctcatagtttatctgaaattcaaatgtaattggccatcgtgtattttatctgtaatttcatgcttttagcataagcttgaagatgccataatattaattggtggctccaaatgaaaattcatttaaaaaaaaataccagtacaaaatgaccagacgtgtgcaactccttctcactgtatccttgtttgtctgcctgtctataatatcactgcctgagtcattattgtcttagagggtgggtgctggatctattttattctttttatagaatcctgatgttgcattcacatatgcacttaaagtatatttgtcttgctgcctgtgatgtccagaagaaggaatggactttggtaatagtttttataatgttcccacagaagatttaaattccaaaatgataccatagtttcccacacttaaaattttacatttcaaaaaacaccataaaatttaaacgtggaaactagttttgaacatttgaaataagttaacataaaagttcaggttttcattcccatgcggtgtgagtttgtcctggggcacggggttgtgcagggaaagaaaaggcaaatattctccagcaattttcctggagatgtatgacttttcaagcaagaggaaataaaagtgaagaatgagacatatccccgatcaaattttaccttcagaaatattaactgctacagtacacttactccccgcaacctcaatggaggaggccagattcctacaagcggggaggccttgtctgatttcattatatcttttcctcctttgcaatcctgcaaagtgatactttctcttttttatcaacatgggttgtaagttcaacgactgcgcacattcatgaaagtgccaaagagatgggaacctgttaggactaaaatccaagcgttttcttttgaccgtaccctgatccttgtctagatgttcttaaaaaactatgacctgacttttttatgactcagatgtttgtaagacccctagatcattaagacatatttaaacattctcgtgcccctactcctctcccacaagataatgttttgttcttaggcaactgccaggaaagcattaaaaacatctagcacaagcccaattttcccaaaagaatgatttcttgtttgaagtttaggagaaaaaaaaaatacattcctatcacttccatttctgtgtctaatttttatttatttatttttagaatatgtaaagtatgtattttcttagaatagttaggccctggggcatacaaccaatttactcacaaacaaaccctatatttaagagacagagttgttttttttttctgggaaaatgaaactgcaggctaggaattcatttctgtcctctatttgtcattttcaactttgattaggataataatgctttgcttgtgcagaaggctctatataactaaatagtgtaagtgacatggacctaagatgtctatttcctaccagctcctttctgctctctacagggtttctttgaccatggaagggggtgcttccaggaggcatgggaggtagctgtgggctgtgttaatttgtttaaaggatggagagccatagagaattctattaacatagatcttgctgaagcattcaaaataagcagagataatacatgagttactgtgaaatcgggacgtgagagctggttccgatattgcaataggaaactactattcttttgcttgactggcatcctcttagaccctccaataactcttctcaatttttatgttcatctgtattctcagctcccagtgagccagaaagttcatgacatgctcaggctggtagaaaatgagaataccagtcagctctccagagggctctgctggcatagctaagagccccaggacagacatgaaatgaagatctggctgagagagcactacagcgcccagctagaagatattaacacaagctctgattcacatgggacagcaaaatataatctgtgtgtgacaggaatcgacacagccttcaaccctgaggtggagcgaaagcacccagatatgcttttgcattgatgggaagtgcaagcagaaggtgaggggagaattttgcccatcactcaccatccccccccacacacacatacatagagtcatgccaaagcatgaagcagcacagaatccccagcattcagccatccctggcactgagccacagagaaattagtcaaaggctctgagggcagctagagcacaaagggtcatttgtttttagaaacaccagaaaaaggacaatattctccagctaaaccttgccagctccttgttttgctttgttttcctcttgtagctctgattctaaatccctgaagtggttgaacactgtgtctgaggccagaagctttcgtgggtcactagaaaagagcctagtgagggggaggaactggactggaacgtggaaagctggaatcgggtctgacctgccctgccgccttggcaaatcactcctacaggtaatgagtgggcctcagctttctcacaaccaaaactgagatcctgatgtgagtcccgctcaccttagagaggagagagaaaaccatgaccgtgaccgaggaagatgcctcaggacataacttctgcacaggggaggttgtcaatttcctctgcagtatggatttatgctcctcacctaaccagcctggactccagtatccctatctgtttaatattaagctctctgaaatgtctccaccataggtatctcattagtagaggacaagagacaaaggtgatttaatcaaaacagccaccaccccgacagcaaaacacatttactgattcctagaaccactatctttcctgaaatgttagtatggggttgaccctattggttacatttgaattgacttttccatgttgagagaattaaggtcaagagaatgaactaacagccagccagtttttatacaacaacatttttgtattctttccattgtaggttatatttctttaaagctcaaattaaacagccacttatcctataccccatcatctctttaagtctccttacagcagaaaaattctggagacattttcaaaggtggaaaatccaggcccagtacctagagaaattaaaatatggaacattggctcaaagttcataattaaaggtagtaaggaatttgcaggtgtgtagttttatcccgaagtcagtaaaaagaatcattttaatgttgttaatcagtggttcagcctgggaccttgttaaattgatttgcaaatgggaactttgaaacatcctggagtggccaagtgtaaaggaatgagagacgggatgtggggctctgcgcctaagccacagtacatttccagctcctttatcccaaaggaacagtcattgtcaagctcaaaagccaggtctggactcagcttacaggtgtctcctggggacctggggaggagcgattcccactgggtgaatgtcagcagagaatggtatgccggcaaagggacaccagagaactctctggtcgtaggacgggcagcaagactgcttcggtagattcaggacatgattctgggcagttagcagcctctctcccctgctgtgtgttaagaacacttgaggatgttttcccttagcatttatgatgctgaggaaaagagattttggaaactaccttgacaaagaaattaatggagggtgacatggggattccagcaaggccaacatacaattgcctcattttcatggtatgtcaaattagatttaggttttggctactgtgcttgtcatgggggctctaactctcacccagggccagcatctcacaaaattttatgactttacactgactttgacctccaaggacaagggccagtggggagaaagaccagcagaggctcattcctcctctagtctcaacgtctctctccctccctctttctggaacttgtgctcctgaggtggatgtctgactgtgtctttggccacagccagccatttgcacatctgttcctgtggagtgacaggcagtgggggagctcaccgcccacttcaggacccagacagccatggtccaggcactgctgtgggctggagaaagctggaaaggacctgcctgtggcaggaatctctgggccccttgaccatgatctccacactcaccacgtgtgtaccaggagggcagatccagacacaggagccagaaggaagcccacgcgagccaacagaacataacctctgggcaggaagagggaaatgcactctattgcccagtaccctagcatgactacctaccatgagcagaggtctatccaaacaggcagaaaaaacctggcacatgtacatttatcaaacagttatggagcatctactgtacatatttacctagtaggtacttgtggccaacactagcagtcatcctctaatacccattctcctcttccttagtcatgaaatgaccacctagaatagagactacacctcccagcatcccttgcagctagctgtgaccatgtgaccaagatctggctaatgggatgagaatggaggttctaggagcacctttcagggaggaggcacttttttcacctaattcttctttcctgctggctggaagatgttatttagaagtgatgtctagaatttgagccaccttggaccttgtactgaggatttcaaagcacaagagaggagaaacctgggtctctacagactttatagagccctgaaccaacccaggaattctaacaaataagaagaaaattaacttctttttaaactcattcatctagggtttttctgttactcacagtcaaacttaaccctattggactcaatatatatttgttttatttaggccttcaactgattggatgaggcccaccaacattatgaagggcaatctgctttactcaaagtccattggtttaaatgtaagtctcctcccaaaaaaccctcgcagaaacatccaaaataatgtctgaccaaatacgtgggcattgcagcccagtcacgttgacatatgaaattacccatcatggggatgaaaactggtgagtcactggcatatgaatagctggcatgactgtggactctggggagagagaagagaaggagaaggcagggcctaaggaacatcactattcaatgatcagatggaggagagggcaggtagctggcaaaggagacagctgacacttcatcaagtcctcagataccagtactgtagggagagccgtgtgcaggtagcagagccatcccagggccaaggtggggcctcagtttcccatcgagcaagtttccagaaccaagtgagatcagggtagcactggtgtgctgggggcttagtgccaatcagtgcttgaccattctggatgggcctggccttggggacgtgtcaggccaaaggctccgatgccttctacaatgaagaatggagggccacagaagccaggaccctgagcagccagcagaacagccaagccccttccctgtccagctgttctccaagaccagaagatgtaatgcctattgccgttttctgtacaacatcaattttcttattaggatacttttggggaaccagtttgagaatatatagaactgcaattttgttcaaaggcagtaacaaggttataagcatgaggtttgaagccaggtgggccttggttagatccttgctgtgatcctgagcaaggcagtcactccctgagcatcaggttccatatgtaggattactaacccctccctgattcaccattacggagaagagatggcgcacttagctgtatctggcacatgacttctacatggtaaaggctttcctttctttctttcttttttttttccttctcaaatctattgtttttattttttttaagtaagcagtggtatatatgtcatctttttaaatgtttcttttgggaagatcttatagaaaaatggcaccctgaaactttcagctctatatcccaaaaattgtctttcaagagttaaaaaactctttaaaatgaagagctttttttaactctttatgagttttaaaaaaacccttaaaaatgaagataatatacctggcctaaatcaaaataatctgaaaaatagatgtgtcccagtggaaagcctacaaaggaataatctcccatcttcatgggaccttctttctcctttctttctaaaagccttctaaagcatcaccaacacaccccaaattttgcttttcttttctattttattaccattttttggctgttatcactccatgttcccttgcatgtgttaaatgtatacatgtgttcatgcgactgaagtcatcttttgaaatacatacaaaaatgtaaatagccaatctcgtgtttgtgttagcctttgaaatcaggctgaaaataaaaatgcatgaagtcagttataaattgctattgccaaacagaaatgagatgagtatttgccagaggtctggggcctggggggaaatggggagtgatggctgatgggcatggtgtttctttctggagtgatgaaaaagttctggaattagatagtgatgatgttgctatagctctgtgactatcctataaaacaccgaagagtacactttaaaattgtgaattttatgtaggtgaattatgtcccaataaaaacaaatttctatcgcttgggtcaaatagtggatcgcctacttctaaggtcaagtgttatgaaaggcggggcagcattagggattcatacatggcagacaatggcaccaggactccgtgttgaactagcagaactgactttgagcatagtacaaattcaggaaaaaggactcatctagagaggctggcgtcaattttaggaggacagacttgagctgagtatgcagggaggaaagaatggactggaagagcaaagtaaaagacattccaaagaggaattcagaaggagggagagatcatgatgctctctttacttggttactgttttaaactttcatttcatgtggcagtgttttcaaggggagatgggaagattggacttctaggcaagggagttgggagcacaaatcttgtttggctgggcagggaagagccacattagagtgtcccttcacaagcagcctttatcttgatgtgggaggttgcagggcagtcgtctgaagccctggagccatgaacagtcacatgtcgttcattctgatgcgtctgaactcctgcatcctaagtcacgtaactggaggcaacgagagcctgttggataggaaacatgtcgactggcccagcctttgcagcctttcctttgtaagagatgtctaagctctgtttgaaagaaatgaggtttctttgttttaaagaaatagaatactgcaagggagagggagagtttcccgggctgccatcttgttttctgtgggtgggaagtgaaaaacctctcatttttggtaagctgagcaaagcccaaaagcaggagcaaaatcagtccacactcgagcttcaaatgccactgtgaaaattcgaggcaggcttcattggttaaaccgcagcctgtcagggaggcttcagcaaaaatgctggcatgagatcttgattcttctatgataggccacaggacagtggccgtactgccctgccaggtaactggtggggcccggggcctgggggaccacgtcgtgatggttcattcctgggccctgggatccatctgcctttgcctgtcactggaacccatgacagcagtggactgagcctgtcagggaggatgagagagatggaagcagcccaggaactctctcaacctgaggcaagttgtgcctcttcccggctgccctgtgccaggccccgagccagtacagaaatggcacttaggttgatatcttacattcagtccattttgctggaatgttctgtaagctccctcttggaattctgggtccatgacattcttttatcctttgctattaacattatcattgtgttagcagtatagctcagtatgactgctatttaaacatccatccccatccctgcccgctcccccacccgaaaaaaatactgtctgcactgaaaagaagtggtttggcatagtgaaagtttttaaacatccattttccagatggatatccttgttaaatttaaaaagaaaaaaaaaaaactaaaccatgtggaatgctcctaagtgaatattattgtttactagacttattccatcttatggcattttatgacaaaatatcagcaagctcataaagagggctttttttaaggtccataatctttctaaccataacaaaagggtggtaaatatattgtacaagagcacgatggaaaaatgtgctaaagtatttccacaaatcaaatgtagcactttggcattggctctaaagcattaaatttagtaaattagaaccagatgattttaaaatagaaacttacataactttacggtgtgattttttttcccccaacgcaagtttatcttcctgcagccgcgttggctgctactgtaataggtatttaagaagtagggcagcctctaggtattattcatctttgtagctcccaaggtgcctagcattatattgggcaattagtaagtattggtggatgggtgaatgaaatctcagcagggattaacaagtactagttaactggcaaggaaatgtaatataaatatttatacagatctacaggtagacaaaacactgccgctatcacacacataatagtgaaaatatgggttgcttttcctttcattgttaaagctgtggattaaaatcaatgaacctgaaataaaagggtggatctgcttcgcctttgggtcaccatgcttcaaaccaccatcaccctggaatgttcctaatacataagtctcatttctatttctgccatcatagcagccacagaaaatgctccttttggtcatgtctccctctcctcccacacacaagttcacaatgtagctaataccttaaagataagctgggagttcaacacagcatattgactgagtgcctataatctccaagaccctgtatgtgctgccacagggggtgcaaaggaataaggtatagtctttgccttctaggaaaatactttccagtagagggttagtcagcacactgtcattgcatgtaaaagaaatctaacttatactaggttagtcaggaaggtgtatttatggccttctgaactgagttgtctaagagtagacttcaggcatggctagatccagaggcacagacaacaggattagggttctctccatctctccactctaaatgcctttgcttctttttgcacatggactcattctctcttgctattgactctctctacaaggagaaaaacatattcaccaccgagcaaacatttacagtctatgatccaaagacagagaagttgtctctctcccaggcttcatatacaaatctcaaaaagatcttggattgactctgagttacatgtcaagttctcagattaattactgtagaaaagaggatgtattctatgaccaatcaggcctgagtggtggttgggactctccctttgtggatgaatgaaaaggaggcgatttatgtcttaaatattgatatttaaatattgatgtgccttggcagctgattggatgtgggaagtaggtgggagaaagaaataaaagatcagtctgaggttttgattctaggtgactggtagggacataaatagaaagagaatggtttaaaacagacactgttttaaagggaatttatcattcataggtgtattaatcagggttctccaggacatgtgtgtatctatgtgtgtgtgtgcgtgcacacacgtgtgtgtgtgtgtgtaaagagaaagagagtaaaagattggtttgttttcaaggagttgtctccaagtccaaaatctgcagggtagacccacagcatgtggaccctgggaagagctgatgttgcagcttgagtctgaaggctggtggaacagaattccctcttcttcagggaacctcagtctcttttccctgaaggccttcatctgattagatgaggcccacccacatggtggagggtatctactttactcaaagtctactgatttaaatgttatctcctctttaaaacaccttcacagcaacgtctagactagtgtttgatcaaatatctgggtagcatgcatggcctatccaggttgacacataaaattaatcatcccaatatttgactataaggagcttatgacatgcctctggaatatttaggtgcagtagaaaatgagggcttggaactcagaacacaggttgggagatgtgattgtcatcagagtagacgtcattggagagcatgagatagataagggagaaaatacacaaggaaaaggagctgagaatggaaccttgaagaaaggctcctgaaaagaagactgaaacacattggcaagagaagtagaagaatcagaagagcccactgctttggaaaccgaaggagttgatttcataacaggggaaataacaaggagtttcaggagttgaggggagatcatagagttggcaggcagagaagagtccccggcttggacaatggaggctgggggttcccctggagcaggactcctcaaaatgtgttctgcagacctgcaccaggccacacactggacaggcccaccaacaggtaggtgcagaaattgagagctagtgcttagaagctctgacagccattagacaagagtgattttttatcagctgaattcaattatcatcatgatcatcatcatcatcatcaaggcttgtattttgccagtctttttcatttcttttttctagtaatttcaacactactcctattctatgcatcaatggctttgatggttattgatggaacaggggtcagaagcagatgcctggaggactgagcaggaggccaggatgctggaccacccactctctggtcatggcaagtgaaagatagagggcacttggtcagtgttggggaaggagaggtggcaaagggaagatcctgaagacccagagaatgttgtttgtggctcatatttgctcatccacagtaacaaaatgtaaaaatctggagtattttgatagctcactcagcagcacagcctgattggagttggcctgagtgatatgtattcttttacccacttggcatgactctttgtagattcaattgctgaaacatgcatgcctttgctcatgggacacagccatggatttcactgggagtgtcttgtaatatgtggtatatgctctaaatctctttctaaaatctgaaatattctgaattccacaagctcatctggcctccaggtttttgaacaaggaactgtgaatctgtttttagggtgaggaaggccagaacttacttgcagagagcagggtgggaaagattagggggcacatcagagaggggatggttagggagctgagtcccagagtgggcttgagaggagagaaaaaaaatgcacagagctgtctggataaaaaggaaagacagttttttttttttgcctggtgaccagaactgcacaggtgatgacttttgaaaatgtagagtgattttaagatggcaaaatgaaaactgggggaagacatggcctctatcagctagggccaggagggcacagcctttcttcttgtcactactctccacccctcctaagaccagaagctccaaaagcaggttagagcatgaatcaggagaactgcatgccctgggttcaagaacacccttgcaacactcccttgtctacatcgtcaagtctgaaatcacagggtgccaggccttcagcaagttaagagaacttatacttagtgcctgtaaagctcaggggtaccagtgagcgagacttcaagtcttgtgcatgctcattgccagaccccctttggctttttgtataaagaagagagctgctctttatttccgggctcagtgggcagaaaggaatgctccgtccatactccgttcggcaagtcaagggtggacactggtgtctttatcaccacccagtcctcggcccacactggcaaggcattcctctagcagacaaaataaaagattgctgatagctggagcactttgtttgctttctaaaacgagtcaaactcttcaaaagcttggcttgaaccgtgcagggtgtgctgtgttcccgccacattcctctcacccgcctctccaccaggccttgtattatccggattcctttcatgcgctcacgagcgccagctggcggctgcttgggctggccggacaggccagaggctctgggcccggggcctgctggacattggccggcctcagctgatgagggcagcggggcacgggagggaggccttcttggagggctgggtcagctgggctcttttaaggcacgagggggagaaaatgcatctccaacccctgaagaaatgaggtaccctgggcattactagtggccatttggtgtttaaaacactcccttctcccccattgtgtactgtccctacctccgcccccggagctatgctggatggctggtgtggaagatggcttccggaggccagtgtgcgctggagaatggcaaagctcggaagtagattggaaacagaaaatccagcccatctaggaagctagggcacacaatccataagccttttctgcttagtccaactagacaatagcaagacgtggagaggggaagagggctacaaagtcgcatcatatcacatgatgtcatgccatggcaagtaggaaagatcatgtcttataccacatgacatcacatagaaagtgtatgccagagaagtcaggaagacttttcaaatgtaagaacatatagaggaagcacaaaggttagcaagaagaagacctgatgcctttgctccccttcatttaataggtagtatgcaccaagatgattgtgtttgggcagtgcctccggaaagaggagacggccactctcatttcagccatgagagtccattcctgtttatttgatgttggcagatcacttcaacctttgtaaaaatccacagtgtgaagtttctatcagcagaaaagatttccatgacagtttcatataacaagttgtttatttggacaaactaaagcatgtaataacagaacacctcacggctagagaaaacaggagagagaggctttgccaggcagcctgcacaattttactattaaactccttttgttccactgaactctatgcctttacctagctggggacacataaatagtagaaatgtgaaccttgcacaattatggagataagcctaaatctttatgcatttctaatttttcttatcacttcacctttaagttaattcatccaagtctttcatgtaaagaaaatgctaaaatggagcgtcacaattgcttgtcacatttcactagagtcgagtgaatttatttaacacctaatttaatctgtcaacgtttttcaattctttgaagaaaaaaaggtagtaattaagtattccaaagttataataacactaaacatcaaaacttcacaatcgcacagttttttaaacatcaagtcaagatattagccatagtcactccacttaaggtggtctggctaggtttttagtagcacggtagtgacacggttttacgtgttctatttcatggtttatcaagaactaagaggggcctaagacatcccattttagcgcttcacccttgggataattaaaagccacctcaaagagatggaaggaagcaggaagagggctcagtaggagtggtggttgtaaggggctgtacagtgacagcctgctcaagctcagctaagtggtaagaggcaccaggtcctcgtcaagtcttcacagtgtggagacccaccgcgtcgctgtaacctagaagatctagagaaactgcttccattctctgctgcctagcgccccacccaccccaggcagcttgtccttgagagcgaaatgagttaggagggaaccaaatgagaagaaattcagggatcacgagtcaaggagcttttttagaagacactaccctccacctccatctgcagaaacaaatttctttttttttttttttttttttgagatgaagtctcgctctgtccccaggctggagtgcagtggctcgatcttggctcactgaaatctccgcctcccgggttcaagcgattctcctgtctcatcgtcccaagtagctaggactacaggtgtgcaccaccatgcccagctaatttttgtatttttagtagagatggggtttcaccatgttggccaggatggtctcaatctccttacctcatgatccacctgcctcagcctcccaaagtgctgggattacaggtgtgagccaccgtgcctggcctattattttttttaatacgaacttaacaagtctttcagaaaatagaatgtattcctaggacactgttgctaacgaggtagttcggggtaaggtcgggtagccttcatgaggtctcttgtgccaaaatattagtggagggaaagtgaatgaaagccctatttcacagtatataaagaatcaagcattaaaactcttttgggcttttctctaataatagactttcattcattccaagagcttgaccagttcaacagataaaagaggtttattgccttgaagtgagaggagctcattcccttgccttctgagaagtggcttatttgtccccctgttgaattcagtgaaggcagtgtgcacagacaagacacaggctttgagaggacaaaagatggggttcagtcacctacataagtgcaaaatgggctacaacaaaagaaaagacagaaccctcttctataaattgctcaaaatctcattgcggaaaagaaactctcacaaaagaaaccatgtaagggaataccaagcactaaatggtgtgttatatacataaaactgactagagagcatatgcagattttttttatttttatttttttagagacagggtctcactctgtctcccaggctgcagtgcagtggcacaaacatggcacactgcagcgttgacctcctgggctcaagtgatcctcccccctcagcctcctaagtaactgagactataggcatgcaccaccacacctggttaattttttttaatttttatttttgtagagttggagtcttgctatattgcccaggctggtctcaaactcctgggctcaagcaatcctcctgccttggccaaccaaagtgctaggattacaagtgtgagctaccgcacacagccatgaagatcactttaaacgggtagattccatagcctcatactaagcctactgcggctcatacttaaaggagagaggcctaagcatttctaattgtttcttaagggaaattggatttgggaagcatagacttaggccacaggtgacgggagtccagagatacagaggaagattggagggaggagagcaacaatggagagatttttctaggaaaggttttataaagaagatggggtacaagcgggaggcacgataggatgtaggtaagcagagccacgaagtggggcagagtgatgaaagaagaactacatacgcacaggctccaacgtgcacgtgagtaaggggtgtgtgcatttgtatttacacggctgcatcagccctcctcacaactcaagaacaatacctgtttctcagttgagcttagtcccacgagggtggagactcgaccttattgagcggacaaacatgtgctcagataacgaagtgcattaattcattcattcatatgaagagaatggcagcaatatagctccatggtcagggccacacagactcagaaaccagaaagcctgggttcataaacaaaatgggccatcaccctgtaagttggcgcatgctgtagaacttctccagtcttggttttgtgaagtgtaaagtaagaacaatacaagctacctcacagggctgttacgtgagatgaatattaaatggactcctgcttgtaaacatctggcacagggcctggcacctcggagggtttcggtgaaggctgaatgaaccaagagtcagttgtattgaaggagaaaactctcaatggctggtctttgaggaggtttctggagacttgtaaaagactggaaaagttgctgcctccaattatttttgaaataagcttggtatatgtagattgtttttaaaaactaatgtcaaactagaaatgataaaacatggccctagaatggttcctttttaggactgggcttgttcctctggtctagcactcactcagcttccagattgttcccctgtagatgtggaaagatctatactttattctgaactcaggcatagatgtaccttgcactaatctagagtgtgggtcggcaaacttctagagacaaccaaataatactttttcttcttcggctttgggggctttgccatctctgtggcatgtgctcagagtctgccattacagctcaaaagacatccctacatgaatagggatggctgtgttccaataaaattttatttatagacatcgaaatttgaatttcacatcattttcatgtctcatctttggtttttttcccaaccacttaaaaatgtaaaagctattcttggctcatagatgcagaactagcaacaggccttgagttggttctgaaaaggtgcatcctaacaccattttaaataaatggaaaactcactgctaaactcaaacacacgggggaatatgtcttccctgttcccttcctgggcaccaaacagaacctcatgataaacatacgttctttgaagttacatttatcttcttactcattgatgctgcaagcatttaggcacctctaaggtatacaacaggacaggggacacagatgaacaagataccaccctgttccccaagaacacacatcggagctggggaaacagacatcaacaaatcattatgagacaacgtggaaagcccttataatagggccgtgttccagtacaatgggggcatagtgaagggagggaggaattagttctgaaagggcgaggtgggcagggtgggggttgtagacaaggatacacaaaagggttagtgttgaggccaaacttgacagcagaagagtgaaggggggtcattctcagcaaaggggcctgcctgtgcaagtcaggaaggtgcaagtccgtcttggaatcagtaagttcccggcaaccccacactcccaagtatggctagagggtgggatgggggtcggcggtagagggagaaagaaagggtgggttcagatggtggtccatgccaaagtgtccagattttgcttgttaagccattgaagtgtcactagaggtttttaaacacggtagtaatgtgatcgactctgtattccaggaattaaacacgtagtgagcaacgtggaagatagatgacagcagtgagagagttaggcaaagaaactaaaaagaaatcattagaatagaccagaccaagagattcaggggcctgacctcaccaccaattgctgttataactcaaactggtggggccctgtgtgaggcactcaatctctctgagcgacagacagctctgccctctctatgagtggctggattaggtgatttccaaagtcatttcctgccctcacatgctcttcactctttgcccttcactcttagagagcagtcacgtgggttcattccaagttgtcaacagaagtatttcttctttctagcctcctcttgattttttgctgtatttatgccagtgcccagttgcagctggaaaatcattagaatggcatccggtgccatttccctcactcctgcctgcacaagcatctggaaggaagagtgcttggttgaagagcaggcaggcggcaaggatgacaggaggggatgcccaccggagtgctggcaagtgcaggaagtggaaccggaggcccagagttctagccaatttcaggagggtctctatgggaatcctagggctgctgcataaatcaattacatagcccagtttaaacatcatttttgcatctgatagtaataaatgaggaagggaattgtttctgtattcactgagacaatttgtgtttccctgaagagttttaagggcaacatactaaatgacactaataaagtaacaactatctgcattatttaagctgcattaagaccagagctcaatattttaactagtagcctgctgtccttgagtgtttaacaaaccggagagaaacagattactccctggtcaaaacactgcagaggcttcatgtcacactcaggaaaaaaatccaagctccctaccacctacctctctgagctcatcctctccatccagccctgtgtaccccacgctaagcacactagacagcttgctgcgcttagacacactaagctcgtgcctactgcgggcccttcccctgggtcacttctgtccggaatgctcatcccctagatctctgagtggctggatccctgaaactattcagatttctgcttaaatatcatctcctcagaggagcttccctgaccactttatctaaaataatacacctcctgtcccaccctggtctgttttcctccagcaattttccctgcttaatttttcttcatagcatttatcactgcaaatcatattatacattcatttaattattttcctcaactctcactagactgtaagctccatgaagatgggaactttgtctgggctactactgtatcctcccctcctagaaaggtacctggcacatgctaggtgctctagtgataacagttcagtgagaaagctgccttatgaaagaatggcacacagagaaggggttcctccaacttcttctgaatgcctaccacacttatcaacagtagtctaatattaatactagttataattaatacaataattaaataataatctatagaatatagcaataatgtcataaaatattaacaaaatatcataaatctgatattaattaaaataataactaataacaacagtaataagaacaagcaaccatttaaggtcttacaatgtaacaagtactattaaattctatccacattatcttatttaatcctcattatgaggctagcaggtattattattttctctatttcatactgaaggacatcaaaattaagaagttcaactggccaggcacagtggcccacgcctgtaatcccagcactttgggagactgaagcaggtagatcacctgaggtcaggagttcgagaccagcctggccaatctggtgaaaccccgtctctactaaaaatacaaaaaattagccaggtatggtggcagacacatgtaatcccagctactcgggaggctgagggaattgcttgaaccagagatgcggggattgcagtgagccgatattgcaccactgcactccagcctgggcaacaagaatgaaactttgtctcaaaaaaaaaaaaaaaaaaaattaaaaatgttttgaggttccagcacaggtttacctgattccaacacccttgtgctttcctttaggcagctaactatatactgacccaagccttcttgaaatgaacttcgggtagattacatgtgtcttacttaccttacaggacagaaacaggaaagcaggagggccactagctagagaatgaaattacaaaaaaaccccagcacaaactttaggaaactgtttgaaaacattaaaataggatgggacagcactcacttactcaatgatattcatcaaacaaaacagaaaaaggattcagcttgaccacttaggaagccaaaggaatgttatctagatctcttggaggccgcaagactcatcttacagatgggaagggctttgaatcattgtcctcctttatccaggtagacaccaaaaacaatttcctgcaaactaacgactctccggtcagtctgcaggattcttaaggagatcgttacaatgcaatatgctgcgtgcttaatttgtgttcagaaaggccttgcacaatcactcaggcttatttttgctctaaggacaaatgaggagaagcaaggcctaatacaggctggaacaggtatgtcaacctcattaggatggcctggggggtcatgtccctggaatcagtgccacactgaactgcaaactaacctgccaaccctgtatctggaaaccacttttgtaggacagctgttctctcattccttttgcttagatcataaaagtagagttttcatccattgggaatttgtgtgttagacgcgaagggaatcagattctgatccaacttggtcaggaaaaaaaaaaataagggctgatttttccatccaagtcatgtagtctggttggagtgcatcccactcagggacagctattgtctggattcaccgagtctcagtcttgcccgggaaaaaggaatttttcgcctcactgctctgtccgtgagaagagttgcagaaggtgaccatttctgttttctgggtgattctctttctctatagaaatcctaaaatggaacctttatagaaattatgttctgtgcttcgctggagagagactggtctttttaaccaggctcatcaaacagtgggcattttcgttctcctggataataagtgttggtgggttaatgggtcatcctcaggacagaggtcagaaggaaaaacactgcagtgttcaaagctggagctagaaatgccagccgtcaaagaacacagaactcagtggacggtgatgatgtatagggcgtgcactggccaaccccatccgagaggtcacatctaacctttatcctcagcaaagccactgaaggtcgctcaatatgtgtgacccgcaactctgaggccctggtgagaagctgtccaggaaaacgctggtgcgtgtgctagagggttccttttcactaagggagaattgtcttccagctccttgcagactgacatcgcaaagtactttgaacgttgaaaagaacaaaaaaagcaaacagtcacacacacacaaaaagtaggcgggaggagggggaaagaaaaagggacagagagagagagaggtatcagcaggggtggttagtaaaaaggggcccggagacagaaaaccttttgttcccggagttcgtttcatgtagagattgtgaggtgaatggctttgaaacgaaatgggtttatgaaggagttgctaggtcacaggaagcgcgactgtcagactgcttttgtgaattcagtttctttaaaatttgggttaatcttaaaaagaatgtatctccttttcctgttctttctctttctgtcttcttttttggcgggggcgggaggacagagtaaggttcaggacggttccccactttctgttttattttccaccgtctgataaagcaaaaagaagcgatcacattacaagttctttgtcagtttttcagaattaggggtgggcagggcctgagcattaccttgtcccactagccaatggcggggcggcatgcaaatgaggtccgcgatcagcctgcctcagtcacaacagtgagctcagagacttgagggaggcgctgcgactgacaagcggctctgcccgggaccttctcgctttcatctagcgctgcactcaatggaggggcgggcaccgcagtgcttaatgctgtcttaactagtgtaggaaaacggctcaacccaccgctgccgaaatgaagtataaggtaagagagtgccttttacaggttaccttgcaagctgaaagctgtgcctgcgggtgtgtgcttgtgtatgcgtgttccttactgtcagtcccttgtgtgtcccggagagttctaagatgagtctcggtcactgaggttgacatgcaagcagacaagcaagcagagacccggtctttgagacccactccaggggttcacagtacacccgagtccatctgctctgaaagttgccggggaaatacctcggtgagaagttaagacttggagccgcttcacagcagccactggagatcagagggtgtctgacttgaatcgcggcaggcattggctcaagtctccttggcttccccaggcctggcttccactgccctggggaactgtaatgagaggaatgaggactgcatagtctgtctcagactggctcttagtgcaaagttttccagactttgctttaatcgtttggtctcggaaggagtatgccatatgcacttttggtgggagaaattaaaagcccagattacacagctgaggatggaaaattttgacatccttatgttatattggatgtaggaataaataagtatgagccatttcttgaaaacatttttattggagtttgaatggggtgagagtgcgaaggctcaggctggctcattgtgcctgaaagcttacagagtgtcatagtcatagtacttcagcagcattattttccaatgcattttacaccattgtttgtggatttttcttgccaaaaggatttttgacttgctccgtatattcccccctcccctttttcttttaagtcactcccatctaaggaggcaagcagcttccaggggacacaaagaaagcagactgcaatgaattggacatgaatttttcttgaatgatgaatagacatgagtgctagtgctactattttattttatgctattttaaacaaaagtgttattattaagatggatttgggcaagggtgctaggcttgtggattgacaatttatattaactgtacactagctggaagctacttcgctttttttctaaatttttctggtccatccttttttgatgtaaggttgtaaatacttggtctaactgatagccactgactagcctcagtaataaagcttttgttcaaaaactatgaatcttattcaaaagctttaagtctaaatgtcaaaagtctttatagtaatgcctacgttaccactgtctgaagacacaggtatcagctatttctgtttcatcagctttctattatcttcatcagtagggaagatcagaggaaagggtcatcctgaagactattaatatttgactttaggatgcaaccagaaacaaatccctctacttggcaggaaagttatcttccttaaagtggctcaccccatatttccttatttagaacaatgataggaccagatattactcagcctggagtgacttttttgctcctcctttccctgttgttgaataagaactggcttgcagaaaaaagagaaagtatgttcatatgtctattattggaaagtataaatggctgaaattaacattgagtgctataatctagaaagtgacgaaagcgacaaagtctcaagtcacttttattcaatgatctcatcgtggttagctttactctttatggaaagaaaatctaaaggcaactgataaagtgactgacagcgtaaactgcgattggcattcatggagaaacctgcttctccactgggccttactggtgttgaacaccttgccaaatgatgtaaatacatgatttttattaccttgtaggcaccttcaccagcaaaaaagctaacttctccgaccgaacacatgacttatgccctatgatgactattaaatcaaccaatagctgaagaaatccactttccttttttataaagttttctttctctctagttaataatgaacaactttacttcaggaaaggattttgttattgtaagtagaggagagacacaaaagtaatgaagtaacattaattgagacttactgtgacaacacaagattgtcatattcaactctcccaatagctctacaaggtgggtattatttttatactcaatttcaaatgacacagagaggctaagtaatttatctaatgccacacagctagaaagtggtgagctgggattagaactaaggcgatctggctccagaactcatgactttaaccactattaagagaaagagaaagagctatcgttgacctctctaaaatatggccagtgttttcttctccccagaaagtttaagactatttcatcccaagtattcctgcaggataatttctttttaagatagtaactctataaagcaaaatgaagtgcatgtttggcagttatttgtttaattcgagccacttaggtagtaaaaccagataattattagatggtaaaatcccagagacaggaattatctctaaaatactacgttgctctatgcactgtaaatttagcacaaaccttaaaatgtttactgaaagacttatgaatcaggccctataagattgtcgttgttaacctgattatctggtttggctgccccagggatcacaactacggaacaacaaaccttcacttattttgcacttaatatacatagcttcaggccaggcagcaaggtacttgcagtaatcctgagaactgtggaatgtaagctattactccggacagacatttctggttagcacttatctaatctgtctttatttccctgtatgtttttatttgtccacaggaaggttgcagtcactgtcatacgtacttaattttccatttctcttagaagggattcagtctgtggttatgtgatagtaaattacgggggcttcatttattaagaattttctacaaaatccccttcatatacagagcatgttcttaattgggcgggggctggcggggttaggtgattgcctcgatggccttggtttgcttacccagtgaaggctccctcctgagggtctggaggtgtatggttgtgctgtttcccaggagggtgatggaagggtctctgcgcagctgtgtttgagcagaagcccccgagaccccaccccgtttgtgcctgccaggcccgaggccccgcccacctcaggcccagcccgggcgggggctcagcggccccttggcctggctgctaatggctgagcagagacgcttttgtggctttgccaaatttctgagcccttacgtgcctacattaaaattctaaattatttatctcgtctaccatgcaacaaattcattctttaacgttttgactgaagaaaaattacagacggaacttacaatgccattaagaaaggtgcattctgaaagtcagagtcctgtgttctggttgaatggggtaggtcagggaaaggagaacctgtgtgccgtgaaacgctttggaaaggactttgaaagtattcgtatttcctcaagcaagaccgaggaaaataatgacagaggatctttaatttagtcaatatggtcatgcataagctattaaattcccaattatttccttgctttgatattttggtttaaaatgctttatttttctctgtatgatttttgcaaccaatccaaatgtaggactcctgtccttttcctttttaaaccttgtatgagatctatggatttaaaatcactaaaacatgctttgaaaaatatcaacttggttatttatgtatttatgcatttatttatttatttagtaaacccatttgcagagctaaatggcttacctacacagagataaaagcctttagagtactgaaggtgcctgataataccaaatttagcaagttgtacagtgcgtaacatgccaaggattcctttagcatcctttccttgctgggatacacgtcagtcctgttctcagaattcagtggttccctgtctctcccttcactccagtcttctgaaaaaaaaacaccttcctctccacttttctttttttctttttttgagatcaagtctcactctgtcgcccaggctggagtgcagtggtgccacctcagctcactgcgacctctgcctcctgggttcaagtgattctcctgtctcagcctccggagtagctgggattacaggtgcccaccaccatgcctggataagttttgtatttttagtagagatgggtttcactgtgttggtcaggctggtctcgaactcttgacctcaggtgatccacctgcctcagcctcccaaagtgctgggattacaggtgtgagccaccgcacccggcctttttgcaaattctctcccactttcgtgcttttatgacctcattggttctccttttatcttcttcttcttcttttcaggctttccttacgcttctttaatactgacttccgtagatcttacttccaaccccctactccccagccccccacccgcacctatctactgccgcccccttgcccccgacacacagatgtgacacttttaatgcacattctgtagccctcatttttccttctccttagactctgctatgggaaatcttggtccctcactgcccccattcatctgcctctctgtttgcgtttacatgacttgagcggcctgtcagtcccgctagtaaagtctcctcatccatccactctgtttaaacaatcaaactctgaaacctgtgtctcctggaccatcctataatccctaaaataggctgttatgcttttcacctctgccctactctgttagcactaccttacttattgacctctttcaatcaaattgttatctaaaggatacccgtaactcagataggttgcctactgggcctgtttagttttaagtaaaccccactgaatatgagagacccaccctctatttgtatgtagaggcagattgatcgaaaagtccttgaataaaaaacatgatctagggtctgtgaagttttgagggggccaagacttggtgttttatgctcttgtgttagagacatgatagagcatgggctttgaagaaaggcatttctgttccttatggcttatagctctggaccttaggcaagttaagctctctaagcctcattttacagcattgtctgtaaaatagggataagaataactgcctcatactattcgaagacctgggataatatatgaatgaagtacttactatggctcttggcatatagtaagcagacaatgcaagctggctccagctctctttgtatggtagatgctcaatagatgttgaaaggatggtatgtactcaagacttggtgacagaattatgtcaaaatcccagttactaggttgagatggttgaatattgttgagtattctgtgggcctggatgtgtattgtaagcatagggccctaacagcatatggccccacttgctaatatactaatgacttgattccttcattattgttcattggactcagtattcctgaaattacaagactttgctcatagaagacaaaatgtatacacaaatagccatttaagaggatcttaatactatatggcatagtaaaaaaacaacaacaacaacaaaaaacatgggctttgtttcagatcccacttttgttactttctaacagtataattttatgctagctactttaaaccttcttttcctcatttatcaaatgagaataatacctgtcttgtcagatagttataggatataatatatgacaattgtcctttctagcagatattaggcatttaataaatggcagctattatatgatgttatatacacatacccacaaagatatacagatatatagatatggaatttttatatagataaaagtgtttaaaggagacattcactagaattgtttacccataacagaaatatcagtgaggaagagaaagtcgtcaattcaaaaaaccaaagataaaatccaaagaatgtaagttgggagtacatgagaagttcagggtgaactctcttatccaattgcagtcaattagaatgacataaatgtaaagtaagaggtcttggttgtctatgtttagatcattttagggtcagaaagaaatctgaacaaattggtttgaaatgccaaccactaggaccaaggcaatactctgcaagaacatataggctgaattaccaggacttctcgccaagacaaatgaaacagggccattgggaagaaatactatatttctaacttaaaatgccagagagtaactgacggtttcctaggtgatagatggttgcaaagagtacgggcatgaaaaggggacacacacacacaaaaaaaaaccctgtttatactttgccaacaacacccccctccatcttatttactttgaacattccagccatctctctgcagtaattcctgctggctaatgaggattccacacagctagggaacatgacagcctgcaaaggattattttcctgaacaatctgcattttaagataagtcaccttgttggtaaccttttgtacccttcattggaaagggtgactctctttgaagacagtttgaccaaacaatgagatctaggtgaatttgaggaagatagaacgggcactccagaaatatggatagtggtggagctgacagcagtttttcatggttgacgtagggagtggaggcagctgtcatggagatattaaagttgccagtggaatgttttccaatacatattcctgggccccacaatggactattaaatcccagttattctttaaaaaaaaaaaaaaaaaaggccgggcgcggtggctcacacctgtaatcccagcactttgggaggccgaggcaggcggatcacgaggtcaggagatcgagaccatcatggctaacacggtgaaaccccgtctctactaaaaatacaaaaaattagctgggcatggtggtggtcacctgtaatcccagctacttgggaggctaaggcaggagaatggcttgaacccgggaggcggagcttgcagtgagccgagattgcaccactgcactccagcctgggcgacagagtgagactgtctcaaaaacaaaacaaacaaacaaataaacaaacaaacaaaacagctagtctctttctccctaatcccctcactaaccactactagtgcttctggtgcttacacggtgtctaagtaggtagttcatgatccttattcaaaggctggatccagtgatttgtaagtgtcatgtttctttgcaaatctcagtcttgcgaattagaattccccctgatatgtctaacatatcaaggtaatagttatatgatgttactaaaaatgtccctcacatgaaatgttatgtttatgcccacaggaaacaaagatttagcaacaaatatgtaaaagtgaaaccatttcaagcaacaaaaatatttgatagcccttttgaaattaatttgaattcctttttttactgtgtgtatgtgtggttggggggcaggggggcggtggatggattaattatctgtgaaacccagtagaaagttgcagtaaccaaaacacgtgtaaagttcagatttgaaccagatctcctgtctacttcttaaggcattgtgcatttagatagtatatgtcattcatgtttttcctaggttttattggtcaggcagaaacactgtgctatctcttggtaactatgagttagccttaatctcagtgattcatgacagtccacttgttttccttaatttaatgcctcactcccacaggagatgaggctaactgaggactcatctagaggactctttaagaatgagctgggcttatctgccccccaacaccctccgcctcccaaaataaccataacaggcaaagccagcacacagaaaatggcagtaagtggacttctagacactccagctacttctgagtcttcagtgtcaggacacatcagtcatctgtcgatgagattttttttttcttttccttttgttctttcgttcttgttactagtcactgtggcatgactgagagtttggcaggaaatgggttcgtggacctgtggtacagtcgcactaccacagcagcatgggcctagcaaaatgttgagccctctttcccttgcgtgctcccctggggcagaagtccagtgctatctccgcttccctgaccctctccactcagagcccagcatgacaagcacacctttaaatgggttcaaggaagggaatagcagaaatgaacgcagcccgacagcctcctttctcttgataacccctgtcactgtggagctggacttctaggctatctcacagaggcccagaggcactggaatcgatctcatttccttacagacatcaccttgtcaattagagaacacataacgttgattgaatttaagattcttatcagtgcctagctctttttctcccaaatccgaaattcagccatggcagatccataatcaagaaatatacttacattcccatcctttgttgttggtttcaaaaatatttcttttttgtgagtatgtatccatgttttacaaaccaaaaaaatgggacatatggtctgacaaagggaaggatatttgaacctggggactgcctgggagagtccggaagcacatggtcactctagagactgtcatcaagggctgctcctgagattaatccactgtcgaaggcattatcccatctcccttacagcagccttttgcaggaaactatctaagatgttgtgctttttttttcatttacttgtaaataacaaggtgctctctttccttttctttgcagaaataggcatctttagaaataaagccatgcccattttgaaataagaacttgtttggaacacctgagagtgttaagcagtgcgggggatttgcatccaattgttcttgctttaaacctggcatgggcgctctcgcctcatagcccgcagcacctgaatcaagcctcctgcctcccttattaagatcttaattacagactcagcttagttcattgctgaagggaaagaatttcatttctctgaagtgtgtctgttttttggtgtggcaggtgtaatcatgatgagatcatttctgggttttttgttttgttggttttttttttcctagaggaagtttttttttccaaggggaggagtacagttcttaagacacaatttcatgagctcatcttggcgcagtaataataactgtgctttgattttatagagactctttttcctgaagaaatcagagcatttggagtaaataatctcatgattcctcatatttttataaagaagaacatgtctattaatatttattttgcagacagggaaacagaggcacaaaaggcagagatttgatggtcattagtcttcaaatgtgaagtctgaagctagaccctcctaattcagtctggtgtccattcctctatccagggtttctcaaccttggcactactgacacttagggccaggtcattctttgtggtgggggctgtcctgtacactgtaggatgtttagcaacatccctggccactctacccactagatgccagtaacacacgtgtgcatgcatgtgcacatgcacacacacacacagtgacaaccaaaaaatgccactaaacattgcccgtacccagaggggacaaaaatcctcctagttgagaagcagtggtctaatctcttctactccttctccttaaaaataactgccctactcaaaaatacccccatagaactgactgccataattttatcattactgatattgagcttaatgtaacaggtcctaaccaaaaagcaacttcctcttacaggcctagccccagtttgtttcagtgaataccacaaaatactaagaagcgcagagtttcattcaagtcaaatgtaaaacccatcaaaccatctctaaggcaactttaaagtatttctctggcttctctctctacaatatgtacctcatcatggaacatgcatttagagctgggtctttaagaaagctattttattctcataaactggtgtataacatgtgcgtgtaagagcttgtctctccacctcggcactgaacaatttcacaatgaaggttttttgttccctttgctcctgccaccttttccctgtcttctaactaagaagctgcagcttcaaaaactcttccttgagacagcttagtggctgcattgctgacagtgtatgactgtaaacacctctcagccaagtgtgtgaatctgttttctaaaactctctgaggacctcacaagtgaagtagataataccaatcaggcaccaaatccaggtcaagtgacatctaaaagagttccagggagggttgcatcctatttacatcaactcggttctggctgggagatggacaacagttgccaggatgtgtatgcatttgtattggtgggtttagatataaccttgggctgcatagcttggtgaaggaagataagatagacaggaatggaaaaataggaacctctttttcttctttcaaacaccttatcagatgttataacttgtgcattttgactttgagaaatgacatcatttttggaagtatattgtaatatagtagattggggtctcctactccattaaaacttaattcttatttctcttccctgagtacctggatgttagagggatttgtctagacaggcagatagatatgatccagtgccaacactgtaatgctggctgaaatccagatggttgttttattgttaataaaatctatcttgtgggtgggtgggtgtcaggccttcatcattatatggtgcctgtcagatttatctacagacagaaccctgaaaacagcttgtgcctgccccgcatttttgaccccttgccaagatactgtactgaaatctatcaaaatcaggcaacctgggacaaatgcttcgagattccaaggcttaatagcaacagtgctgacttctaagatggagaagattctcaggaagggcatccttgtccggtggggaaaaattctagattaagaggtgaaccagatgctagctctggctctgccgctaatctgagaccctctgggctgtaaaataaggagattgggttagaatggttccttcttactctgaaattctactctaatcaactctggtcaaggtatgggtgacttctggttctaatacctataaaaaacctaggtgttcttcccccttctttttttctttttctttttcttttttttttttttatgacagagtctcgctctgtcacccaggctggagtgcaatggcgtgatctcagctcactgcaacctccgcctcccaggttcaagcaattctcctgcctcagcctcccgagtaactgaaactgcaggtgcacacctccatgcctggctaattttttgtattttagtagagacggggtttcaccatgttgcccaggctggtcgcaaactcctgagctcaggcaatctgcccacctcagcctcccaaagtgctgggattacaggtgtgagccaccgtgcgcggcctccaccttctttaagattctcaggagttgcttcggtaaacccaaagaccacagatgagtgaaaaagaactcagcagtcaaattcatcttccaccgtgggccaggaaataatagaagttgactgtgacattgcacgtatacacacatatatgcaaatctgcctactaactctttgccctaagattttgttggttacatagtaaacaaatcctagcatatgaatgtgtctgtccagcacgaaccctaaatcaagcaagaatagatggcattcattcaagtatggggaaggagaggaacccagcttttgaggaacccctttgtaattgcacagctatgctgtccatatcatgttaccaaatctggtcagagagagatttctttctgagatccaaatatccaaatttgcagtgagcatcagatcttttcaccagtcctcaaaaagtaacttcactttggtatatgagccaccaaaatagtgctgggttccaaatgatccttcatcagacaggattggccagtgtggaagagatgttaagattccaagccctggatctacaaccacacacagggcgctgccccacagcacatccagggagtattaacagcttctcttgccatgtcaaagagtaccttcgggaggcaagtatttaatgtcacatttctcaaaccttctcccactcagacatgctcaaaagagaatgctatagctaaagttcacaaagctggaaaatctaagaaaacttgaggactcggggcaaagtgaatgacgtcaagattcggcgggggggtccaagatactcctataagctttgtaactgtcataggggtctagaagaagcacttcccagaaaataaaaattactgcctgaaatgcagtctgggtgccacaggaggccttgtgggaaatgttgaacacccctcagcagtgggcagaaggatgccagggattagtgggacaaagtggggtcctgcttttgcctttctgtgagctccattcagctcacctagtgaaaagtgtgtcagaacacagtcgacaaatagtactgggaaaaaattagcatatcttatattatatcataacttatcatatcttctgtctcctgtattgaaagcttcatgcctgtgacttcataatctcaagaggaaccaactcaaaaaattcaacattccagatcttcagatgcaagaacctaagtgtaaaccaagtattctgagaattaaaatcctgacacttacagatatccatgttttctgactatggctgtttccttctctggggaaagcccacatccccctctatcccaaaggtgatggtgggaaggaaaggagaaatgtagccaaaatggtttgcagttctcagaccaaagccggttttcgtcagtatgcacaaaagcacgtgagcctttctttctcttccctgttgtgccctgagactgaccttgacaatgttcatccctcagctgcctgccttaggactgacttccttgatgatggccatttccttgaatgtgtctgtttctcagggtctgtcctctgcatgcatgcatttgcgcatgcaggcatgcaaacccacaagagtccaggctaaagttttgggggattgggtacaggaaaatcatgtcattgagaatggggcaaccctgaggccatggcaggatcccctgcatgacaaatatagaatgaagtaaaaataatcagaggaagccgggccattgatgatgctatcagtcttagtggggtgatacaccagacattctgtctcatttctcttcaaacgaccgcatgagtggtcatggaaactacaagtcacacctctccgtatttggaaaagcagatcgtttctctgacataggagtaataagctttcttgacattttgatagcagtgagggaagggaaaaaaggcagggaggagctggaggtggggtgaggggtagaagccgtcatgtgtcctagagctctctgtaccagcgttctggtcaactgtacagtattttcttcccactcctcaggcatagcttgggaaccaggaacagcagaacccaagtggtctggcaaagtgtttgaatggtgctctgtcacctagtgccaaaagcagattgctacactgaagggagaaaggctcttaaaagagaccattgtgtttaatctcactgggatggtcagttcctcttggccttcctgtttgctccgtagttgcgaacactagtttcaggggggtcaggctcccgatctgcgtcattatcctgtttaaatagggaggggcaggccctttcctgctgtctgtctcccatagtctctggctgtgaggcttgagtgacttggacatgacatttctctttctggttcattcattttccccacttccatctgaaaattctaaccaaatgtcttgctgaattctctaagtacaacaatttcaccctccctgcagacaatgaggaaatcagagtccagaatccatttcaacttagcaaacatttactgagtctatattttgtttcggatactggggtaaagttctggaaatgcaaaaggaatttgcatctctgaacttaaggagttcacagtcttgaacagggcaatccaagttgtactgtaaagaaatagtatgatcgagaactgggaaaggaaacagcctttgaatagatacccattctggttaaatggaagatgggtttcgagggaggaaggaatttaatgcaggaaagccaattgggaagcaatttctgtgctacagaaaaaaaaaaaaaaaaagttgctgaagacctgaatgaagggtggcagtgaggtgaaaagcagggccccagatgggttgcaggtcatgaagagacacagcaaacctctgcggctcttactgcacagctgtgtgcatgctgttaaccaagcaaagcaaagcaggagaaaaaggtgtttgcacttgcttttagagaggaagatgcccattagactggatataagggactggaatgcagaagaaatatccagcgaagactatggctttaggaattatctgtgtgttcagatgccatcctcctgtagagcgtaagcacatagctgagaagaggaaagtgcaaaggacaaatctctttggaacatgatcactttagggatgggaaaaagatttagtctccagtggagaataaggatgagagtggtcaagagaagagagaggacgaaaaagtggtatcgtggaggccagaagaagacaatttcaaggaagcttgggctggggatcaaggctagaggctgctgcaatcagggttccctcagatagggctcatgatcctaaatgctgatttgcaatcctgattagagccacagcttgtgttgcacctgtatttcacttgactaaattctgtcctaattctagacctgaagacaagaggcctgaattcctgtctcagctctaagactttcttgccaggtgagctggcaaatcattaacttcttgaggctcatttttttcttttgtaaagtgaaagggttggacggtaattgtttaaagttccttctggctttcaagttctgtgccctaactgttttggtgttttgccaagctctagctgcactgctaactgccagcctttggagactaaccatccaactgaatatagagttacatagctctcttatctctccttgatttgtttctgtgttgaccttccctaccctggagataaatatccaagggggtgagtgggcaggagaaagagtacatcttgagtagattaaactgcctctctggggtttttctaagatagcagatcatcagcttctgactttgtggctcaaggaatcacacctttgcactgaaggagaggatccctccacttccttgccagaagaattcattcttgattttcctattacgactgatgtgcacttttgaatgagatggtttatggtccagctgaaattcatttggctgttatggtcttactgaaaccttgcaccaacaccaaatcttttcgaaagtccaactcctgcctcatgccttttcctacctgctgatgtattatctgtgttggaatctgatgacatttatccataatttatcaagtagtatcattattaatatgttgtctcagaagttcccttgaatgcaaccaatggtttcactattgctgtttgtaggcagatactcaacaagaggttgcagtgacaagaactcattcataattcagaaatatactgctttaagataacagttcttctgaaatgtaatcctgagcaagataaatatcagataggtacaaaacatatataatagcatcattggaataggaccaagcctggactgcaaatggaaaggaggcaaggcggggagggagcctgaagcccaagggccatctagcaaattaaataaaacatcaccatagcttaccaaagaccgggaaactaaggcccaaagggatgctgttgcctggcaaagtaacacagctagaacctaagaccgcaaatatccaatttattccatagacacaaaaagaagaaccgctcctcttcagaactttatcatataatggaactgagcccagtaacaaggatgctgcgtggctgagctaaggtagcttaaagttctggaaagaggattaaactgaaagaacgcaattctctttccatcgctgccaatagtgtggtcttgggcaaatgataaacttcaaatctatttcctcatctgtgacacaagggcattgtgtccaggtgatctctaaaggtccctggagccgtaagcttcggtttaggagagtggctggatgtagacattggctctctgtagcttgcgcagatattaaataactcatactcctgttcggccaaggctgagaatatgtatcggtgtgtgaataggctggtgccggggtcctggctactaacagcactgtcaagctgtgcctgaaacctaatctctatgggcactgaggaggactgctgggaagtcctgacaaccagtcaggaggactcacctgcggtgcccacattagcccagactgtggggctctgagagtttcccccaagaagcagctcacaggccagtgtagaaacattagccggctgctcaccaggtggtaagaaggttactggggcaggagacaaagaacgcccaggacgactctcgcacggggatttctatctgcctctgatcaagcatgctccggtgctccacttcagtgcctcatggtgctcttggagttggaagtggcccaattccgaatgccttgagctgatttatgctgattagatctgtagccctttgcctttctactgttttctgtttctcttctttcccttctttgtagccagtataattgcacagctaccaaccctcagctcccatacaactagcccgactctgttgcttctgatttcatgtgggggcttcccgattgctgaatgggcccagaagaaagggacagacagaggccagagtggtcagctatctcctcacttaataatctcagtacagctctggtggagtcatttcctggaggtcattttagtaaaaggaccagaatcttgtcctctgtaactctatgacttctcttgtaaaatacagaatacccaaaagatgggagaagagaaacagagacaattttaggattatgacaccatccttaaatggttccatgaacaggggaaactgctgcctgattttttctttatgtatgtgaacttttcattgttagatgaaacccagcgcctcctggaatattaactacccagtgaaaccttcccctgaaatatgcactcctcagtttccctttagcttccctggccgctcacctctctgtgtctcacacttcctggatctcataactgtcaagaaaaaggacttcaaccttattcttgaagagtatcacaaagcttcctgaggactgtcctctatggctttatctcttttaattgccctggctaagaggaacctggctcacagcagcagaactggacccgtcccaactactgaatagagggcagatcccttccattgcacagccctccagagcggaaaacacacaggacccgtggcaatggggctagcacaaggggacgcgagtagtgcaagtcagctgcaaagaaatgaaaagcacgaggctgaatgatcaagtccacgttgctagagaagaaaatagacagcaaaagctcagacaatgacagccgaaaatcccacgaatatgtcatggtataaaataaagtcatgaacctgccccatccaatccgtaatcctttcttccataaatgagccccacctcaatgacattaagtgcatccaaacatcttaacaaagcattagagttcacttttagtgttccgagggcttgtgctgaatcaacaacgtccccgacttcgctgtgctctgggaagggggcagacatgcgggaatggctgcccgcgtgctgggaaactttactaatgccaagaaatgaaatcttccgagcctttgaaaggcctccaagaatgtcagcacgtactgcctgcccactctctgctgaatgcctactttggctgtctgcttagtactgaatgtgccagacaggccttcatacaaagacggagagtgtgttgggcccatgaaaggggaaggcacagcttttctgatgtgaatggtgagattcaagaagtaggtgatgaaaggggagggcgaggaggggccctcaggaaaggtatgcataaaagaccgagagagaagagttggcatccacctatgtgttaataaatttgttgtcaaagctggagatgtatatggctgctggcctatgctccacgcttgatggcatgtctacatgccttgcttgtggattctctctggatccaaggctcctgtcatctgagaacaagaatttctaagccctgccaaggcatatatatgtgtacttctattggcttttcaactccaaatataaatgctatttgtactgtgtgttatttgggatttttcttttactcttttcacctccaatatagaacaatattgagaaatgttcattgtcgaacatctgaatatctcgggatttttttttccttaagctcactttgaaaaaggaagaaaaatgttttgtatagtgaaccatgctctaactctgtaacactgctactcataattccttggcacggcatctcctgctagaggaaagaactcttctggtgttttgagcttttccaaggaggcagtctgatgtcactggtggcagatgcagtgtatatgtatctgtcttttgtctgcaccatctgtttttctccttacagtctattgttcagatttatgcttctctctttccaggaagtgtgcctttccataagagcacgggccttaggtgataaagggaccgacccaatattctaacacggtttccttctcttccttccctcctagaatcttatggcaagggccttatatgacaatgtcccagagtgtgccgaggaactggcctttcgcaagggagacatcctgaccgtcatagagcagaacacagggggactggaaggatggtggctgtgctcattacacggtcggcaaggcattgtcccaggcaaccgggtgaagcttctgattggtcccatgcaggagactgcctccagtcacgagcagcctgcctctggactgatgcagcagacctttggccaacagaagctctatcaagtgccaaacccacaggctgctccccgagacaccatctaccaagtgccaccttcctaccaaaatcagggaatttaccaagtccccactggccacggcacccaagaacaagaggtatatcaggtgccaccatcagtgcagagaagcattgggggaaccagtgggccccacgtgggtaaaaaggtgagtaaatgactaactaaatttttgttcctacttatttttttttcccattacacttggagcatttggaaatgttcccaaattaataacttgaagctgccaagaagtagatataaccaataccttagctcaggcatcatgtttgcatgattttgccattcatccatcattcagcaaaacttctttgaactaccatgtgctgagtacagttgatttccagccctcctaagttcctgtgtcatcctgggttacatgggttattaaactgtttctctccatctttctcatatatcagcttctaagccttcactctgtgctcagatcgtttcctatcttttctgtttcttcattgagtggaacaaacaccaaatctcgtacaagcctgatgatgcaacaaggatcctcccttggccaaaagctgaatcatgacctcagtggcctggctggacaaggaacccacccaaagtagcgagagtgaggaagctgggagtatgtcatgctgaccaactcgttctatagagttatcagcttagtttgactcatttaaaaatgcacagatactagtggaattggaatgaagccatcctcctgtccttcaagtcattcttataataatgcctgaggcagtgggtgaaaacagtggagcttggatatttaggaaggaattaatttaaaaatacagtgtggggagctctgcaacaccctgtgtaatcccaaatactttagcaatttgaggtcaatagaaattcactaattgaacaatgaatgttgagcatctaatatatttttgatgcttgtgatacagtgattaattaaagataaacaaagccctggtgatgcttacattgccgtgggggagacagaagcaaccaagagaatgctaggtagggacacgtgttatcaggaaaataatgtcagtggactgatcgggggtaacacccacaaccaaggtgatgcttatgtgagcatcacaaaggagggattttctctttcatttgctggcaaattccaatgggtcctacaaggtttggtattaggaatgaacaaatttaactggataagaagatatccctgaattacaagaggaaagatgcaattacataccagaaagagcttgttgacccttagaacactaactatagatgtgtcctgccccaagtaaatctaatatgaagtctgattttacaaacctctgtaaattagggaatatctatttgatgtattagaatcctctgttgaaaaaacaaaggattcctttaaacaatgaaagcactaatgcatttttgggtacatggaaagaggcagcctagagaccctgtggagagcccttagtgtttggctggggaggtgccagggccaccctcctgccctccccatcctggccatgtcaccaccccagaccctgaccctgtgtgggtagattcctttaaacaacaaagcactaatgcatttttaaatcacctttgatataaaaagtatgttttacaaaatacttctcaagagcacgcgtgtggcatgaactgagcgtaggttcgttaagagggattcctcaagggtggtgcacagcttttagacttgtactgcccacgacaacgatgctgcctagaggtgataaactgacttgtggcttttcagtcttccttgtcctaggaattgtagattcaaagggaaaacaaaacctggcttctatctccagaggggaaaaataacagttgaaaggtgtaactataaataagtaacttcactcattcttagtcctggttgtttgcaccttaaaaatagctctcccacatctgagccagtgtgaggcagaaggggaggccagagcaggaaatgcttggctgggaggtggtgggctctaaactttcatcacagttgactttggcaggaaggtagcgtgttttcctttttagacccaaccttttcagctccaagtcagagaagcctaagccttcagacttcttccccttgtatctgctgggactgccctgcaggctttccccatggctccccgtccttccagagggcagagatacggactcatcttcccttggattgatgtcaaagggctggggtgctggggtgaccctcgggcactcacattccatgttttgttttgctttttttaagtctacactcagtagaacattttctgtttagcaaaaggtagatgagtcctgcaggaggaaatcaacttctgaaaatgacctgtgccagcccttccaggagttgcagccagggctgaagagtaggccgtgcctaaagcatcacacagtcagggtctggggtagtgacatggccaggatggggagggcaagagggtggccctggcaccttccctgccaaataccaagggcttctccacagtatcctgatcctgggtctctaggctgcctctctccatgtaccccagagcagtggttcacatccatgggagtgtggttgcctcttcctttcttttcactcccttcctcacttctcttttctatctctctctctctctctctctctctctcccccccatccctccctccttccctctccctcccttcctcccttccttcctttctttcatagtggagatggcttagctgctaggaggtgattttagccttccaggcaattgcaactgctttaaaaaacatctgtcaacatcttcctgggtataggatattctcagtgggtgggaatcattctaatgacttaagcctaggccctaagagataatcccagcacactggggatcaggcgtggctttttcatttttctgagtttgcattttagtagttttactgactggcttaataaagcaatttgctcattttctctttaaatttttcatctgtaagataatatgagcccagaactagatatgcctggtagtttaagctatggtctttaaaagctcttgaataagaaaataaggaggcagtggaatcttattctgagccaccggggtggggtttaaaaatgttaatgggcatagaatcacccagagaggtagggcagtgagtttaaatgcagattcccaggtctttccctcagagaaattaatccagtaggtctggttgggggcccaggaatctgcatcttattgagctccttgcatagttttgtgggtggtggcctaggactagactttgagaaacactgtaaagggaccatgaaggggctgggacatgttccaatctgattatgatttgggactttccatagttcaaaattcccttgatattgctacagactgtgggcttccgaagttttacccagcactgcttttttctactaatgaatcacttaaggaaaaaaaaaaaaaaaaaaaaagacagtgaattctgccttctatcacttcaactttgctctcttggaaactccaacctctacccaccctcttgcatcccctccacactaactgacattcatcacatattaaatcagcatttagagaaagaaatatagtcataaaatccccacccttttaggaaacaagcagacagtgtgagaattgtggagagagtaaggccttcagggttcagctgatgctgggttgtttctccatagctgtatatcctttggtaagttactgaccatctctacgccttggtttcttcatctgtttaatgggaatgatactaactacttcataggctgtcgtgagaattaaacagaagcatacatagaaagtccctggctcagtgcttagcatggcaggggcttaaaagaatgcattcctctcaccttgcgtttcctttctcagagtttatttcctactacatcagccctgttgtgtttcttacgacacaccgaaggtacaagtgctttcttgctaacacatatgctgtgttttttgagtgtgtggctttctctttggttctgcaagaattctgcaaagggtggaaaaaaactctccaagttatctgaaaaccatatacgctgacacctttacttaatttcattggtctttttcactctgtgttttgtgcacagggccgttttatccattaggcgttgtaggcaatatgcccagtgcctataagaatgtttgggagctgaataaaagatcttttgactccaaaatatgaaacacaaaaactgcaaaatagaaattaataaacatttaggtcaatgtctaggaaaccatatcatgtctgccccattaattgttttatttagggcttataactatttcatcatattagaaaacagtatgtaggttatatttttctcactttgcaaagatttctaaatatgcatcatggttgccaagaacccacaggcaatcctaaattaaataagttactcatagtcgaataatttgaaaaactgaattataaaggaagaaaaaaagttttcaatttttaacagcaaaaattctacttaatatgggattatggtttggggtaaatgaaatctacaaatgttcaaaaccaaaagcctaaaaagatctaaaatagtctcatttctctgcttcaaagatcagtgaaattgctacctgagttcatccatttcacagttgatctgcatgggaaattatatgtgcttctctgatttttctttggatgtgtcgcttttattctaactgctggaactatttgttgtacctctttctgaagatcagtttggggctaaattacaagctccatcagcgcaggggccatggctgcctcctgactgctgtaggctgagcacttggtagagcatcagcccacagatagcagcccagtgaaccaatgaacaggtggaagcaagaatcaaagtgttaaatgagagttaacctttaattaactgaaaggtggttctgatcttatcacacatccaccctcacacgctgctgctcgaatcccatggttcagctcattaccatctggtatgagaggtgtcagattatatacagtcatttccctcgctgaaggaccttccagaatgtcactgcctgtgtcctgtaagggtaactattcatatacaatcaatgagcaccttgatgcaaagcatgagtgatgtaaagaagggcttatctgagagtttaacttctgtgcattttgcccaatttagacaagattagttaactcctctgtggtcacctaaggaggaaaactaggctttttttttttttttttgagtcagggtctcgctctgtcacccatgctgaagtgcggtggtgccatctcgggtcactgcaacttctggctcctgggttcaagcgattctcattcctcagcctgcccagtagctgggactataggcatgcgctaccaagcctggctaatttttgtgcttttagtagagacggggttttgccatgttggccaggctggtcttgaactcctggcctcaggtgatatgcccgcttcaggttcccaaagtgctgggataataggcatgagccactgcgcctggcctaactttttctactgaggggcagaacttcctttgcatatgttatgatttacctagaatgcctttcccttctattttccctgtgaactcctatccattctttaaaacccactccaaggttcatccccctcatgaagcttcctctctgcaacccagcagtttctcccttccctatggtcccagaatgtgttgtatattccattgatctcaagggcttcttaaaaatggaatggtctgccattgcaatgtgtgtgatggtctggactggggtaagtattgctttgaggtggcacttggaaaactgaagtaatattcagatttaccaagatcctatgacatcatctttaaggaccattttctaccttccaaaatgggtcacggccaaatgttggcaggaaatgattcaaaggttttagccaggtcttccaggcccattcctgaaaggtaatgtaagaaacagaaatagattagctacaatgtttgtaccttcctagacactgagtcatcacaaattacacacatacacgtacatacacatacacatacacacacacagacacccataagctgttggctaaggaacaaggacttcccttattggaatttgaggcattgtgcaatctggttgcccagagcgacactcagatactagccaactaagtgctatatattagcagcatgacttgtctaacaacaagcaaaaaataggtttagaggaaatgaaagcttccagaaaagttaaattctgacttcacctcactttctcctgttccttgcctatacacacacaaaatacgtacacacccaaaaaatactcctagggcagagggtacttcggtttcctcatttataaatcaataaagtacaactatgttccagaattgtacatttctacataaagataatcctaatgtatatgaattgtttgcctcgatacatgggttttggggctatgcagagaactgtacttgccatctaaaatgtcacccctgaagtttcaagatacattttaatattacacaaaactggaggtcattcagctcttgaagggcaggactttatgagctcactttgaaaatgagaagtatcttttctcagacaagtcacccgagccaaagcaatgagcaaactctaacacccctccttaaaaattaacaaaggtcctttttgtttggccagtgccaaagccttcaaactcagttgcacttcgttctaaattttatagataatgcatatttctaagagtgcattagtaacttcttataaacccacaccaaagcaaacagaggttaaccctcctttttcaatgatttcatgctaaatgactgtgcttatcagagtgaagaggtaagagactgctttaatatgatgtctggctaagtaggagaacactgtgagagagagaaaacagaataaatttatttatttaatttcatgataaacaatattcgttgaacacatctttttttttatttttgagatggagtttcactcttgttgtccaggctggaatgcaatggcgcaatcttggctcactgcaacctccgcctcccaggttcaagcgattctcctgtctccgcctcccaagtagctgggattacaggtgcccaccaccttgcccggctaatttttgtatttttagtagagacggggtttcatcatattggtcaggctggtctcaaactcctgatctcaggtgatctgcccacctcggcctcccaaagtgctgggattacagacatgagccatcacgcccggcctggttgtacaaatctttaaaaaaagacttgcttgactacattgtgcaaaatgcagaactagaaactgtcagcaatcaaaagcacttcattctaactagctgtgccttaaacgttgtcaagataacttctagagagatgtgctgctcctgtttaaagtgtgtcagtgccactcacataggacaatgtgtgttcctcaaaagtcggatgtaggtcgggcgcagtggcgcatgcctgtaattccagcactttggaaggccgaagtgggtagatcacctgaggtcaggagtttgcaaccagtctgactgataccatgaaaccccgtctccactaaatacaaaaaaattagccaggcatggtggtgcatgcctgttaatccgagttacttcggaggctgagacaggagaatcgcttgtacctgggaggcagaggttgcagtgagctgagatcacgccattgcactccagcctgggcaacaagagcaaaactctgtctcaaaaaaaaaaaaaagtaggatgtaactccagtaacatttgaagagtgccaaggagtcctctctttaaagggatcctacagtatatcagttttttgaagcaaagaagcctttagcaatgccacaatcgcctctgatttatttgattaatttttgtaatacttggttttcttaaagcatggcacacttaaaccagttatttattggaatagtttttgttttcaaagtcactaccaattgaatgtgcagccttcactggtgtcattaccccatgcttccgtctcattttgcaagatagtgttagaactaaagtgggggtgaccccaaggcgccttgagccttggctccatgttagggatcccatagaggtactaccacctgatcctctccacagcctcgtgaggtgcacctcacagcatttgctgttcagaggagggaactgaggtctgagaaggaaattcacttgctgaagttaacttgctgcctccagtgagaggcaggattgatatttgagcccacgtctgtctgactccaatgctaatgatttttacatcccggctgaaggatgatattgccaagcccttaaagaagaaggcatatttggacacctcattagcaatttgggcgctaaatcataccctgttggccaggaagaattaaagttgctgcccagggctcccacctcaggtccagggagtagcctcaatactgagggaatctgaattaaggagcttggaagttccccccacctagctgtagtgggcagtttcagagtgggctgatccaggagtcctgaccaggtcagtagggtgatgtctagactccagtaccactgagaatgttgctatgttggctttctctgccacacagaaaagtcttttctttccttttcttttctttctttctttcttttttttttttttttttgagacggaccctccctctgttgaccaggctggagtgcagtggcacaatctcggctcaccacaacctccgcctcctgggttcaagtgattctcctgccttagcctcccgagtagctgggactatgggtgcgcactaccatgcctggctaatttttgtatttttagtagagacaaagtttcactacgttggcaaggctggtctcgaactcctgacctcgtgatctgcccacctcggcctcccaaagtgctgggattataggcgtgagccaccacgcctggcctaagactgtctttccaaatgacttcaaattccttcaaatgggtaacttcatttaaccaggtgggggcacctcccaaaacacaagttacccagctttcaagttgtggctctcatataaggaagtaactttctttgagagtatttacttgtgaaattagaaaagtagtaaatttctggaaaatgtctaacatgtattgctagcgtaggccgcagggcattgagaaacgtataccgctgcactgctggcccagctaaccaagggtctccttcacttctttgtcattaatagcctgagtaactaactccactttagttccctcaactgtgaaatggcaagtgatgctagattatctctaatgatctttgctaaaattttatgatccagatatccttatctgattctttctcagaatcactttaacagtttaataaaaacggcctgacatcaagagtttttttttttttaaagaaaagatactcaagcattgattataaatttcaacttgacccttaagtttttgcaaatctttcctactcttcctttaggatccagcccaccatcccatccagaaccacagtgccctttggaagacagagctatgccaaaagacagcaggagcaggcagggacacaaggaggcagggactggagtgtgctgagccagtgagaatcagtgtttgacagacctgggtcctgtacccaaaaaaacttccagagttccccattaaggagcactctcatccctgttttgttaccaagagctaagacagcacttcatcctggaactcattgttttctgcccattttcccctatgtaatcctcttggattttgcagacgttttaggcctgttgtctctggacacgacaaccaccttcagagctggcaccgagttctgccttgtgagtggtttgccccatcagccactgcatcccttcttccaactaaacctgagcgttctcctctttaggaagaaatgataccaatcggcatttgggtcccaaaattctcatctctcacctcctcttcacagtccctttccccttagggcagtctgtgggcatctctctaaaatccatttcccaatctagatgtagcgctcagagtcctgttgaatttatttggacatcaaaagagccacaatacttgtgcttttttatagttttctttcaaagaacatttcagtccatgagacagaaaaaaaatggctttgctgtatccaacttgtcacaggcttgtatttggcattgttctgagaaagacctcaaccactcgtgaaacccagacgtcatttcccgtcgtgttctttcatgttaaatgcttctagctgctggctggtgcttggtcactctataactaaatattgctttagcactggctacacaaagagcttcctgaaagcagcaggggggacatgctaggggcttaacaataggggcactgtttccattgagcgggtttgctgcccaatgctgtgtcaaatgaaagtgacccaggagcaccactgctccacttctgagcttccacttgtgactttttcctcactggggaaagaagctggctgtgatttagatgtggctagcaaaaggtttagttctggcataaaatcaggcatcagaacgactttgaaagaaagtaattcaccttcagaaatacatggggaaaaaacttcatgagcaccagagaagcatttggaagagttaaccttggacatggcttacgagggtgtatttttaaggccagactcagttttcattatattgttgctatgcaagtaaataaatgagctcactgctacacccaagctgggcagaatgaatttacagagaattaataaatccagggtaggcaacatgtggcttttcttctggtcatagagaagcaactagtactcttggattttaagcaggcaaacctctgtagctttacagtttctgaaaattggatcccagttctaatgggcaggcagtgataatggtaatgtttcttttcctaaggttttctttaaagggaagggatcaaatagttcatttaagacaaagaggttattataaagtctaataaatactgtggtagctctgttaatgcttttcaagggcatttaagtgaaagaagccctttccaacaggcagttttggaaagctaaacactcttgttaattcatgaaacgcaaagagagataatataaataaatcaggggctggggaggaattagagatagacaggaagcagtcaaattttacttcccacatatgccaagaaaagtgcaaatacatggctgttacttagtaaaacctacttttaaattcagagaatcgtaggtactatgaatggtgaggttataaatctgtaatcattacagcacggggacactttttaacttctcatcaattacccattgttatttcctgagcacatcctgggttacctagctcctgactaggcattagggaaggacacaagaagctgactccacacattagtactctactaaattcatgggtaaactccactggtcaataatcaagtcactatctctatattggaggcaaaggattgcacaattcaggctatttgtaatgttgctttggattgtagagacttagactcagaggaatcacgggacatagaatctagaacaggtctgtgtcccatcattctcttaaaagaaaacctttcaagtaatatttcttattatcttttaaaatcttgttaaaatgacaaaatatatatatatttgtaatttttaaaattttgatgcatacaaagatagacatagatagatagataatgtagaagtataaataataataagtcactagagcatgactaactagtgaagttacccagtctcctctccatcccatctctctgtctcccatccactctacccaactcttcctttcaaagagtaggatttttctgcttcgtttttttactgctttgttcttacttagggttgctggaagcacatggaaggagggaagtagtcaaaacaagacagtgttgtgaggggagagatgagaagtcatgataagtaggtgggtgggtgacccacagggctggcatcagaaggaaacatagcaaaacatgatggatatgaggcttgctgtggggagggggattggcctttgtgagtggcagccgtctgctcccttcccgcttcccttagtgctccattgagctagcagcatgcagctgagaagttgaagttctgaccacatggcctctgctgccactgctctgccccatcccaggcacctagccagctctgcattaaggaggtgaagtggatgcccaaggaaagaagtgcccccaaggagacttgctgagaccttgaacaagtgacacaatgtgagcagaacttgtcttgacagaaaatgctttgtctctaggtgttccagagagatgggcaagtgtcctatttcttagtgagagcctctaaacaaaccagcttgtgaacctccactgaaaagatctcatctgatgagcattttaataaagtgtcctgagtttggaggcttgccgtctttctcttggataaatatcttcatctcctagacttggaaaaacacattttctcctggggtttcccattggcgtgtcttgagctgctctggtgataaccgtaataatgccaatactgatacgaacagcagaaaacagtaaccccaagaactctacagatgatcatcaaggaccactgtctcttaccatttgctgctttggtttgaaattctcactgcctcgtagatctcattttgagcactatacattcctaaagattgatttctttctatctgacttaaatttaggaatgattaaatcttcatttctcccatgatttgatcctaaaacattttgaaaggaaacagccttgagatctgtgattactaagacatacataacattcttatcacattagaaagcaagaattgactgttgcttgtcttgttcctgttgtcttgtcccctgaattcctgtttatctttgattgtatgtgggacattgtattttcagtacatttgtagaaataatgtgaagcctataaagatgttctctgcctccagagagaattttgtttccttctgccagcctcagaggcaagcatacatctgattccatgctttgagctgttctggcaaccctgatgtcttcagcctgtgcaagggtgggtttacttccagttaatccttattttggatacagtccttagggttccaacccaaagtcgggggtggtttggggtccctaccttggtgagccctatagtccaatgttcccccttacccaaagaagctgtagaaaacccagcacagcctcccaggcaccagtttcagatcagcaaaaaatagcaaatgcccccaggcttgaaaagcaatctcacctctattaactcttctcccaaagtttgacctagtaattctttattatccttgaactcttgacactattaagaagatcttttcggctgggcgcagtggctcacgcctgtaatcccagcactttcggaggccgaggcgggcggatcacgaggtcaggagatcgagatcgtcctggctaacacggtaaaaccccgtctctactaaaaatacaaaaaattagctgggcacggtggcgggcgcagtgggcgggtgcctgtagtcccagctactcggaaggctgaggcaggagaatggcgtgaactcaggaggcggagcttgcggtgagccgagatctcaccactgcactccagcctgggcgacagagtaagactctgtctcaaaaaaaaaaaaaaaaaaaaaaaaaaaaaaaaaaaaaaaaagatctttcctagcttttcttcatttttttaagttgtcttcagcaagatggttaatctcaattacctagtccatgatttctggaagtcaaagtcaaaaggtaaaatctatatagcctaggtgacaattacaataacaataacaatagctaaggcttattatggctttatgccaggtactttatgcacttgatctcatttaatactcatatagcctatgagggaagtataatttccattttacctatgagaaaacaggcttagaatggaacctttgttctcatagcttgtgagtggtagaaccgggatttagatccagctctgcctgagtccagcttctgtttgtcaattacttccctcttcagacctaattcttccaataagcaacagaaaaagacccagtggggccatggcctctggcacacagcttctcataaacgagcctatcacacatccccagaactaaagcaatcgtatgttccttctgatgttgaggtaaaaagcagggtttgttttggtttcccttttccaaaacactcccccacatgtttctggcttgtggttaagaagaacccaggtgttcatgtcacatacgagctcaactggggaaaaggaaaccatccagcagccctccttgcctgccaatagtggcttcacccaacttggggtgcattcttctacagtttctgatttctcaacttcacctaacattcccttgccttcttggatccctctcttgcccaacactaccatgcatggctgatagggcactgttctgccccatatcccatgggttctacttaacccagagctggcttacctggaaaccaagcttattctgtagtggcagacctcacgccatcttgcttaatagccttcagttttcctttagttgattaatgtatcactcaatagattatgcaagacctactctgctaggcactgtactaggccctgtggtttatatttaaatgaagagggaatgatctctgactttaaaatgctggaagaagagatgagatgcatcaagaccgtcaaaccacaagtgataagtgctgttagagatgtgtggatcactggctcagggagttccaaggatagagacatattatctgtttgggaagggcttggtgggggaaaggcattcagccgggccttgaaaatcaattaaagtttgaatatgaggaaagaaagaagagcatctcagacaaggacatggcatggatgaaggcacagaggtatgggcgtgcagggcatctgtggaaatggacagctcagttctcgccgagggagggagttggtgcagagcctgggggccctgccttcagaagatttccaagaggaaggagggcaaaaatacacagatgaaggcaaagactggcagcccggaggccaaagacgcgtttagtttggccaagacactgtttttaaaatttaagtcaattttgaaaaccaggtttcacataaaattccaaatttctggcttctgaaaacgtgaaagatctggcaacacagggcgcaatgtcttccctctttcggtagaaggagttctgtctccccggcaccaaagcctggcttgtttcttccctacaccctgcttgctcggtccgtgagcatctgagtataggacccttgctctgctatgggtaccagctcagggaacacagatgcagaaacatcagaaagagtcccaagggcctctcatccaacttgctgactgtcatcatgctggttctcagacctccctatctctctctgctatccaaacacagaccctcctctttaaaatttcagcatacatggctttcaaaattatgaggcatgaaagtgtcaaaagcatctccagaaactcatgccgccaggatctgagactcaaaacagtgtggatcaaacaccatcaaagtgtggggtggggcaattcgagtttgtttccttgtttttatgtaagcagattaattagagaactaacataacgccagtctttgggcttttgatcctatcctgccaggacccagacttggagatgtattaaatggattcttccttttctaaatggaagaatctgcccttctcggcttcatagctcttctcaaagtctctgtcttggaccctcccgttagttactgagaatggtatactaacatctgagaaaggttggattcctcctagggacagaaaatccacatatggaaagtgcaaatcctgtgccgggtaatcacgaaagcagttgcagtagcattggatcatagagccccaggagacctcacaattcagcccccttcctggcaacactaatgaattaagaggtcagtttggtaattccaaaggctaagcctttgtaactataaataaatgcacagaatgaaaggaatgtagaaaaaaaaaaaagcaaacagagggggaaaggaaatgaaaaacctgacttgatttcattgagaaaattagtttaaaaatgtcctttgtgtagcaattcctttaatgcctcaccgaacaaatgcctaggagaattcttccaaacttgaggtccccttaaccagaccttggtgtgcgtcttcagctgaaattcagcagttctgggaggtggaatgaggagagatcgttggaaggtttttgtgtacttatgtcacgcagcaagaaaaagccttaatgaaccacaaaactggagactttgtaaggtacagctcagtcagcacttttcctccgaggagaggacacacaattggcatgaaagtgacccaagcaacaggtcgaggcagagaatgtccaaaagtagaagacttcgagctccctgatcttccacacgtcacaatgcggattgctgcactggacttggcatttaaatgggaccagcattttgcatcctggtcccatttaaatgccatttgtggaccaacgtgaattagatggtaatgtcaggaaggctggaatcggtggtggcgggcggggggtgctgtattcggttggcgtttcccccctgtggttttcaccatctgtttctttgaatgcataaacaaggaaaatgactggtttggaatgcagagttttaaaaaaccagaagaccacaggcatcctctaaatgagaaagagagagcaagttggggttctgtgacatttgtcaggaagtgaaatgttaaataccgggaagcattagcgctttctgccagggaagatccacaaaggcaaggaaacactttagcggtgaacctgccttccttttctgaggtcgtgctatgtgtttatatgtcacctagtgctattttcagacaccaacgccacccactctagctcccaatccccttctgggttttttgtttgtttgtttgttttgttttgttttgagacagagtctctctctgtcacccaggctggagtgcagtggaacgatcttggctcactgcaagctcctcctcccaggttcacgccattctcctgcctcagcctcccaagtagctgggactacaggcgcccaccaccacacctggctaattttgtgtatttttagtagagatggggtttcactgtgttagccaggatggtctcgatctcctgacctcgtgatccgcgatccttgccctcccaaagcgctgggattacaagcgtgagccaccacgcccagcctgtttgtttgattgtttgtttgttttttgagacggagtttcactctttttgcctaggctggagtgcagtggcaagatctcagcccactgcaacctccgcctctcgaattcaagtgattctcctgcctcagcctcccgagtagctgggattacaggcacatgtcaccacacccggctaattttatatttttagtaaagacggagtttcaccatgttggccaggctggtctccaactcctgaccttaggtgattctcccgccttggcctcccaaagtgctgggattacaggcatgagccactgcgcccgacatgcccgcttctgttttttaaacgaaagatgaacagttaagctggacttagccttggttttccattagcattattgctaagttggcaaccttggataaaatccactcttggaaacttttaagctgaacaaaagctgcactatgagcaggtgctatgataaagccaagacagcgctctaagtagaggggctgatgaaatagactaaggggagatcttcatttctctcctggacaatagcgagtaaaaaaaaaaaaacaatcatataagggcattaggaacacattgtgtttttctttagcaaagggcatcctgctttgaaaaggaaggtttgctatgcacaatacagtggccattctataaagtggttccgtatgctccatgccaacagacctcaaagcaataggttccttttttaaacccaagacagtggagagacttgatggaaattttgagtgcatactaatctcttttacttcgttgcaagaaacaatcagttgtaagcactagggattaaaagccaaattgaactcaggcattttgagagcgcctggggagaaggcattggtgcatttggctgagttccacccatttcagcataagatggacgtggagcatttttcacatagttctgtaggcagcctgacgccagagttttcacttcagagaaaggataaaagttgacggtttcttagggaacaaccaactcttcctcatttgcaatgtctgttctcctcaaagatgtcgtgggcaacgcttgagatgggcactcaatgactcaaagggtgggggttaggcagaaacaagaccctgggcatttagaagcccttggacgattacatatatttcaaaatgagttaagttcaaataattttttgctggtgcttagcacaccaatgaagtatgtagatatgaaaacaggaggctgctaggtaagattcattttattggcactggttccagatgccagcatcgtgatgaacgctatttgacttctgatatcccttgacgtaggtactgttggggatgttttctttcctggtggaaatgggaaaatgattagagaccagaggtcaggagacctgaattctgttcctggtgcctccctgactcagtattttgtttgtttgatacgttagaatgaaagctcccagaggtttctaaggacagcacagtttgagcattggctttgtaaaagtactctggtgacctgtggaattacagttataatcatcataataatgtccaatgaagaggcatactgaggaaggcatgagaggaattttaagtggctaaactctatttgcattattcattttacaaattgtttcagagccttaaagcaaatttcagtatgcggtactttagatgcaaaatgctcctctaggactttcataagttacacacaagtatcccttaaagtatatttcagaaatatgcttgcagtgcatcaactctatctgatgaactttgagatgatcacaattaagggtgatagagatattttagggattttttttctcattgggattcaagagggatttaaaagtttactaacctgggccagatgcagtggctcacacctgtaatccctgcacttttgggggctgaggtgggtggatcacctgaggtcaggagtttgagaccagccaacatgatgaaaccctgtctctactaaaaatacaaaaaattagctgggcatggtggcgtgcacctgtaatctcaactactcaggaggctgaggcaggaaaatcacttgaacccgggaggcagaggttgctgtaagctgagattgtgccactgtactccagcctggggagcaagagcaaaactccatttcaaaaaaaaaaaaaaaagtttactaacgtggtgtctacttgtctccttcctgttatgtcttctttctttggtttctttctatctttttatgagggagagttgagggatgagtgcttagttaggaggcaaggagattcaaggactcaggcttggaaatttacacctctgtgccttctctcccacaggtgataacccccgtgaggacaggccatggctacgtatacgagtacccatccagataccaaaaggacgtctatgatatccctccttctcataccactcaaggggtgcgtaccagaacatggtcacaagaggagaagcgcttctaagggtagcattccttcagggctgtagagaaaagggagttcacaaattatgcattaatatatgtcatatgaagctttgtttaggttgtctacccagtagccactttagccaatgctatttaaattatgttttctggatttgctttatcaggaaatcctagtatttcacccaagagagcttatgttcttctacaattttgcttcagaaagtagatttttcttttttcttttttttttttttaagacagaatctcactttgttgcccaggctggagtgcagtggctctatctcagctcactgcaacctccacctcccaggctcaagcaactctcctgcccctgcctcagcttcccaagtagctgggactacaggcacacacaccaccatacctgactaatttttgtattttgtagggacaggcttttgccatggtggccaggctggttttgaactcctaactgcaagtggtctgcccacctcggccttccaaagtgctgggattacaggtgtgagccacggcccccagctggaaagtagaaaatttaaactacactttaaagtacagacagcgtagatatttcacataagatctttttttttttttttttttttttttttgagacagagtcttgttctgtcaccaggctgggagtgcagtggcacgatctcagctcactgcaacctctgcctcccgggttcaggcgattctcctgtctcagcctcccaagtagctgggactacaggtgtgcaccaccacacccagctaatttttgtatttttagtagagatggggttttaccatgttggccaggatggtctcgatttcttgaccttgtgatctgcccacctcagcctcccaaagtgctgggattacaggcgtgagccaccgtgcctggccaaaatcatttttatattaaatgtaagttaaaaaccataaaatgtattaaaaaaaaaaaaggcaataaatctgttataacatggagcactgccaaagatcaagcttgtacataacctggtaaataaatccataattaagtgcttaggagcataaaaaatgaccaagtataagacatttccattctgggtaactcacgggtttctcttcaggtatacgacatccctccctcatcagcaaaaggccctgtgttttcagttccagtgggagagataaaacctcaaggggtgtatgacatcccgcctacaaaaggggtaagtgagtgactacaaagcagcaaaaaggagtgtgtgtgtgtgtctgtgtgtcaggggggtgcagggttgggagggtgggtaagtagttcactcgaataaaacaagaaaggcaaacccaaaaggggaaaatgtagtcttggtgagagtaaaggaaggaagcaaaaaaggaaaggcactaattaaagatagctctagggatttcatattgagaagccccaactaaaaaacactaggtggccaataaggataaccctttggcagggaagataattagttcagtttggcaagtactaatatatatttgtagagggtttgttttgttttgttacattttgtttgagacagggtctcgctctgtcacccaggctggagtgcagtggcgcaaccacagctcattgcagtctttacttcccaggctcaagcaatcctcccacctcaggctcccaagtagctgggaccacaggtgcacgccaccatgactggataaattttattttttgtagagacggtgtctccctatgttgcccaggcttgttttgaacatatgggcttaaatgatcctactaccttggcctcccaaagtgctgagattacaggctgagccgcgcctggcctgtagagggtttgacagtttcctcagtgtgtatgtttgagtgaactcgtttgactcactctgttaccctatggggtatgcctgcacaggaggcacagtaatccctactttacagacaaggggactgtgtttcagacgcctatgcagctcattcagcatcacacagctggtgtgataaccgaaaagaccgggggagaactctggtcttactctgcctctcggcacagatcagcagagaaaggatacccaggaggtggtcagaaacacaggactggaaacacagggtgagcaatttagccaggagggttgcacatacgagtctgcaccaagaacgtggggttggacacacttggcaaaggacaagggaagtgacagcagaataacggggaaccttggaagtgcctaacattggggcgggggagggcgaccgaaaaagtgccagcaaataggactgagcacatgggaccacaggttcccatgagccaactcaataaatagcatttcgctttctacttgctttgcaggtatatgccattccgccctctgcttgccgggatgaagcagggcttagggaaaaagactatgacttcccccctcccatgagacaagctggaaggccggacctcagaccggagggggtttatgacattcctccaacctgcaccaagccagcagggaaggaccttcatgtaaaatacaactgtgacattccaggagctgcagaaccggtggctcgaaggcaccagagcctgtccccgaatcacccacccccgcaactcggacagtcagtgggctctcagaacgacgcatatgatgtcccccgaggcgttcagtttcttgagccaccagcagaaaccagtgagaaagcaaacccccaggaaagggatggtgtttatgatgtccctctgcataacccgccagatgctaaaggctctcgggacttggtggatgggatcaaccgattgtctttctccagtacaggcagcacccggagtaacatgtccacgtcttccacctcctccaaggagtcctcactgtcagcctccccagctcaggacaaaaggctcttcctggatccagacacagctattgagagacttcagcggctccagcaggcccttgagatgggtgtctccagcctaatggcactggtcactaccgactggcggtgttacggatatatggaaagacacatcaatgaaatacgcacagcagtggacaaggtggagctgttcctgaaggagtacctccactttgtcaagggagctgttgcaaatgctgcctgcctcccggaactcatcctccacaacaagatgaagcgggagctgcaacgagtcgaagactcccaccagatcctgagtcaaaccagccatgacttaaatgagtgcagctggtccctgaatatcttggccatcaacaagccccagaacaagtgtgacgatctggaccggtttgtgatggtggcaaagacggtgcccgatgacgccaagcagctcaccacaaccatcaacaccaacgcagaggccctcttcagacccggccctggcagcttgcatctgaagaatgggccggagagcatcatgaactcaacggagtacccacacggtggctcccagggacagctgctgcatcctggtgaccacaaggcccaggcccacaacaaggcactgcccccaggcctgagcaaggagcaggcccctgactgtagcagcagtgatggttctgagaggagctggatggatgactacgattacgtccacctacaggtaaaacagcggaactcataaaacacctacactcactcacatgcagggagcctgagaaagatgcctataaggatgtcgggttggactgccaaaggagagaacataattaatgttaatctacatggttcacaaattggagggagtgtcgtagagtagtaagaacgctgggctgagagtcctgagtactcactcagatctagccctttctctgacgtttactgtgtgaccaacttattcaacctccttgggccttaatttcctcatttgcaaaatgaatggggtaaggggttggattagatcccgttgatatacctcaggtaagaggagactcaccaagtaggataataggccctctaataataataccagctccacttctatttgtgttttatgtatagttccatgcaatattttatttgaaaaaaaagttttcgtcattaagaaaaagaatagaagacctttgcaccagagaatttctaaggcccctgctagccctactctgtgtatgtgtgtgtataattgctttaaaacttagccccatctcagacttacctagaggaccactgggcattagctagttgtcctaggagcttaatctgtgtatgggacattggatagtcacagttggcctcctacaattgggaattctaccaagctccaagttgacctgggattccgacagctttcccttccactttgagggattaaaacattctactggctgggcgcagtggctcacgcctgtaatcccagcactttgggaggctgaagcaggtggatcacaaggtcaggagttcaagaccagcctggccaatatggtgaaaccccatctctactaaaagtacgaaaattagccaggcatggtgatgcacgcctgtagtcccagctacttgggaggccgaggcagaagaatcacttgaacctgggaggcggaggttgcagtgagctaagatcgtgccactggactccagcctgggcgacagagcgagactctgtctcagaaaaaaaaaaaaaaaaatctaccaagatccattgtttaggactaggcttactatcttattctgccattcttttaatttgactgagagtcacagattatactgagaactacgtaactattatgccaaattccctcaagcgcaagaaagtgtggcaaggagaactgagccccacctgatgctgaggaaggaagtggagagagagaggatggaggcattgaacattcatcttactggttgtctgaccctgcacagtgggaaatactgccttggagcagaaatctatagatgatttgagggaactagaagtgagaggtggaccacatttagacctgcatttgggggtttacaggttcacatataatctatgagaaaagaacccagagactataaaaagaacatttatatatgagatttgaagggaatcatgagtagctctccgaaaattttaaggtgccccagaaagctggcaccctatatggcaatgggctttatttttctgccacccctgtcgtctagggttcacagtgcctcactgggcatttgagatgttgccaaggcagtggaaaataaagagtatttactcatccgtcaatgaaattgttagcataagtgaatcacagtgatgacataatatgttctttatgttgaaaattaacagggtaaggaggagtttgagaggcaacagaaagagctattggaaaaagagaatatcatgaaacagaacaagatgcagctggaacatcatcaggtaagttcaatcagagcaaaaactgcttggcattggaaagatttcccacctagcactaaggaaaggtatcacttcaagagattatgattttgattcttccagctcactggcaggaatcagctccaaagcacggaatggggtttaaaagcaaagagaaggtttatgaccttgttagttcaactgggtgtacctgggttccatctaaacggcaatttttttaaaggctaaacctgcatatctaacatatgaggactatttgggttaaggcatttggtctcaagaaacaagacccattcaagctagcctaagcaagcaggtttatagtaaagccacagtaggggaattcagtaacagaaagtgaagatagagccaggtctggggagaactagaactgtaaattatctctccttcttgtagttcctttgcttctttctatcaatctacttcactctcccctattttctggttttctctaattatctactcatttggctcccctgtaactttgcagaacccataaatggccactcagaacttctatagatggcttttcatctcggcttcctcttccgatggttagctcccttctcttgttcatcagattcccaagaaagagtctgattgggccacgttgattgggccatttctctttctctctctctctctctctttctgtctctacctcgctatttgtctctctttcgccagcaacacaagcctatggtttgcctggccttggtccaatctaaaggtaggagagcagaattcaatgttttcaacatatatccaggcctatctactgaggactttgggcagggcatgttcattcaaaagctgggtatgagtaggggagataatgacgactattgctagaacaagggcatacaaataaagagagatggattgaggatttatttacaagccttttaagatgaaatgaagtgaaatggcatgtaatgacatgaaatggcatgctatatttaggaaatctgagttctaatcctttctggccaaccaactatgtcaagtcaggtaacctccccgagcttcagttacttccctataaaatgggaaagtaccccccccatctaatgacatgatatattgatgaacatatttgcataaagcctaagatatataaaatataatccattatgattaaataccttggaatatcaccttgtacctatttatgtttgccttggcatctggcaaggtaagactgcagggctttggggaacttgtagaaaccatagcaatcgctaagaagaaaacagattctagaaaagtaaagctgttgaaggctgggcacggtggctcacacctgtaatcccagcactttgggaggccgagacgggcggatcatgaggtcaggagatcgagaccatcctggctaacacaatgaaaccccgtctcactaaaaatacaaaaaattagccaggcatggtggcgggcgcctgtagtcccagctacttgggaggctgaggcaggagaatggtgtgaacctgggaggcggagcttgcagtgagccgagatcgtgccactgcactccagcctgggtgacagagcaagactctgtctcaaaaaaaaagaaaagtaaagtaaagctggctgtgcatctctcagagaagctggggaagctgggtgaggtgatcactgctccagctcatccctacgtccaggtgggagattaactgagtctgaagctcaggtcacagatagtccttatctgcagaagagaggtctctcttgagtcttagtggaatccctagaaattattataattgcaatttaaataatacaccatttggtagcaatgaggaaagaaggaagaaagccagcacctgatgcatctgactctgggtaaaacccccttcttttaacagctctgggggactaaatattatgatgcacaattcccattcagactgccttagaaactttttttccttaagtgctcatatatttatatgcattaatcttcctgtagtgctggatcataacatgtctatcaatcttgacagaaagagtaggataaacagaaaggggtcatgaatggtcatttcatctgagcatcctgagatagtcgaggctttctccgagaaggagcaaactgtcagtgacttacttgacaaggaggtcactacatttggttttcccttgccacccctcaacattaataaacatttacatagagcctactacataccaaactattataagcactttataaacgttaactcatttaacctccataaaggtgtaggtaacagggctgcggtttaaacactatgctaccttctagccagagggtacaagtgaccagtagtccaatcatagaaggtctgagcttgaggatcatctttcccaacgtctacattttacaatttaggaaagcaaggcagcttgacccaggctttacagctcacatgcatctgacagttactagcgactaaaatccctgtcttttaactccaaggcctagtgaatttccattgcaacacactcccttgctctaatgagatctgctttcgtcttccttgcagctgagccagttccagctgttggaacaagagattacaaagcccgtggagaatgacatctcgaagtggaagccctctcagagcctacccaccacaaacagtggcgtgagtgctcaggatcggcagttgctgtgcttctactatgaccaatgtgagacccatttcatttcccttctcaacgccattgacgcactcttcagttgtgtcagctcagcccagcccccgcgaatcttcgtggcacacagcaagtttgtcatcctcagtgcacacaaactggtgttcattggagacacgctgacacggcaggtgactgcccaggacattcgcaacaaagtcatgaactccagcaaccagctctgcgagcagctcaagaccatagtcatggcaaccaagatggccgccctccattaccccagcaccacggccctgcaggaaatggtgcaccaagtgacagacctttctagaaatgcccagctgttcaagcgctctttgctggagatggcaacgttctgagaagaaaaaaaagaggaaggggactgcgttaacggttactaaggaaaactggaaatactgtctggtttttgtaaatgttatctatttttgtagatattttatataaaaatgaaatattttaacattttatgggtcagacaactttcagaaattcagggagctggagagggaaatctttttttttccccctgagtggttcttatgtatacatagaagtatctgagacataaactgtacagaaaacttgtccacgtgcttttgtatgcccatgtattcatgtttgtttgtagatgtttgtctgatgcatttcattaaaaaaaaaaccatgaattacgaagcaccttagtaagcaccttctaatgctgcattttttttgttgttgttaaaaacataccagctggttataatattgttctccacgtccttgtgatgattctgagcctggcactcccaaatctgggaagcatagtttatttgcaagtgttcaccttccaaatcatgaggcatagcatgacttattcttgttttgaaaactcttttcaaaactgaccatcttaaacacatgatggccaagtgcccaaaagccctcttgcggagcaaatttcagaatatatatgtggatccaagctctgatagttcaggtgctggagggaagagagacctgtgtgtttagaggccaggaccacagttaggattgggttgtttcaatactgagagacagctacaataaaaggagagcaattgcctccctggggctgttcaatcttctgcatttgtgagtggttcagtcatgaggttttccaaaagatgtttttagagttgtaaaaaccatatttgcagcaaagatttacaaaggcgtatcagactatgattgttcaccaaaataggggaatggtttgatccgccagttgcaagtagaggcctttctgactcttaatattcactttggtgctactacccccattacctgagggaaactggccaggtccttgatcatggaactatagagctaccaggacatatcctgctctctaagggaatttattgctatcttgcaccttctttaaaactcacatatgcagacctgacactcaagagtggctagctacacagagtccatctaatttttgcaacttcctgtggccagtgtgtataaccccttccactatctcacagatagtcacagcgtccattccatagtctgtctcctcacatctgttagtattgacacagcacagacaccacaagccatcaggttcttcatggggcaggtgaaatacttctaccccatgggtaaatgtattcacatattaccaagagaagaagcacattatctatgatcttttggcccagttcttatttagcatttttattccagcctacttggaaacatgtttttatttgcaatatatgcctgactgaattaagcttgcttgttttaaacaaccaaatcattggaacagaaaaggatttaaaaaacaagaatgcatgatctcagcgtgattaaaaaaaaatcagtggaaataaatgatcatagaaggtgcttttcaaaacaactgctattataattctcaaagtcctactctgccaaaagaagattaaaagtcatacattacattacaaggaaatgttcatgtgggaagagggttgctgaaaatcaacaacgcttgaagttaaaaagtgtgtctttgtagatttcattgtataatgtgtatttcttaggagatggctgacttgattgatctacgctaagtggagacatttcacatttttaaaaccaaatgttcaatctgtattactctttgccgtcttgtatgtagaggctatttttaaatcattaaatttttagatctctgttttcatagccactgggttttctttttcatactcctctgtcacagaattaaatattggcttactttggtactcctaatataaaaagttaaattatgattattttagcaatgctataggtctggatttttttaggaaaattgagggtttggttttttctgtatatgtgtcacttccaagtgtatttgcattcaaagaaaattctagaatctgtgaacattatcaaattcaaatatctggaacaagacttgtgttcaccaaaaaacccatacactcagtaacatataggatgatttgttttcataatatggatgttaccagtcatgtggtttttagaatcaaagaaaatttttctatttgttttggaatagtcataaagaaataatttaaagcaaactatatttaatgaaaataagagatttgtaatcatgtaattatcatttttaatggttggcccactcttttattcaggtatcccactgagatttacagacaaattatttaaatgtatcatgtaccattttgcccacacatataagcattaacttatttttgacaaaatgtcaaggcacttcaaggagggaatgaaaactcttccgaaaaaaaaagtggtgcgggaacaactagatctatgaaataaaatgaatgtgtaccttacgttctacccaaagattaacccaaatggatcatagacctaaatgtaaaacttaaaactcctagaagaaaacacaggagaaaatctttgttatcttaggtagacaaaatttccatatttgaaacactttaaaaacttaactcagaaaaaaaatgatttattggactttgtcaacattaaaaactcttattcttctgaggataccattaaaaaaccaaaagtcaagccagaaaatgggagaaaatacatcacatctatcagccaaggacttacatcagacttaggagacaaaaaactaaatttttttaactcggcaaaaatttggagaagaaacttcataaaagaagacttatgtaggtaaatggaaaaagtaaataaacaccacaccaaatagaatcactaaaattaaaaagacaaatgataccctgtgttggtgcaagaaaggggagcaaacattgctcttgtatatcactggtaagaatgttaaacagtacaaacactatggaaaacagattggcgatttcctaaaaagttaaacctatgtctaccctatgacctagcaatttctcttctaggtatttacccagaagaaataaaagcatatgtccatacaaagacttacataaaaatatttatagcagctctatttgtaatagcaaaagctagaaagaacccagatgtttgttcatctatatgaatgaataaaatcactgcggtatatccacacaatggaatactacacagaaatcaaaaggaaaaatattgcaacaaatagccaacatgaatgaacttcaaaatcattatgacgcaaaaaagaagcaagacaaaaagaatacatatgctatgtttccatttatacaaaattttagaaaattcaaactaacctatagggacagaaagcacataagtggttgcctagagagaaatggtggaaggaatggattccaaagaagtccatggaaacttgggaatgaaagcagtgtccattgtcttgattgtggtgatggtttcacagatgtatgcatgccaaacctcttcagattgtacactttaaatatgtacagtttattctttgttaattttttcaaagtaaatggtctaggcactcccattaaaagttagagattctcagcctggattttaaaatgcaagaccaactatatgctatttaaaagatgctcgcttgaaataaaaatacacagataaattaaaaacaaggggatagaaagagatgtaccatgtgcattctatttttttcttaaaaagccggagcagctatattattaacagacagagtagaattcagaacaagggcaaagagaggcatttcatgataaagggattaattcataaaaaagacaaaacattcctaaatgtgtatgtaccaatcacgaagtctcaaaatacatgaagctgaaactgatataactgaaaggacaaatagaaaatctataatgataggtagagatttcaatacttgtctctcagtaattaatagaacaagcaaacaaaacaaaataaaaccagtaataattggtaagaatggaactctcttccgttgctgataggagtgtaaaatggtacaatcgttttagaaaatggtttggtaacctctaataaagttaaacatatgctttcaacataacccagcaatcccaatcatagatatttaccccccaaaaaatgaaaacatatatccatatgaaaagctaatttctttattcataattgtgccaaatagaaacaacccaaatgtcatcaacaggtgagtagataagtaaattgtggtctatatatacaatggaatactattgagcaatgaaaaggagtgaacaaattagacatgtaacaacatgagcagatcaacctcagaaacatgctgaatgaaagccaggcaaataaagaggaattctgtatgaagctccagaaggcaggaatctaatctgtagtgacaaaaattagacctgtgatttcctaaggccaggggtaggggttggcgattatttgggaaagagcacgaaggagccttttggtaggatggatatgttttatatcatcactgtccaacactgcagaactttctgcaatggtaaaaatgtcttccatttgcactgtctaatatgctgaataacagtcacatatggctactgaggatttgaaacatacctagtacaactgaggacgtttttcattttaattttagctcattagacttgaaatagccacatgtgtttagtggctattctactggacagcacggtatctatatcttgattgttgcagtaattgtgtgcatggataaatttgtcaaaacttattataaaatacactaaaaataggtgcattttattgtatataagccttacctgaataaagttgattttaaaaagaggcaaagcatttcccaactaactctaatgctccaatttttcaagtcaatattatcagcagttcacagaaacattggcggttccatagaaagagaacaaaccggaaagccaagcttctaaatccatagcaggctactgctttagagtcaatgatactgagctcgttcatgtcccaccaggaagacaaatgtggcttcctaaccctgagttggtaaaagcctgtctgggttttagatgcttccccataaaccacatctacattctttatatttttgagggattatgacaaaagaaatattgtcattcaccaaagaacataaaaaacaacaaggattcacttattcattgaacatttcctgcctggccggccagagcaggcaaatctgccctgcgtatcaatagaaccccagctgtctccgccagaggagctggccccacctcacagccagtgtctctgtgtgctcagcaacgtgctgtggaccaaagggacaggagaagaagggagacgtggattctgcctccctttgtttgaaataaaaagtaaacatgtcctttaaacaattgaaggcagattatagacaaatgtttaagtaatttacaggcaaagactttaaagtagagagaatgagaaaaatcaaagtgatctagctggtgagaaagagctttttgccaagggtggggttgaagaggttgatcataaagaaaggtgtctttgtctgtactgtgctgctatcacagaataccaaacactgggtaatgtataaagaacagaaatgtatttctcacagttctggaacctgagaagttcaaggttgagggctcacatccagtgagggccttcttgctgcatcatcccatgatggaaggtagaaaggcaagagagcatgagagagcaagggattgaaccggcagcctcaagcccaaaattttataatccccattaaccatgcatgagggtggagctctccatacttcccattaggccccacctccaaatgctgttgcaagggggattacgtttccaacacacgctttttgggagatacattcagactataccagaaaggctaactggacggcacaggaaagcctggcaaaggctggtggccaggacggcgtgctgcagagatgcagtggagagtttaggtgatgaggggctctctagaatcacactgcagcgactttggctttgcattttgtaccttcagagaattcattcagaatagacataccaaatattcgttggcctaatgaaactgggcattagatggcatcatatcctttcaaagaagagaaaggagagaaagcaggatggggagcctggatgagacaaagatgatacagatagtgaagactatgaaaggataaaagggaggggatggagagcagaggagaggaaagagcagaggagagagacagagagaagaagcaagaaagaccctgacacagggtgattagaaaagagtcagtgaaacaagtaacagactgcaagagatacacagtatatgctaaagcaaaatgctatgttcttaggtcatctaggttctcaagatatagtcagaaacaaacagtcagtacatattacttgaaaacagggctgcattgtcattttgaaaaatacaacatcgtatatcagtctcttggagagacttaatactcgtgagcatgtaaaaggctctaggccgggtttggtggctcacgcctgtaatcccagcactttgggaggctgaggtgggtggatcacctgaggtcaggagttcaagaccagcctggccaacatggcaaaacctcatatctactaaaaatacaaaaattagccaggcttggtggcgggcgcctgtaattccggctactcggaagactgagacaggagaatcacttgaacccgggaggcggaagttgcagtgagctgagatcacgccactgcattccagcctgggcaacagagtgagactctgtctcaaaaaaaaaaaaaagaaaaagaaaaaaaaagggctccaagaagtcttacaatataaaaacttgccttgtctactacttcacaaaattattttgaccctaaaagctgttttctctcttaacatttataaaaacctggtctaggatattcagatagttttcgttttcctcccccaacaaaagggtgaggcccgccaatgtgactcagctcacagaatcattattgttctcgactacattcatcaaggtcaagtcctctgtctttaacagtcttttagaaccaataggctacggggcagcacctgttctgatctttagcacccatactcaccctgaatctgtacaaagcttctaaataagtatgtgaagatactttattatttcccccattcatttctgattatctgaatatttgtcttagaataaacatggaggaaacaaaccaataattaatttggatgagctttcccaaatcatcaactccttgggaccaggatttttttgtagaaatgctttggaaagcccaattttatatgaagaattttaaaataaaaatatctctcagaagagaaccaaaaaagtgaaagaaaaataaaatacatacaaatgggaagataaatagagtcagagacacattgtctggcccatctagaaatttaatctaagaagaggtgcttgatgcatggaaaggcttttgaaggtggcaagaatgataaggacaaatacatactttgaaaaaatatgatttaagtggttaaaccctggctatgttaaggcataagatcaatagatgtgctagtgtataaatgacatcaatcgccaccatttattggtgtctagtttgagtcagcagacactacatcaagcacattatctttgccctcatagcaaacctcttatagatagttcttattttcactttacagaggaggaggctgaagctagaagggaattaaacaacttggcccaagtttcaaggctggaaaatggaagtagccctttccctataccacacaagcactctgggagctgcaggtagaaaagtgtacaaaggatattctctgggtaattgcattacagtcatgacctgagcagggtttagctggtagctttaccccaaatcaggtaagaggcatggacaaaagatattcgcgtgcaattttaaatattatgacatttgtatgtgattttgaatatggtcctctttgcaattaattttcctaatagtaaaatactcacattatttattaattcatataactagtctctttctccccacaaagactaaggtgcatacaatattttcgttttagaagaagacaactgaataaaaagaaaataaaggtaaaaaaaataagacgtagctgttaacatagttcatacacaaaatgcatgttgcaaaggcctgtgaactttggccttgagttttctggacagcccatgagataaagaaaatgagatccggccgggtgcggtggctcacgcctgtaatcccaacactttgggaggccaaggtgggcagatcacctgaggtcaggagttcacgaccagactggccaacatggtgaaaccccatctctactaaaaaatacaaaaattagctgggcgtggtggtgggagcctgtaatcccagctactctcgggaggctgaggcaggagaattgcttgaacctgggaggcggaggttgtagtaagccaagatcacgccactgcactccagcctgggcgactaagcaaggctccatctcaaaaaagaaaaagaaaaagaaagaaagaaggaaggaaggaaggaaaatgaaatccgttatatgatttataagtatccataaaatgaaatcaagcccactgtttcccatactgggacctcagagagatttctcaccagggtcttcataacgggttatataacacagtaaatcatacagcatcatgacatatcatctttacagtaaatatagtgagaccacagcttgtttctagtacagcatcacttatgtgctattattctttctctaaagtctaacactttaaagtatatgatgtggcttttaaggcccatcatgatctaaccccaaatggctctttcactctcatttcctactatatcctttcatgaattctcctgaacagcctctctgggccactcagtcattcctgagtatctttgatttttctgttctttcatcctatttactcattgttattcaccttcatctctgacattcaaaatacaagtcaggaaaggcagagagtaagttatacacacctggtgggtggtatattttggacaggctttattagcctctcctccaagtttgcactactatcaatacaacttcaatcattcatttgttctgcaaatatttattgaacacctattatgtacctggcactgagggtacaagggaagcaataaaaatttaatacatcccttgctttatgaaacttccaatctggtgagtgaaaaaaaaatgttggttttgtcaaaaaagaaaagaaaagcgcaactctatgaaacactatgaagtcaagatacatagctccataagagggaatattggcgcatcctaaagtagtgtggggagcagggatggctttcttctggaaaagatgtttgatgtgagatctgatgagtgaatggactttatctaagcaaagctgggaaaggacattccaagcagaagtaggagtaaggacaaaggccctgagaaccccaggatcctgctgtgttctaggaccaggaagagtccagtgtgcctggcgcacagcagagaagtgggagaatggtgagaaatgaggctgaagaagtggcaggtacctggccatgcaaggccttcaaggccacattaaatgattgaaagattatttatttatttatttatttatttatttattttgagacaaaagctctgtcacccaggctggagtgcagtggtgtgatcttggctcactgcaacctccacctcccaggctcaagtgattctcctgcctcagcctcccgagtagctgcgaccacaggcctacaccaccacgcccggctaatttttctgtttttagtagagatggggtttcaccatgttggccaggctggtcttgaactcctgaccttgtgatccgccatctcagcctcccaaagtgctgggattacaggcgtgagccagcacgcctggccctatttttattctttaagagacaagtcttgctctattgcccaggctgaagtgcaatggcaagaccctagttcacagcagcctgaactcctgggctcaagcaatcctcccatctcagcctcccaagtagctaggattacaggtgtatgacactatgcccagctaattttttttttttttttttttttttttggagagacagatatctgtgttgcccaggcttgtctcaaactcctagctttgagagatcctccaccctcagcctcccaaaatgttgggcttataagtgtgagccactgcacctggcctaattaaagaattttaaacagctatatgacaccatcatatttttgctctgaaaatagctccctggctgcagtgtggagagtggtgaagaggggccatgtggatcctggcagttcagttaggagggcattgaatcagttctaggagaagcagtgaagatacgttggattagaatggaggagtggagatggggagatgcagataggttccagggacgtgggagggcaagtccgtaggaaaagtgatgaacagcacctggtgcatgatgatgaggagcccggggaagggcttcttggctgggcatctggatggatgtggatccattcatgagctaggatgtgccaacgctatttccatctccatggaaccagcctggggtgcaatccacacttactgcactccccctccctggcactgagcaaagcgcatgagggaggagcaacattgggcaagaacctccagactcttatctggaggaggctaagttaagcccactttacttcctcctagggcgtggatgtgtaggcacatgcttattttatggttgggaaaaaagaaggaaaagaaaagagaaaaacagccttgaaatagttctaggccaggcacggtggctcacgcctataatcccagcactttgggaggccaaggcggggggatcatgaggtcaggagttcaagaccagcctggctaacatagtgaaatctgtctctactaaaaatacaaaaattagccaggcatggtggcgggagcttgtagtcccagctactcaggaggctgaggcaggaggatcgcttgaacctgggagacgaaggttgcagtgagccaagatcgcaccactgcactccagcctgggcaacagagtgagactcagaaaaaaaaaaaaaaaaaaaaaaggaacgaacgaacgaaggaaagaagaaaagaaagaaaaaaagagagaaagaaaagaaagaaagaaagaaagaaaaaggaaaagaaagaaggaaggaaagaaacaaagaaagaaagaaaaggttttaatgagtagaggccagcctgcagggggagaaacctctacaagggcaactgaaaagcttcagcacactgactgaccttcatctcagactcaactattaccaatctctaaagcaaattcctctgcagcctgggagggggcattgaggggcaggaaccaccaccatacctcacagcatgatttaagtcatctcccaacaactataattaagaaaactgagttaacagaaagggcaccttactttgtctcctaactgtcaattttccagagagacaagagtcagcagggaatgatgttaaatgaaaacatacccctaattttctctggcctgcctggcagtcaggagaccaccagacaccagacattgtctatcccccacacagcccctcacccagtcatcatccaagcgcagtttatgagccttctttatgacccaggcagcctaacgggtttttttttcagaaccatctgggccctttgtgacttaaattcctattaaagaagttgaagtctccaagaacaatggttgtgaatgagacattttaaacagtggtcagagaagtaacttatttcagccttgcccaatgttaaaatatcaagacaaagggctggtgtgggtgtatttttagaatgatgtaaagatgtaaatggacaacttagtgaaggctgtccttgcccttgggcaattatttctacctctctgtctagacatccagtctacactggaaaggacctacgatttgacaaaagaaggttttggataaataatgggtcccccaatcctgtttgcaaaagaaaaatcaacaagcaagaaaacaaaagatctgcaaagagcactgagaaggggacatgtaggacctgtatgcagaggagagcgctctagagaaaagttactaggtcctctgccccttgcaaaggggagtgaacttgtgggtgtttacacgtaccaggtggcttcccgttgaaagggggcccccagaaatcctttagagcgctgacagtgcaaatagctagcacctattcagctcaggcaacaaggtctttgggcaccacctaggatgttttgaagcccctcacgcagcgaccagcattttgcagatctaaggctgtgttcgcctcgcacggcgcccccttgtggtctgatgggaaatgaaaggtggaggacaattggtttttacaaccgatttcatctctaacgtgcctgggaaataggaatgctagtgcagacctgattcgctgttgtgaaaataagcattcaaaataattcttaagcgctccacaaccacgtagcagtacgattacttccttgctgcacatctccctagcctcttgtatatttcagacacagggcatcttggaccatgagttcatctttcccatctcactacctaactaacacaaagagttcaattcatgtttgttgactggctaactgaacccaaaggaatgaatccacctccaagctcctccacccccatcccacattggaggatcctttttttttttttttaaacggagtctgcctcagacactcaagactggactgcagtggagctgtgtccggaattggtgggttcttggtctcactgacttcaaaaatgaagccgcggatcctcgcggtgagtgttacagttcttaaaggcagcgtgtctggaatttgttccttctgatgttcggatgtgttcagagcttcttccctctggtggggtttgtggtctcactggcgcatgagtgaagctgtggaccttcgcagtgagtgttacagctcttaaggctgcccgtctggagttgctcgttcctcccagtaggttcgtggtcttgctggtttcaggagtgaagctgcagaccttcacagtgagtgttatagctcataaaggcagtgtggacccaaagactgagcagtagcaaacttcactgcaaaaagcaaaagaacaaagcttccacagcgtggaaagacacccgtacagaaaagtacccgagcgggttaccactgctggtgcaggcagcctgcttttattctcttatctggccacacccacatcctgctgattggtccattttacagagagccgagtggtctgttttgacagggcgctgattggtgcgtttacaatccctgagctagacacaaaggttctccacctccccactagattagctagatacagagtgtggacacaaaggttctccaagtccccacaagagtagctagatacagagtgccgattggtgtatttacaatcccttagctagacataaaggttctccaagtcccgcccagactcaggagcccagctggcgtcacccagtggatcccgcacggggccgcaggtggagctacctgccagtcccgtgcggtgtgcgcgcactcctcagcccttgggtggtcgatgggactgggcgccgtggagcaggggcgccgctcgtcggggaggctcggccgcacaggagctcacgggcgtgggggagaggctcaggcatggcaggctgcaggtcccgagccctgccccgcagggaggcagctaaggcccggcgagaaatcgagaacagcgccggtgggccagcactgctgggggacccagcacaccctccgcagccgctggcccgggtgctgagcccctcattgcccggggctggcaggccgctccgagtgcggggcccaccgagcccacacccacccggaactcacgctggcccgcaagcaccgcgcgcagccccggttcccgcccgcccctctccctccacacctccctgcaagctaagggagccggctcccgcctcggctagcccaggaaggggctcccacagtgcagcggtgggctgaagggctcctcgagtgccgccgaagtgggcgccaaggccgaggaggtgctgagagtgagcgagggctgtgagggctgccagcaggctgtcacctctcagcgccatctcggctcaccgcaacttgtgcctcctcactgctttagcctcccgagtagcttggattacaggctcctgccaccacgtccccctgatttttgtatttttagtagagacggggtttcaccatgttggccaggctggtcttgaactcctgacctcaagtgatccgcctgcctcggcctcccaaagtgctggcattacaggcgtgagccaccacgcctggcttggaggagccctttaaaggaaaaagaacattgcaggatccttaacaataactaaaaataaaattccttcaaaaggcaggatgtagtgcccatgagttactgttgtattgtttcccctttatataacctttttccacaattactttagtaactttggttgttctcgttgaatgtctatgtgatttctctgctgtaagctcctgaggttggatttgcgctgcacagcagatccctacaagtccccttctcagtgttccttgaagatcttttgttttattgcttgtttcatagttccccgggtgatctcagctgcaatatactcctttgcaaagttgctgtaaccaggccaaaacctgtccctagatttagaatccatggtttgggatgactgtgacgttaatcaccccatgctctctgtcaacatgacccaacactttcagtacatcccatcctcatcctcagatcctcatcctcagatcttcagcacttacagcatctataggcctttcaaccattgcaccagcaagcaaaacaacaattatagagaaaatggacagaaggcgaaacaaaagaaaagttttatgatcaatgagcaaattataggcaaacgtattcatatttaagcatcaggggatatttcatttgtcctgagtaattgatatgctttttctcatggaaacaagatttttgcaattaactgatcatgttttcctttactgtaaaggtcagagacaaatttgatgcccaatatcagtaactagtaacttatgggtccatctgggttttacattttctctccataccatcttttctacctaaattattcctcaaaattattcctcatcctctcttttttagctactatcttttttttttttttttcctgagatggagtctcactctgtcgcccagactggagtacagtggcacgatcttggctcactgcaacctctgcctccagggttcaagcgattctcttgcctcagcttcccaagtagctgggactacaggtgcacaccaccacacccagctaatttttaaaaaaatatttttggtagagacagggtttcactatgttggccaggctggtctcaaacttctgacctcaagtgatccgcccacctcagcctcccaaagtgctgggattacaggcatgagtcactgcgcccagcctttagctactatctttgattacatgtgattagccacatgtgagagctctgatgctctctgaatgtataaagaagcatgggctctgctcctccgtgtgctgagccaatatgttccacagtagaaagggaggggctccagaactgcggctcatagcaagttttcttccatatacatccaccaccagggtgccaggtggaacaacttcatctgttggcaatttcacaccctaaatcaatctttccttgcaacttccccctgcctctggtgtgaaactggcccagacttccatctctgccattatcaatctcccctccagaaaccaatgcccttcccagaaatccggcatcagacatgtttttatatgtttgaccctcaaagacagaagtcagggttaggattccatttctttttcattcaggaggcacctctgccactttgtaatatcatcaatgcaagcttgacttattggtgcctgaaaacatccaagcccgaaatactctacctggagcctggtccaggccctacccaaagccctgcaacatccatctgtaagcttcatcactgaaaggcgcacagactttccagctgcaggtggaggaagtgcaccctccactctcctcacgttcccctagaagggaagggcttctctccatcctcacacacacacactgctccttatgaccgtgcctccacctggcaagaaacatatttcaggctccccacaggctgcttattagatgcaaaggaaaactagtaatttacaccatggggaaatcagtcaacgccctggaggggaggaatgatcaaaatcaacaccgccaatgaggtgagaaggacatcagtgtctccagaaatgagaccttttttgagacggatgcaggatcacttacgcagtatttcattttctcgcctcatcgtgaggaaacatcagacaaacacaatgaagaacatttgttctgtctttaaaaggcacagggaaacttattctgctgcctgtcattgttatgaaagataaaggaaggctgtgggaatgtttctgattaaaggaggccagagagacatgacaactagatccaaatgtcgggccctagactggatcccatcccagaggaaataagaaagggcattattgggtcaactgtcatcatggaaatacagactaccattgaataaattaaatcaatgttaaatttactcaagtggataaatactcggtggttctgtaagagaatattcctattcttagcaaagatgcactcaagtattctagggtaaaggtgactatataggcatgcgtgttttagaaaagcaattttatctgtgttaacagtaagtggatctcagtaaagggtgtgtgctattgttagtctcaaagcttttctgaaaatttggaattatttccaaatgaaaagtcaaaacaacaacaacagcagttcaatctcatctagaagagtttggcctcagtaatagaacctgggtttaaatctcatctctggctcttcaatgagctacttcactctctgcagatcttgatctcctcaccaataaaatgggcataatcatagtcgctgtatcacagacttgttagaagactgaaaattacaaattaaactttacaaagcattgagaacagggtctggcacatagtcagcttcatataaatgtttaacaaatatattgccaccattctgaaattgaaaacaaaagaagcacacaaaaattttccaaatctaagaatttcctcttgggatctgctgactgactaaaataatgttaagtcaacgttttcatagatcgagcatgaagtgtgtgttaattgttgggtgaccaagcagaatcaagtacagttgatcaagcagggttggaaacgtgggcgagcttaagctactcacgcatttcacttttgcaaaagccgtgagatatattaagtagatattgagttaaaataagcacagataaaataactactcggtaatcttccaaacacatctttggtataatactgagctttcaggaaatcaaggggggaaatatgataatatcctatatggcctagccttgctataggatgcaaagtaattaaacctcacaggagaatgacttattacataccaaacacgtggaaaaggaaaggcaaaaactgcctatctttggcttctacagtaattttttcctggaggagagcagagttggggcaactaagagtttcttttgaaagctcccaaagtctctggccatttggccgggaaagccttcctgtcggcagggcctgagtgagcactgtcttcaaacctcccagggtcaggtagctgcaggcatctttgggaagccacatggttaaacctccagattccaggaagattactacctaaagcatccaggtggatggcaggtcaaggtgactgcatcgaagaagtgtgatgaacgttcacagaggtttctgcaaagatttacaactcatccatccctctagctatgctaagctttatcctgatcaagccaatccacccatgagtttgcacctggaccacactgtcttggcctcttaaatctcatagaattcctcttactctctgacatgatatgacagccctgctcctgttataagaaatagtttcactgttctgttgataaagtgatgaacttttttatattattactttaaacaagaaatggatttaaacagcaagacacttgacttgaaggaaagctatctaggatcatttattttagagaaatttatcccaccttaaaaactgattgccgtacatgtaacagctgtgtacaaaaagtcatgagtctccttgatttcacaatgataattgaaacatattggaattctctaatcaaataagtatgcagaggagtctgttgttgtcattgctattgtttgtcaaacaatgaaagtaaaaaactaaatgggaaacaaaaataaaagtggaacaagcacaccactaatgcattctttttttttttttccaagacagagtcttgctctgtcacccaggctggagtgcagtggtgcgatctcggctcactgaaacctctgcctcccgggttcgagtgattctgctgcctcagcctcctgagaagatgggattacaagagcacaccatcatgcctggctaatttttggatttttagtagagacggggtttcaccatgttggccgggctggtctcaaactcctgatctcaggtgatctgcccatctcggcctcccaaagtgctaggattacaggcatgagccaccatgcccggcctaaggggttctttcataagaaggtttttctctacctcattttcttttattgtctatatcactagccatttagttaaaaaaataataatagtgttatacaatagatctgatcacatatgtcagttacttgatgtacagtgaagggagagaacaaatgatgggatagagagaattatgtgtacaagtcaggatgggctgggctccaactgtaatttgctaactgagagtgtttttgtgtctgtgggttctggtgtaaggtagtgaatcatgtgcattttctttttttttttgaaacggagtctcactctatcgcccaggctggagtgcagtggtgcagtctcggctcatcacaacctccacctaccaggctcaagcgattctcctgtctcagcctcccaagtagctgggatgacaggtgcgctccactacacctggctaatttttgtatttttagtagagacgcggtttcaccatgttggccaggctggtctcgaactcctgacctcaaatgatccacctgcctcggcctcccaaagtgctgggattacagacgtgagctaccgctcccggcctatcatgtgcattttcatccttcatttccaactgtgcaggtgcatctgtttcattgattatccgcccaccaaattagaatatgatcagcctcggtgacaaatcctggccttcacactaggtttatatttagtcactagtgctctgtgtctcctcttcaacagaatgatcccatcctacctccttctaatgaatttgatgtcatttcctgttttgaccctccttgggttttgcatcagtcgtggtgacggctgaggactccttggttgccacgccacaaaagatatgtcaggtctgcaccccacgagcatgggagaagccgaggaaggtgcagcaggaagaagggaggagggagtgatgcttttaagtattcagctacacaccagtgtctctttctaaggatccccttgagaaattaaagccaagctctcctgaatggctgtgttggttgctgcagggcccaaggcttgcttctgtggccccttctgttctccctaagggagcttacctagtccaccagcctgctccaaactgctggcgtctctgtcctcgacagtagccaaggcctttcacctggactccttgtttccccacttgccggatacaatgcaagtcccacacagcagccaggagagcctttacaaacacgaaccacatcccacgcctcacctgctcaatgccagccagtcctcctctttgccctttgcctcgctgacatctgacctcagctcaacctcgcctcccacattccagccacgggggcatcttcttggtctctcagataagccaaaggcattcccctcaagacctttgcaccagctaccctgctgccctgcggctcccctcccggccactcaggagcccccttatcgtcacgcaaagcccagccacctacacttcccagtccaaagtaccccccagccacctcgcagcacacagtggtctccagagtctctcagaatgctcatcgcttgcctttttctctcttccttcttccacctaaaatgtgatctcacgagagaagaaaacttgcctgtcttatccactgctgtgttctcacagacaaaaagtgcctggaataggatatctgctaacaagcatttattgaatgagtcttatgagcatggtagatttaatttccatgtgtgattttctcattgctatgatccctaggacactcagggtcaaaggcaaggctcacttctcctacttgcacaagaccttacgctgtgcattggagggacccatcgcagctctggcctgatgtttccctcctatgttcctcttgtaccgatttgctcatcttaagaaatatttataaaaggctgaatgcatcattgagcctttctcagcccttaataaaatgtggtggtgtgtaaatacattggcaggtggcttttgctaaatagcacaagatagatttctgcagggaacaagaggaatcagtcctccatgtcattcaccaactacaagtggggagagcaaacccagatgctctccctatttgagtcagtgctgcagtggccacagaaaacatcctgtcctctgcaggaggcaggtgtgaattcccaggtcacgggtaaagtcggtcaacagatgacaggagagcagacatcaggctgagccagcctcaggaccacagtgaaggcaaacaaggtgagagggaagcagactatccactcagaggcattcataggacacttttaattttttttaaattttatttattcattcattttatttatttatttactttttctgagatggactcttgctctgtctcccaggctagagtgcagtggtgcaatctctgctcactgcaacctccgcctcccgggttcaagtgattctcctgcctcagcctcctgagtagctgggactacaggtgaatgccaccatgcccagctaatttttgtatttttagtaaagacagggtttcaccctgttggccaggctggtcccaaactcctaacctcagttgatccacctgccgcagcctcccaaagtgctgggattacaggcatgagccaccgcacccggcccattcattcattttaaagattggtctccctctgtcaccagactggagtgcagtggcacaatcatagctcactgcagcctcagactcccaggttcaaaagatcctcttgcctcagcctcctgagtagttgtaagtcaagctaaacttctttattgcttatagcatgt

SEQ ID NO: 399 - DNA, 702 bp, Homo sapiens
aggagaggaaaggacacctcacctggcagagcagcacaaaggtcaggcatgtttccctcctgacctggaagctgggtcctgctccttcacatgaactgtccagggcttggtcatatacccaggtccccctcagtcctgcccagagtgactccactggtctccccagaaaacaccaacagcagagagaaatgaagtgtgtctgttttctggtttcatattgcagctcctcttgctcttcttaggacagaaataacatctgcaatgccagagacacttgaaggaaagagctagaagtcagtaatgatgtgttatgacttgcatggcttcaggtagttcagaacctgcaacctgtagttcagattacaggagaagaactcagacgataaattggcttccaaagaaggccaaatagaaaaaaaaaaggcttcttcagaccaatagctgagtgacctaccttccaaaatgggtcacggccaaatgttggcaggaaatgattcaaaggttttagccaggtcttccaggcccattcctcctttctagaaatgcccagctgttcaagcgctctttgctggagatggcaacgtttttgtctcctaactgtcaattttccagagagacaagagtcagcagggaatgatgttaaatgaaaacatacccctaattttctctggcctgcctggcagtcaggagaccaccagacac

SEQ ID NO: 400 - protein, 79 aa, Homo sapiens
ERKGHLTWQSSTKVRHVSLLTWKLGPAPSHELSRAWSYTQVPLSPAQSDSTGLPRKHQQQREMKCVCFLVSYCSSSCSS

SEQ ID NO: 401 - DNA, 268 bp, Homo sapiens
cttgagggaggcgctgcgactgacaagcggctctgcccgggaccttctcgctttcatctagcgctgcactcaatggaggggcgggcaccgcagtgcttaatgctgtcttaactagtgtaggaaaacggctcaacccaccgctgccgaaatgaagtataaggtaggtgataacccccgtgaggacaggccatggctacgtatacgagtacccatccagataccaaaaggacgtctatgatatccctccttctcataccactcaaggggt

SEQ ID NO: 402 - protein, 42 aa, Homo sapiens
QAALPGTFSLSSSAALNGGAGTAVLNAVLTSVGKRLNPPLPK

SEQ ID NO: 403 - DNA, 3796 bp, Homo sapiens
agagacttgagggaggcgctgcgactgacaagcggctctgcccgggaccttctcgctttcatctagcgctgcactcaatggaggggcgggcaccgcagtgcttaatgctgtcttaactagtgtaggaaaacggctcaacccaccgctgccgaaatgaagtataagaatcttatggcaagggccttatatgacaatgtcccagagtgtgccgaggaactggcctttcgcaagggagacatcctgaccgtcatagagcagaacacagggggactggaaggatggtggctgtgctcattacacggtcggcaaggcattgtcccaggcaaccgggtgaagcttctgattggtcccatgcaggagactgcctccagtcacgagcagcctgcctctggactgatgcagcagacctttggccaacagaagctctatcaagtgccaaacccacaggctgctccccgagacaccatctaccaagtgccaccttcctaccaaaatcagggaatttaccaagtccccactggccacggcacccaagaacaagaggtatatcaggtgccaccatcagtgcagagaagcattgggggaaccagtgggccccacgtgggtaaaaaggtgataacccccgtgaggacaggccatggctacgtatacgagtacccatccagataccaaaaggacgtctatgatatccctccttctcataccactcaaggggtatacgacatccctccctcatcagcaaaaggccctgtgttttcagttccagtgggagagataaaacctcaaggggtgtatgacatcccgcctacaaaaggggtatatgccattccgccctctgcttgccgggatgaagcagggcttagggaaaaagactatgacttcccccctcccatgagacaagctggaaggccggacctcagaccggagggggtttatgacattcctccaacctgcaccaagccagcagggaaggaccttcatgtaaaatacaactgtgacattccaggagctgcagaaccggtggctcgaaggcaccagagcctgtccccgaatcacccacccccgcaactcggacagtcagtgggctctcagaacgacgcatatgatgtcccccgaggcgttcagtttcttgagccaccagcagaaaccagtgagaaagcaaacccccaggaaagggatggtgtttatgatgtccctctgcataacccgccagatgctaaaggctctcgggacttggtggatgggatcaaccgattgtctttctccagtacaggcagcacccggagtaacatgtccacgtcttccacctcctccaaggagtcctcactgtcagcctccccagctcaggacaaaaggctcttcctggatccagacacagctattgagagacttcagcggctccagcaggcccttgagatgggtgtctccagcctaatggcactggtcactaccgactggcggtgttacggatatatggaaagacacatcaatgaaatacgcacagcagtggacaaggtggagctgttcctgaaggagtacctccactttgtcaagggagctgttgcaaatgctgcctgcctcccggaactcatcctccacaacaagatgaagcgggagctgcaacgagtcgaagactcccaccagatcctgagtcaaaccagccatgacttaaatgagtgcagctggtccctgaatatcttggccatcaacaagccccagaacaagtgtgacgatctggaccggtttgtgatggtggcaaagacggtgcccgatgacgccaagcagctcaccacaaccatcaacaccaacgcagaggccctcttcagacccggccctggcagcttgcatctgaagaatgggccggagagcatcatgaactcaacggagtacccacacggtggctcccagggacagctgctgcatcctggtgaccacaaggcccaggcccacaacaaggcactgcccccaggcctgagcaaggagcaggcccctgactgtagcagcagtgatggttctgagaggagctggatggatgactacgattacgtccacctacagggtaaggaggagtttgagaggcaacagaaagagctattggaaaaagagaatatcatgaaacagaacaagatgcagctggaacatcatcagctgagccagttccagctgttggaacaagagattacaaagcccgtggagaatgacatctcgaagtggaagccctctcagagcctacccaccacaaacagtggcgtgagtgctcaggatcggcagttgctgtgcttctactatgaccaatgtgagacccatttcatttcccttctcaacgccattgacgcactcttcagttgtgtcagctcagcccagcccccgcgaatcttcgtggcacacagcaagtttgtcatcctcagtgcacacaaactggtgttcattggagacacgctgacacggcaggtgactgcccaggacattcgcaacaaagtcatgaactccagcaaccagctctgcgagcagctcaagaccatagtcatggcaaccaagatggccgccctccattaccccagcaccacggccctgcaggaaatggtgcaccaagtgacagacctttctagaaatgcccagctgttcaagcgctctttgctggagatggcaacgttctgagaagaaaaaaaagaggaaggggactgcgttaacggttactaaggaaaactggaaatactgtctggtttttgtaaatgttatctatttttgtagatattttatataaaaatgaaatattttaacattttatgggtcagacaactttcagaaattcagggagctggagagggaaatctttttttttccccctgagtggttcttatgtatacatagaagtatctgagacataaactgtacagaaaacttgtccacgtgcttttgtatgcccatgtattcatgtttgtttgtagatgtttgtctgatgcatttcattaaaaaaaaaaccatgaattacgaagcaccttagtaagcaccttctaatgctgcattttttttgttgttgttaaaaacataccagctggttataatattgttctccacgtccttgtgatgattctgagcctggcactcccaaatctgggaagcatagtttatttgcaagtgttcaccttccaaatcatgaggcatagcatgacttattcttgttttgaaaactcttttcaaaactgaccatcttaaacacatgatggccaagtgcccaaaagccctcttgcggagcaaatttcagaatatatatgtggatccaagctctgatagttcaggtgctggagggaagagagacctgtgtgtttagaggccaggaccacagttaggattgggttgtttcaatactgagagacagctacaataaaaggagagcaattgcctccctggggctgttcaatcttctgcatttgtgagtggttcagtcatgaggttttccaaaagatgtttttagagttgtaaaaaccatatttgcagcaaagatttacaaaggcgtatcagactatgattgttcaccaaaataggggaatggtttgatccgccagttgcaagtagaggcctttctgactcttaatattcactttggtgctactacccccattacctgagggaaactggccaggtccttgatcatggaactatagagctaccaggacatatcctgctctctaagggaatttattgctatcttgcaccttctttaaaactcacatatgcagacctgacactcaagagtggctagctacacagagtccatctaatttttgcaacttcc

SEQ ID NO: 404 - protein, 830 aa, Homo sapiens
MKYKNLMARALYDNVPECAEELAFRKGDILTVIEQNTGGLEGWWLCSLHGRQGIVPGNRVKLLIGPMQETASSHEQPASGLMQQTFGQQKLYQVPNPQAAPRDTIYQVPPSYQNQGIYQVPTGHGTQEQEVYQVPPSVQRSIGGTSGPHVGKKVITPVRTGHGYVYEYPSRYQKDVYDIPPSHTTQGVYDIPPSSAKGPVFSVPVGEIKPQGVYDIPPTKGVYAIPPSACRDEAGLREKDYDFPPPMRQAGRPDLRPEGVYDIPPTCTKPAGKDLHVKYNCDIPGAAEPVARRHQSLSPNHPPPQLGQSVGSQNDAYDVPRGVQFLEPPAETSEKANPQERDGVYDVPLHNPPDAKGSRDLVDGINRLSFSSTGSTRSNMSTSSTSSKESSLSDAQDKRLFLDPDTAIERLQRLQQALEMGVSSLMALVTTDWRCYGYMERHINEIRTAVDKVELFLKEYLHFVKGAVANAACLPELILHNKMKRELQRVEDSHQILSQTSHDLNECSWSLNILAINKPQNKCDDLDRFVMVAKTVPDDAKQLTTTINTNAEALFRPGPGSLHLKNGPESIMNSTEYPHGGSQGQLLHPGDHKAQAHNKALPPGLSKEQAPDCSSSDGSSWMDDYDYVHLQGKEEFERQQKELLEKENIMKQNKMQLEHHQLSQFQLLEQEITKPVENDISKWKPSQSLPTTNSGVSAQDRQLLCFYYDQCETHFISLLNAIDALFSCVSSAQPPRIFVAHSKFVILSAHKLVFIGDTLTRQVTAQDIRNKVMNSSNQLCEQLKTIVMATKMAALHYPSTTALQEMVHQVTDLSRNAQLFKRSLLEMATF

SEQ ID NO: 405 - DNA, 4663 bp, Homo sapiens
agcaagtccgctcgctgcatggagagggaaacatgagcatgcagcaggactagctgtcacctcccgcccgcctgcccagagagggccagagcgtcggggaggcaagatgatccaccagcggttccatcctacacttgggattcagtaagctgtgaggtccgtaatgtcagacactggcaaacatcatatgttcttcaagtagagttatgaaaacgaagaaactggtcagaagagtaaaacgccggaattgtcctttccaacatccagagctgcatcattccttggggcaaaatgtggacaaggaatcttatggcaagggccttatatgacaatgtcccagagtgtgccgaggaactggcctttcgcaagggagacatcctgaccgtcatagagcagaacacagggggactggaaggatggtggctgtgctcattacacggtcggcaaggcattgtcccaggcaaccgggtgaagcttctgattggtcccatgcaggagactgcctccagtcacgagcagcctgcctctggactgatgcagcagacctttggccaacagaagctctatcaagtgccaaacccacaggctgctccccgagacaccatctaccaagtgccaccttcctaccaaaatcagggaatttaccaagtccccactggccacggcacccaagaacaagaggtatatcaggtgccaccatcagtgcagagaagcattgggggaaccagtgggccccacgtgggtaaaaaggtgataacccccgtgaggacaggccatggctacgtatacgagtacccatccagataccaaaaggacgtctatgatatccctccttctcataccactcaaggggtatacgacatccctccctcatcagcaaaaggccctgtgttttcagttccagtgggagagataaaacctcaaggggtgtatgacatcccgcctacaaaaggggtatatgccattccgccctctgcttgccgggatgaagcagggcttagggaaaaagactatgacttcccccctcccatgagacaagctggaaggccggacctcagaccggagggggtttatgacattcctccaacctgcaccaagccagcagggaaggaccttcatgtaaaatacaactgtgacattccaggagctgcagaaccggtggctcgaaggcaccagagcctgtccccgaatcacccacccccgcaactcggacagtcagtgggctctcagaacgacgcatatgatgtcccccgaggcgttcagtttcttgagccaccagcagaaaccagtgagaaagcaaacccccaggaaagggatggtgtttatgatgtccctctgcataacccgccagatgctaaaggctctcgggacttggtggatgggatcaaccgattgtctttctccagtacaggcagcacccggagtaacatgtccacgtcttccacctcctccaaggagtcctcactgtcagcctccccagctcaggacaaaaggctcttcctggatccagacacagctattgagagacttcagcggctccagcaggcccttgagatgggtgtctccagcctaatggcactggtcactaccgactggcggtgttacggatatatggaaagacacatcaatgaaatacgcacagcagtggacaaggtggagctgttcctgaaggagtacctccactttgtcaagggagctgttgcaaatgctgcctgcctcccggaactcatcctccacaacaagatgaagcgggagctgcaacgagtcgaagactcccaccagatcctgagtcaaaccagccatgacttaaatgagtgcagctggtccctgaatatcttggccatcaacaagccccagaacaagtgtgacgatctggaccggtttgtgatggtggcaaagacggtgcccgatgacgccaagcagctcaccacaaccatcaacaccaacgcagaggccctcttcagacccggccctggcagcttgcatctgaagaatgggccggagagcatcatgaactcaacggagtacccacacggtggctcccagggacagctgctgcatcctggtgaccacaaggcccaggcccacaacaaggcactgcccccaggcctgagcaaggagcaggcccctgactgtagcagcagtgatggttctgagaggagctggatggatgactacgattacgtccacctacagggtaaggaggagtttgagaggcaacagaaagagctattggaaaaagagaatatcatgaaacagaacaagatgcagctggaacatcatcagctgagccagttccagctgttggaacaagagattacaaagcccgtggagaatgacatctcgaagtggaagccctctcagagcctacccaccacaaacagtggcgtgagtgctcaggatcggcagttgctgtgcttctactatgaccaatgtgagacccatttcatttcccttctcaacgccattgacgcactcttcagttgtgtcagctcagcccagcccccgcgaatcttcgtggcacacagcaagtttgtcatcctcagtgcacacaaactggtgttcattggagacacgctgacacggcaggtgactgcccaggacattcgcaacaaagtcatgaactccagcaaccagctctgcgagcagctcaagaccatagtcatggcaaccaagatggccgccctccattaccccagcaccacggccctgcaggaaatggtgcaccaagtgacagacctttctagaaatgcccagctgttcaagcgctctttgctggagatggcaacgttctgagaagaaaaaaaagaggaaggggactgcgttaacggttactaaggaaaactggaaatactgtctggtttttgtaaatgttatctatttttgtagatattttatataaaaatgaaatattttaacattttatgggtcagacaactttcagaaattcagggagctggagagggaaatctttttttttccccctgagtggttcttatgtatacatagaagtatctgagacataaactgtacagaaaacttgtccacgtgcttttgtatgcccatgtattcatgtttgtttgtagatgtttgtctgatgcatttcattaaaaaaaaaaccatgaattacgaagcaccttagtaagcaccttctaatgctgcattttttttgttgttgttaaaaacataccagctggttataatattgttctccacgtccttgtgatgattctgagcctggcactcccaaatctgggaagcatagtttatttgcaagtgttcaccttccaaatcatgaggcatagcatgacttattcttgttttgaaaactcttttcaaaactgaccatcttaaacacatgatggccaagtgcccaaaagccctcttgcggagcaaatttcagaatatatatgtggatccaagctctgatagttcaggtgctggagggaagagagacctgtgtgtttagaggccaggaccacagttaggattgggttgtttcaatactgagagacagctacaataaaaggagagcaattgcctccctggggctgttcaatcttctgcatttgtgagtggttcagtcatgaggttttccaaaagatgtttttagagttgtaaaaaccatatttgcagcaaagatttacaaaggcgtatcagactatgattgttcaccaaaataggggaatggtttgatccgccagttgcaagtagaggcctttctgactcttaatattcactttggtgctactacccccattacctgagggaaactggccaggtccttgatcatggaactatagagctaccaggacatatcctgctctctaagggaatttattgctatcttgcaccttctttaaaactcacatatgcagacctgacactcaagagtggctagctacacagagtccatctaatttttgcaacttcctgtggccagtgtgtataaccccttccactatctcacagatagtcacagcgtccattccatagtctgtctcctcacatctgttagtattgacacagcacagacaccacaagccatcaggttcttcatggggcaggtgaaatacttctaccccatgggtaaatgtattcacatattaccaagagaagaagcacattatctatgatcttttggcccagttcttatttagcatttttattccagcctacttggaaacatgtttttatttgcaatatatgcctgactgaattaagcttgcttgttttaaacaaccaaatcattggaacagaaaaggatttaaaaaacaagaatgcatgatctcagcgtgattaaaaaaaaatcagtggaaataaatgatcatagaaggtgcttttcaaaacaactgctattataattctcaaagtcctactctgccaaaagaagattaaaagtcatacattacattacaaggaaatgttcatgtgggaagagggttgctgaaaatcaacaacgcttgaagttaaaaagtgtgtctttgtagatttcattgtataatgtgtatttcttaggagatggctgacttgattgatctacgctaagtggagacatttcacatttttaaaaccaaatgttcaatctgtattactctttgccgtcttgtatgtagaggctatttttaaatcattaaatttttagatctctgttttcatagcc

SEQ ID NO: 406 - protein, 830 aa, Homo sapiens
MWTRNLMARALYDNVPECAEELAFRKGDILTVIEQNTGGLEGWWLCSLHGRQGIVPGNRVKLLIGPMQETASSHEQPASGLMQQTFGQQKLYQVPNPQAAPRDTIYQVPPSYQNQGIYQVPTGHGTQEQEVYQVPPSVQRSIGGTSGPHVGKKVITPVRTGHGYVYEYPSRYQKDVYDIPPSHTTQGVYDIPPSSAKGPVFSVPVGEIKPQGVYDIPPTKGVYAIPPSACRDEAGLREKDYDFPPPMRQAGRPDLRPEGVYDIPPTCTKPAGKDLHVKYNCDIPGAAEPVARRHQSLSPNHPPPQLGQSVGSQNDAYDVPRGVQFLEPPAETSEKANPQERDGVYDVPLHNPPDAKGSRDLVDGINRLSFSSTGSTRSNMSTSSTSSKESSLSDAQDKRLFLDPDTAIERLQRLQQALEMGVSSLMALVTTDWRCYGYMERHINEIRTAVDKVELFLKEYLHFVKGAVANAACLPELILHNKMKRELQRVEDSHQILSQTSHDLNECSWSLNILAINKPQNKCDDLDRFVMVAKTVPDDAKQLTTTINTNAEALFRPGPGSLHLKNGPESIMNSTEYPHGGSQGQLLHPGDHKAQAHNKALPPGLSKEQAPDCSSSDGSSWMDDYDYVHLQGKEEFERQQKELLEKENIMKQNKMQLEHHQLSQFQLLEQEITKPVENDISKWKPSQSLPTTNSGVSAQDRQLLCFYYDQCETHFISLLNAIDALFSCVSSAQPPRIFVAHSKFVILSAHKLVFIGDTLTRQVTAQDIRNKVMNSSNQLCEQLKTIVMATKMAALHYPSTTALQEMVHQVTDLSRNAQLFKRSLLEMATF

SEQ ID NO: 407 - DNA, 208765 bp, Mus musculus
  misc_feature (1)...(208765): n = A,T,C or G
tctggggattgaacccacagttgaagttgtcaggcttgtgtggccagagctgagtcaccttcctggctttgttgtgtgtttgggggacatgactttatgtggtacagatctgacttgcactgtgtagtggaggatggccaggatttctgatcctcctgcctccacaggcagagtgatgggactataagattatgccatccagttgagctggcctctccatttatttactaagtgcttatcatctctgatagtctgtgggaatgggttgagggggcagggttgctccaagtagccctgcctggcctggtactcactacggaagcaaaggctggctccaaaatcatggagatctgtctgcttctgcctttcaagatatgtaccactccacctggcttttcccagaatatagagaagggtgacaaaacccatagaactggagttacacacagtgtgagcaaatatgtgggtgcaaggaatcgaactcaggtcctctggaagaacagcatgtgctcctaattactgagccatctctccagccctgctaacttaatctttttttttgttgttgttgttggttttgttttgttttgtttttgagacagggtttctctgtgtagccaggctgtcctggaactcactttgtagaataggctggcctcaaactcagaaatttgcctgcctctgcctcccaagtgctgggcttaaaggcatgaaccactactgcctggctctgctaacttaatcttaaacacatgaattttcttttcagtgctgtggactggacccagagcctttagcatataagcaccatgccactaagctacattcttagtccaagttttatttgtttgtttgtttgtttgagatagagtttctctgtgtaatagccctggctgtcctggaactggatctgtagcctaggctgtccttgaattcagatactgggattaaatgcatgtgctaccaccaaccagcttttccaaataataaaaacaaaatctttttattttcaggagtgccagaccactgttattgtattaattaacctcacttctttgggtattttttgtttgtttttgagacagggtctaactttgtagttcaggctgtcctgaaactcactatgtagaccaagctggcctcaaaagaacagaggtcatcctgcctctgcctcaggagggcttaaaggcatgtgacattatacttagctaggacctctttttttttttttttttttttttttttttttttgagacaaggtctcattatgtaattctgggtggcccggaaatcacagagacctagctcctttcctctgcctccaaaatactaagaataaaaaacgtgtcataccactacaaattgttgggccccttttttgcaatctgttgagatgggtacttcctactggccaaccctttgttgagagcagggtggttcctttccacattcaaatagtttccctacttcctcattctcctccaaccccattgtcacccagagagaccctggtgtgctcctcaggcggtcgatcctggagccccacccagagggcccctctttgttactcaacatttctttcaccttggccttgagaaattcatggtgtgttctatgccttggaggaacagatctgctgtgattttacatccctagtaaacatccaacttctttttattcaaggaatcgttgacaatggaaacacaaagaagttgtaaatgaataatctatggagtttagacacagagtgaccaccaaggttggagtcttcttcattctactgtgtgcccatccacttatagaagggagatggttttggaagatggactgtaaactttataaatgtcacagatttggcaagagacagtttttgctctccctgatcagtgtagggaattcatagaatcagtcgacattatggttgagggactgggtctggatggagatggttcagtagttaagaagctgactggtcttcctgaagactggggatttcatccccagcatctacactgggcttcccaatagtctctaaccccaggactggaagatccaacaccctcttcccctgcctaagggtaccaggagatgcaatggacaggtgatatacactgatgtacattcaggcaaacagtcactccataaaataaaaagaaatacaatctaaaaacaagcaagcaagcaagcaaacaaacaaaagagcagccttatattctaaaagagtaatcccaaatgaactgccttaatctggtgtgccctgactcccaagggtctgattgctggaaggttctgatagagaagaaataattacttgggtgatggacagtgattgctggtgcattttctatctagccagaatacttttgtttctttccctcaccctttaggaagcattttgtgtagcgcaggctggcctcaagtcactaagtaactgaggaaaactttgaaggcttcatcttcctgcctcttccttcccagggataggactatggacaggcccacgtcattacaccctgctttccctccctctggataactaagtgggttcagtccatctcttggttgggagaggcgtttctttggggttatcttttctggctgctgggagatagaagtactgaggtgacagaaagaaaaacgggaatgctccacttctgcttcagggactgccctcaccttttccagtaaacactttcatctgcattttcttcttcttttcgttttttattcgagacagggtttctctgtgtagccctggctgtcctggaactcactctgtagaccaggctggcctcaaactctgaaatccgcctgcctctgcctcccgagtgctgggattataggcgtgcgccaccactgcctgactcatcctcattaaaaaaaaaaaaaaaaaaaaaagtatgctgtcgcttcagacacaccagaagagggcatttgatcctgttacaaatggttatgagccaccatgaggttgctggaaattgaactcaggatcttgggacaagcagtcagtgctcttagggtctgagccatctctccggtcccgaatgtccatttttaacttgcaacccaaggtgaacccagatacaacttctttgccctctttccctggctactgagaactgtgaaatatatatatatatgccttagctacctcatcatgatcccccaaggatgattcgctggtggctgagaagttccttgctgtgtgtttatggaagtaacatgagtttgagaaactgcacattttccctcttggctgcctctcccgggttcctgaatgaggaccaactcttttcagcaacactggatacaatctagttagaatagcaatgttttttgtttgtttgttttaaaattttaattcctttttattactccttgctgtggtcaatgggctattagcagagatcagttctctccttccaccatgtgggggtccaaagattgaaaccagggcatcaggtttgtacctttacccactggggcacttgctggccctgagagtttaaagatcttctgtctaaagatagggccatatgtaaatgagttaaatacctaataaaaaatggaaaaaaaaaaaaaaaaaaagatagggcctttcagtgacttttaccagtgaggtttacagaaaacagattttaaaacgtcattgggtttgtgctgtgatatcttactgaagcttgacaagtaagactgtaaattcaagggctgacaaaaagagctgcctcattgccttgacatcaccacggactccatatttaagatggctgtttacttctggggttacctcctggtgtgttttaaaatactcttgcaaatctcagtcagcttgaaatagctgctctaccctttttcaacagaggctcccaccttctgagtacactggctcataggtatttataaacctgatgtcagtcaaagatgacttttttttatatccctcctcctcattctcttcctccacacgtgaagatagacctacataaaatgagaaactgcataaggtacccagtcacctacgtacgttcagcaatcctttaagatcgcatacattctttctttggaactttttctcctttgagacagggtctcacatactctggcacttgatatatagaccaagataaccttgaacttctcatccccttgctaccaccataccctactacaccgtcagtttttctcttagagtttaaaaatacttaatcagcttatattattgttattttttcccccacttttttcttatgtctgcttggttttgtgtcttttttttttttttttttttttttttgagacagggtttctctttatagcccgaactcagaaatccgcctgcctctctctctcaagtgctggcattaaagacatgcgccaccatgcccggcttggttttgtgtttttcattgttgctgttgtttgttttttgtttttcaagataggattgctctgtatgcctctggctgtctctagaacttagtatgtagactaggctggctttgaactcaacagagatccacttgcctctatctcccaagtgctgggattgcaccatgactatattattgttagttttgagatctaggaggcccttttgttaggaagtggtggaggttgtctttgaactcctaattttattctcttcatcttccctgagccatatttccttgagattgggtctcccaccagtatgcctatctcatctctggcccccacctccaaagctggagttatgtatggcacaccctgcaattcctggctttttctgtgggatggacatgggaaactcagcttaggtcctagaggtttcacagtaagtgttcttgcccactgggccatctacccagccccagatttttttgtaaaatctaagaatctttttctttattttttggctctccacaactatgtaaaagacctggatcactgagctcacagacatccccctgcctcttcttcctgagtgttggcaacaaaggtattcattactactgcatgctctaagaacacttttctttccagctacacctagtattattttatggaataatgtttattagatcacagtttggagaacatagagtgttgatctgtacaaagttggtggaataggatgcacaactttttttttttgggtttttggagacagggtttctctgtatagccctggctatcctggaactcactttgtagaccaggctggcctcaaactcagaaatccgcctgcctctgcctcccaagtactgggattaaagatgtgcgccaccatgcccgacgaggatgcaggacttgaaaaaaaaaatctaggcgacagtggtggtggttatcctcgtatatttccagtactcgggggccagaggcaagcagatttcgcgagttcaaggccagcctggtctgcaaagcaagttccaggacagccatggctacacaaagaaactgtctcaaaaaaaaacccaactgaataaaacaacataaccccacccccgcaaaacaaacaaccaacccaaaacaggaaacacactttaatacttcattttcatattgaagtggtgaaattgataaagcttattttgatccacgttattttatgtgttagttaaggttattatacccccccccccacatatatatatatatatatatatatatgtatgtgtgtgtgtatatatatatataaaatctgcctgcttctgcctcttgagagctgagattaaaactgttcaccactgtgtccttccttaaggtccaagtgttttaacaagtatacaaagatattcatatgaaaagttaggcctagctgggcttggtggcccatgcctttaatcccagcactcgggaggcagaggcaggtggatttctgagttcaaggccagcctggtctgcaaagtgagttccaggacagccagaggtatacagagaaaccctgtctcacaaaaaaagaaagaaagaaagaaagaaagaaagaaagaaagaaagaaagaaagaaagaaagaaagaaagaaaagttaggcctttagtcccagcacaaaggcaggtggaactctgtgaattcaaggccagccttgtctacatagcaaattccaggccagcccaggttacacaatgactacttacctcaaaaaacaaaacaaaacaaaacaaaaaccccaaaaaccaaagaggaagatcttaattggtgtgctgggcaactggtaacagccagaagattgtgctaacaattcttacacagcagtctgcatttaagcctgattgtggccagcaaacaacacagaggtcaagttagaattagatcaggtgagatccagaggtgtctttggtgaagactgaattaagccctttcattttatagatgaaacacctgacatccaggttggctaaagcagtcaggtgtgttagcactgccttctatcacagcaattgggaggcagaggcatgtgggtctttctgagttctacacagttccaggccagctacatagaaagacgcacctgattcatgttgattcaatgatttgcctaaaggttgtctcaatacgagatcatgggtccttgaactttttgatataattaaggataagtcatagaagtaacacaatcaggacatataaaactaagatgttaaggtcaaaagctttatcaacgggcttttgagatggttcaggggataaaaatgcttgctaccaaatttgatctgagttcaatttctgccacaggaatcacatgttggagggagaggaatagcttcgggagatttttctccaattccttcacatccacacataaataatttaaaggtggttcaaaagaaaattaggaacttgatacacagagattctcaaaaagggggagtgggtgtggaagtggggagagagctgggcagttaagaatgctcttcaaagcaccagacctcatttcctagaatacaggacaggtggttcaaaaccttcaataactccagttccagggaatcctatgcctctggcctctgtgggcatccacactcaccaggacacacacacacacacacacagacaccaacagttaacgacatttaaaaaaccttttaaaagattgtgttttaaaagaagtagctgaaatatcaagggacactcaggggtgagtaggttaagcagccaggcttaactgagcactgtatgatactaaaatggatttggttcatacaaaagtaaaaatagctctgtgccaaacgtggcatgggagatgataacagctgcttaattgtctgtcaatagtctaaatgttgcccattagagtttgtgtgaggtattaaaaaatgacaccttttcaattctatcaagttccagaggctctgaagagaatataaaaaattatgtctgggcttggtggcacatgcttttaatcccctcacccaggaggcatagtcatgctaatttctgagttcatggacagccaagggaacttccagattgcctagttaaaaaaaaaataaaggaaggaagaagaaaggtagacaatactaccactgaccctggaaagtttccttttttttttttttttttttttaaagagtctcaagtattctaggctgttctttaccaggcctgcacttaccaggttgagtcctgtgctaatttagagaggattctgcatcctcagagaggacgtcagtgctagcatgtggttcaaaggaatccattcctagttctctcaggagttaaaaaaaatcacaaggaaaagcaaattagacctcctaacaaaataaaagatgggaagcaaagctaatacttggcctggcctggagggtggaggttggaagtcatcaggagatagttattcccacagcagggaagactgtcaaccacaaaggacaatccattttccttttcaaggaaaacaacaccagcattatctaagccttatggaaatgagcaaattcctcctctaccacccccttaggcctcaactaacaatggtttttcacacttgcctgggacttggagttggtagtctagcaggagacttcacaggcctaggactgagaaccccaaacttgtccagagaaaccaccagaaactcacctttgttcttatttaattgactggggtctgacagatatgacattacatttgcacaaagctgtttaaaataataacgacgtggagaaacagacacctctagtgtacaggtcgtaatgatccgaatgggtttggaaagcaccttgtgtcaagacgaccataaagtcacttgggtggtcaaaactgaactgtaaaatagaaatgtattcgatcattccaaccaaacggaaacagtgaacaatttgtgcattatttaagacacacaggcaattaatttttctgcttgtaaaatgaacatgagttttagaaacttaaaaaataagacaaataatgaggtataactttttaaaaataagggtgtcttatgtcaactcatgaaacagtccaataacctgcatggttctaaactagggttttgttactttataatcctctccataagctttggccggaatcaacttgcagatgtggaaactgagcagcttaggaaagccatcgctcaacttgtctgaagtggccactgtgacctctgaatccataggtgttaactcgcttttttagaaccttctagacaccatgactaagttgccctgttgcgactaacagtggaatggtcgtgactcgggagtgcttgttttgggaaccgactgcccgggaggagagagaggaagaagccaatgtgtgtctgcaggtggatgggagaggctccaagccttttcgcttccctgaggctagccagtcagatttgaaaagcaggaccttgaagaccataggttagaaccaggaaattagcgccgaggctgggagccgtgctaaagttcctgcgaatgcccccgagagcgacagcagggcctgcgatccattgatctgagcgactggcgagcctgggcagggcaggggctggggcaggtaaggctgcggggcacagaccattgggctctcgggcactcagtgttcgagacgcttccttacgggctgcctgtgttggggggtcggtctccatttttccgttcacggtttcacctcggcgttgggagtctcggtcgcggacagccctagtcctgagggtaaagacccccttcaccgtctccagggacggcggggcttcacctcggagccaccggcgacggcctagggtcgcgtcggccccggggacaggggcgggcacgcgggccggcgaccacgaggccgcgagctttcgccgggaggctgccccagccgcgtctgcctcgcgcgtggggtcgcgtgcggccgcgggccggcttggagccgtgacctcggaccaccccggcggccgagcggccgcccgcttgctcggcacacgggcgcttgtcctgaggtgacaccgccggcaacggctgaagcaagcgggcgctgccgatcagcgagttcgcaccgagcgaggatccctcttggtgcgtggcccagtttggctnnnnnnnnnnnnnnnnnnnnnnnnnnnnnnnnnnnnnnnnnnnnnnnnnnnnnnnnnnnnnnnnnnnnnnnnnnnnnnnnnnnnnnnnnnnnnnnnnnnnnnnnnnnnnnnnnnnnnnnnnnnnnnnnnnnnnnnnnnnnnnnnnnnnnnnnnnnnnnnnnnnnnnnnnnnnnnnnnnnnnnnnnnnnnnnnnnnnnnnnagggccctcgggggcggggccggcgtggggagttcctcgctcccggaccacacgctccgcgggccaatcccgagccagcctctagcagtgtcgcacgcgggacacgtccaagcgtttgttggcagggcccggggaagggggagggggaagcgatcggggaaaagggagttgagtgacaggaggcgtggggcacgctgggaattgtagttcttcgcttccgtggccatagccattttgtagtcaagggactacaacttccagaagatcaaggggactattctaaggtgccccgggaataggcggctctcccccgggccgggcgtcctggggcactggtacccagctgcccggctgcaggtagacgtgagggcagtggcgaaggtttgcatgcggcgactgttgggtgagcggactgcgggtggggggggggggggggaaggggctgaggtggagcgaccgagcgtgccatgcattgagctagggagcctctctcaattccacgactgggctcggcgtgggagaggcgcctgacgggcggcccgcagaggcttcgtggaggcctttccggggtctcgtcgacggggctgcgggagttctccgcaccgggccggggcttgtgggcagaggttaggcaggcgtgcggggggctcagctgtgggagttttcggctggcgggaggtggcgaattagccgaggagccctaacttgtataaaagcagagtccatttaaagttgggctggctagcctctctctcattggttaaggggcttggaaaaaagagactcggcgagccctccgctgtggtgctgccgccgccaccgccgccgctggagttgactcttctgctcgcactgctgctgcagcacaaacgtgacttccaacattttaaatttatcttttccttttttcttcttcaagatgtaactacagatcagatactaaggaccttcacgtttcgctgatgtagtttttggaagaaaaagggggggagtgaagggcgtcggtttttttttttttcttctttttttttcttttctttttttgtgtctgttgtatgtttcgggggaaattttccattatgagtgttttactaaagtgaatttttcttgtttgcttcgctcgtctttggctctttttatattttttcttttatccttctcaatttcggatttatttcaaggcgaatctggttttgggggaagaggaagaaaagtcggattacaagatcaaccaccaccaacaacaataaaaaccaccaggatatttttttgcaaatttctgacggctttaaattcatgaagcaattgtccccttttgcaatcagcatttggatctcagaatgagcaaggaaagacccaagaggaatatcattcagaagaaatacgtaagtgctcttaacaacacatcctttggcttgcagttttaagcgatggttgtgaatgtcaagtttatagataattctgcagctgaaaggttttaaacagcgtccgataaagctctttcttttccgaaagggcttttcaggcaaagtcgtgtctgcctagtttggttgagaaaacagactggtgtagagatacctcaagtatataaattgacctcgaatgacacaacgttgatgtagttttggtgaaaggcaaggggttttggtggaggttggggttctgtgtgtgggggcccccgcagtgatctaactgcattctcgggcggatttggtcccatattgcactttgcatacaaatgagcctgttattagtgttatttggaaaatcgtgtaaggtatgtgtgttggaagctaagttgcaatccagagtacgattatggcgatcttctagcactggcacatcatttaatatatgtggcccttttggcttatctagcttgcaacatgacccagttgggaatcatgttactgggaatgcatttattggtattgacttttataaagaggctggttttggttctaaagattcatggtttctagtttgaggggaaaaacatagctcatgtaaaagtatatgtgtgcctgagtgaatgcatgttaatacgaataatttctccctgaaaactgggtttctgagattgggttgtgatggttaggtttgttttgtgcacagtatagcagcgtcttgcttggcatagggagtgtttttgttttgtgtagtggcttttttttttttttttttttttttgtaagtttggggggagggagtagagagggaaaccaggggattaaccaaatatgcactcgagtgatccggtggttagctgcgtatgctttagagcaaagtacacttttttcccccagaaaaaaaaaaggcccttgaagataaataaagaacaatgcgaccctatgagaaagttttatttaactagggtcgatgatttggtcttaatatttttcctttttggttagagaggagtgtataatgggagatgaccttctgggcagtggttttgttaaatgtgtacacacacacacatttaatggaaaacctgaatttctcccggagagctgatcctaatctatacacgtaaacttaacttgaaagaaacgtaagattaaatgaagctcaacttacaaagcctactccataaggaatttaagaattaaaatacatccgcattgcagtgggccgggtaaagcgcaaaggactagtttaaactcgatgtgtagaaactgcatggacacacagccttgccttggagcgtggactccttcccagagcatgtctcctgacgtagccacaaaggatatggggtagaacttgggacgagaacccccaccctatcccggaccccgataagttggagaacaccgtgggtaggcattttgtttttttgtttttttttgctggaggccagcggaccctgtggagtctggacatccggccgcaagccggcggtggctgtgcgaggcagagcgtgagttgctgctgcgggagccgagtctgctcacgcggtgctccggacgcagccggccgggagggtgcacggggcccacagcgctttgggccgtagcccgggctcgggccgcgggcgcgcgggcggcctgtagggggcagactccgggttgtgctctggctgggcgggtgggtggggctcgcgggtggctcggcgtgctgactcggggcgggacgggctgggtgagtgaggctagggggtggtggtggtgggggtgaggaagggaaagatgcctcgggcgccccccgccgcgcgtaaggctcagctcttacgccgccctgcccgcgggctccagcgcagtctcgagcaacaggttaagcaggagagacgtcagcgcgccccctcccctccccgcggccttcttttgccttgcgcctttgcaccccccatccgggccgtcacgtcctctctccgccccttgcccccagtggctttgagtcctcggttctcccccttcgcgagctgccgctgtctgttgtcattgtgacgtcacaaagggacagcccagtggaaccttcctttcctccgtgctgtcaaaagtcgggcgggaggttccaggcgctgcctgagtaggagctccgggagtgcggtgctgtgctgtgcggtgcggggcgtgggaggaggcaagggcctgtgagggatgtgcccgacctggaccttccgctctgagtcagtgttccaggtcccagcaggtgagcattgggaagccttttacccctcaccgagtgcccttgaaccttctcaaactacttaggggcaggagagcaggggtgaggctccttaacaggaatattttcactccacagttctaggtcttttgattgtgggacgtatcactgtaattcccactcacacccatgctagtgaaaggaaagaaaattgcatttaggaagagctttttttaaccttctatatggttggagtttgaggattttgttactttgttgcgttggggtgcctttccaggaggtggcatgataactttgaaggggatgttgcatagcatcagctgttgccttaagcttttccttgtttttgggcaagagctgtcttgtctgtgcccagtcatctgctccttactgtatcttggggactccggagaggaaggactccaaagagcacttgatttagagatccactgggcttagttcttaacagaatcagtggttcaaagtggaaagtcacagctgcttttgtcactttactaagttactgagattatgtgggcggaagatagaaaacagtgtgccgctgtaagtggaaggtggcattattacttgagctggctggtggaaggtagcatgcttcctgcaattggtctcaaaagctttacatgccttcgatttagtttattgccttagccaagagtttgagtgtgattgtagatggaaggctttgggagaaactagtattatatttcttattaaatgacatccttgagaacctcataaattgaaatataatcctgtcttaattgtgttgggcatgactcccactacagtaccttagataactggaaaagggtgcctttcagagccccaattcacttggacaataaaacagttgcatgtttcccccagtgtgtattttctgccatcattcctgtagatggttattcttaggggaagtaggggatgataaccaggccatttgatcttagcttgataccagataggagcagacacttcaaaatccaatgatcagactggtgttcaggatgactttagcagaatttgtacccctgagttataataatgttaaaaatagcacatgccatgacatcctcacatgtggaaatcacaggacaatgctgactctgcactttcatctttacttggtgttgaattcagaacttaaggcttgtttggaagactttacctttccctgtggacagagttgtgtcaccagcttaacctaatctgtttagggatcaagtttttcaaattcctctaattccagacttgtaaagtggagacagttaaaggtcatctttagttacatatccagtcccagttcatgcccttctgggctccataaaaaaccttctcaaacattccctgctccctgtgtggctcagttgttttgtcttagcaaacaggaattcctgttttcagtccctatctccaaatacactgggcccgatggtattgaattaggaggtttaaggaggagggtcaggagttcaaggtcatcctgttacatagcatgtagaaggccagcagctggaaatatgagaccctctctaaaacatacccaagactaccccaagaccgcagaaagggagttaacctcataaagttcagaaacagagttgtactacaattatagctgcaaataggtagctcagtgctggagtgctttcttggcatggacaaagtctcagggggttagatctctagcacaaaaaatggtcaaatgaaatgattgctgtcttctgtcatggttggtacacacctttaacccccagcactgggaggcagaggcagaggtgggcatgcatatcttagtttgaggccatcttggtttatacaggaagttccaggccagccaggactaggtagtgagaatgtctccaagagttagcttgcttttcctttgttaaataaacatggtggtattttacagctctgaagggagaattgaagttgttagttgccttgtttttccttttcccacatttataatactttacttgtcttggaaaatcctttcctttcccaaggagtctagggtggaaatgctttatatttggtagaatttagggtcttgcatgtgctaggaaagctgtggtaccaaacaaccccagttgtaggtggcagcaacgttggacacccactataagaatggcatacagaagcaaagccaggttgatgatgcgttaaatttaaaatggataataatatatgttcaggtgggttcttattttctgggttgtttataattaatatttcatgcccattgatgttttgcctgcatgcctctgtggatatcctgaaactggaattaacaggatgccatgtaggtgctgcaatgtaggtgctgggaattgaacccaagtcctggaagagcagcctctgctcttaaactctgaaccatctttcccgcctttattactcttttttaaagggctgatatttctacagatatatccacacaatctttttttttttttttttttttcctagacaggtttttctctgtatccctggctgtcctggaactcactctgtaaaccaggctgtcctcgaactcagaaatccacttgcctctgcctcccaagtgctgggtgtgttctaccactgccccccccccccaaaaaaaaattaaattatttgtatgtgtatgtgaggtggctctggatgctacctcacacataaggatgctagggcacagcttggaggagctggttctaccatgtggattacttgctgagccttctttgttgggagttgaatatttttgtctatagccactggcccaaataaccagctagaaatattttgtagttaagagggttactagatagatatttcagttcacatggttagaactgctcccctccctcccccatactgggtttgtctagggatctgagaggcccctgtaagtgtcctgattatttaaacttcaaaaggaggacatcttttagagtttctgtctggtttctgttctattaacaatagaactgtctcgaaagaggatgaggggaaaattatattaagtcaagtatataaacacttgttaaaggccaaactgggatgttttgaatttgttactttgtcttggtcatggtagtatttggaattaagctctggccatgttaatttaaagttagttgcagtgttcaaaccctactgatattattggcccagatctccccaaaacttgttagttctcctaactaacctgcttgcctagcctcctggccataggtgcagaacattctggttattaatctgcagcttctgcccagtgggcagctgtggggtgtgcctctgtcccctttggcttctacccagaaggcttgccaagtgtcagttgtttgttcccaaatctggttattccagttgggcttattcatgtaattacaattaaatcttatgtaaaccttgaaatgactgtgaaaacagttggttcaactttaagttgaatgctttggaggagacgtgataaaaatgctaggaaaaaagatgttagctatagatagatacgctggatgttttgacattgtggattcttcaggaacatggcattccactttggtggtggtatggtggactaagtcacacctccagtctccaggtcgatccctaaatgcccaggttctcttaatcaaaacatgtggcacaagtctgaaaggaaatttgtactcagaaataagactaattggatggaaagattaactgagatcccagcattgggaggctgagacatgagaattgcaatgattttaaaggtagcaagggctaataaagtgagagatactatctcaataaaagaaaacgattagagagaaaagtgtgttttatttatctttttagcaatacccctactattctgtaaattttttcctcctatattgtttcatgtaggcaagctggagtggaatttaccgtgtagttaacgatgaccttgaattcttgatcctcaagcttttggctcccaaagcaggaattacaggcactcactatcatgcagctaaaaaaaaaatttttttttttaaattttatatttctccctacctgtacacacatgagacaagtggtgcttggttggtgacaagtgtctttactcactgaatcatctttctggtcacatgcttatgtcctgtgttatagcaactttactgtctgtcccattagatactactgaccgtcttttccatttcaaatgcttaaaaatgtacatctgtgtttttaatttccttttgaatcagggtctcattctgtactccacacgggcctcaaactcatggtgagcctgtcttgattctaaatcctgggcttagaggcctggctttttgaaaagctaaacaccttcataaagattagtttagttttgatttgggatgaatcctttaggaagtgacttgttttgcttctggtgccataatcttgtctgcttccagtacttctcttcccgtctccccctttaagctagcttttctgtgtgttgtatgtatgtatgtatgtatgtatgcatgcgtgtatgcgtgtatgcgtgtatgcgtgtatgcgtgtatgtgtgtatgtgtgtgtgtctttaagctagcttctctgtgtgttgtatgtatgtatgtatgtatgcatgcgtgtatgtgtgtatgtgtgtgtgtctttgggtgtgagctatggcatatgtggagatcagaggccaacttggcagagctgtgttctttcctcctatgatgtggatcctgaggatttgaattcaggttgtcaggcttggaggcaaaaaccacctttacagtcttgccagtttagaaaacacttctagacaatcacaacacccacttttcttgaaagttttatggagagaaaacctagttaattctggagtaaacgtctcacattcatggtttatatagcaagctcacaagagaaaagaagcttttttgggagggtgtggggtggtttgtagacagggtttctctgtgtagccctggctgtcctggaactcactctgtagaccaggctggcctcacacttagagatctgcctgcttctgcctcccaagtgctgagattaaaggcgtgcgccaccactgccccacgaaaaggagcttttgaagccattttatagaagagaataccaaagccaaaacattgttcatatggtttaaaactgtcttcttgtgtttcaattcagatgaaatcgatattagatgattagtcagtactgctctgaagggaagaacagccatgaaaagagctgtcagcttctgaggaaaaggcctgtgccagtgtgcagtgggtttgtgcttgatgtttcttaggcactagatggtggagctaccttattgtcccctgtgtctgagtcctcattggaagatcacactcttacgtgtacctgaggaccatcgttggcagcagttctgcaggcttctagaaaccgcattggtgtcttgaggccctcacaaatcacccttggtaccatacctttccttgcacttgtactgttgatcctgacttttattactcatggcagcttgagtaataacaggaacattgggctggtgagatggctcagtgggtaagagcacccgactgctcttccaaaggtccagagttcaaatcccagcaaccacatggtggctcacaaccatctgtaatgagatctgactccctcttctggagtgtctgaagacagctacagtgtacttacatataatgaataaataaatctttaaaaaaaataacaggaacattactcaaggaatcataacataatgatgtgtgacttactgcattagaggaaaaccctactgtagagttctttcgttactgctcttttggccctgaactcctggtcctgtaggctcttgccagtgctggcattacaggtgggatcactaacctaaatggtaattaagtctctagtttagtaagtccatcaagctctgcagagaaaaattgaaatgtttagatagccgtgttaggaagttacttgtactgttatggctttgcctaccctccaggcggactggttttatgtcaacttgacccaaactagagtcatctgagaggagggaacctcaactgaaaatgctcccataagatcaaggatataggcaaccttgcaagggcattttctgattggttggggtggggcaattgtgggtgatgccaatcctgggctgatggtcttgggtgctacatgaaaccaggctgaagcaagccatgaagaataagccaatgtactctttcccatggcctctgcatcaggctcttgccttcaggtttctgccctgcttgagttcctgtcctgaccttcaatgatgaagtgtgtgtaagccaaataaaccctttcttaagttgctttggtgtttgatcagacaccaggtaaggcacttccattgtgtacactggtcttgagtacacacggggcttttccctagctttttaggaggttgggtggcagatagggtgtattgaaatagataggtttgtaggtattattgtcattaggagatgaccctctggctttctggcatagcaacccaggtatttctgtatttctctaattgaattggccagaaaatataggaagcctcttgacatctatcttactgctttcggtgttcccccaccccctccattattttctaatcaccattttgaagaaggctctgttctcaatgattagctaatttcttagttctcatctctaccagctgttaagtagtgcctgtttggggcagcactggtgccagggagaaatgaagggattggttagaactgagtatgtgtttcttgtagtcataccttccataggcgtgcagaccaagagaggctaaatgagtgaatgctcattctgtcaggcagcagtgttggctcttttatatgagttgttactagtatatgctggcttcagtcatgaacagcctggaatttggacaggcctactttgaatatatagggcacttagataatgggcaaatttgggaatatcaactgagttcaaattccagctcttaacctggttgtatgaccctgggcaagctacactacatggctgagttcttttctcatctggaacattgttgagtgtacttcataggctgttgctgggagagtcagggagatttttgatgtggaagcattttataaactgcatactgctgcacaaatggtcaaggtattattacacagttggaaatcaccaacttggagatatcaggcctgccagcagccttcctagctgactcagaaataaatctagtaaattcatagtgaacaatatatttagagtaaggctttttttttttttttgtatgtgagtacacatcagaagagtgcattggatcccattacagatgcttgtgagccaccatgtggttgctgggaattgaactcagtgcttggaagagcagtcagttcttaaactcttgagccatgtctccagccctaaagcaaggctttaaagatgatgtaacaatcccctagcccccattaccactttgcttttgaatgtctgttgtatcaggccaatcagcaaggatagattgagaattaagatcagagcagcacaaacatgtttaaaaggaatgtatgttccttgaacttgaaaatctgatcatggttcatccttctggtgactgctttcggtctcttgcatcaaatataaaccaacagaataagaaacctttcttgtttacaccatccagttaccttgcacctgtgcattatattctgcgtttagcaaagctgagcctcttaactttgcaagctctcatccatgcttaggcaggtggatttcctgaggagcccactatgttccctatggcctttaagctagactgccatattccaagaaactgactctgtctttccttgctgatgtctgggtgtgtgcctgttaggggctgagttttgtagatgctttggaccagcatatagttagtattcaaagaatttctttgtatagttcttttaaaaattttttttctttttctttttttttataacgtattttcttcaattacatttccaatgctatcccaaaagtccccccccccttttaaaaaatttattggtatatgtaagtacactgtagctgtcttcagacataccagaagtgggtgtcagattgcattatggatggttgtgagccagcacgtggttgctggggtatgaactcaggaccttcggaagagctgtcaatgcttttaactgctgagccatctcaccagccctatttgtgtagttctggaactttctgtataccaggctggtcttgaacttacagaggtacagactgtctctacctcctgagagctgagattaaagatgtgcagcttcacacagcattctttaattaaagcttaatgatggaatgtatccagtatctctgagaaggaatagatgtggaaaaagtggaaaaggaattcacaaattagaatttcagacccattattttaaagctgggaacctgtctattgacttaatgtcgtagaccccacactctagccagtacttgagagtggacagcttcttctgttgcttttggaaaagtgctccggataatttctcttcttccaggtgcattcttagtcatccacggtagctgaagtaagtgattcattttcatggaaaaataaaaattcatatgtaatccccttagctaattataagccagtagcattttttaccttgtgaaaaatggcttttctccttcatatgaaatcattccaatcagacaagtactcaaagataaaaattactgaaatcgcataccggatattctcccacttgtaggtgtataggctcattatgtgctttttgcacttctctcttacatcagttatcaaaatacaatgatttttaatgggtgtagacacaccattgacatggcttcacttgacctgttgcccccttgatggattttccacaggtttagtattgtaaaataaatgttttgtgtagcatgctttgtgtgtgtttagattcctcagtgttgtagaattactgactgaagtgtactctattgtcttctgggaggggctctgccaatttagggttctatgtaagggtgcgtgttaggcttttacaaagcaatatgggcctttgtaagtagtaaagatgtcagttgacttttatttaagtttctgttttcttgtctcagggcatttaggactaagaaatgtgaaatcactttgtaaaacaaaattactctaagaacacaatgtgttattagacagaaaggctttcttactgaagggaaggaggagagagcttgtataattgtacattttgagcatttatgaggttcttttctttgtgaatacgttggagatacttaagtaataaaatgacctggagtcatgttatttgtacctgtgatttttgttcctgtttctaaggtgggctttgtaccattaacagtggtcccttagggttgaggcttcctagcttgctcagttaaatacaactgagagagagagagcttttaatgtcttgctgtttgctctcatcctaagaaaatgtatcctttactaggaagcaagcatgtaaaacactaggaagagaacactggctttggagtcagattgaagctgaagatcttggctgtgtttagatgttggtgaccttggtcagattgtttactgctgagttctctgcttcccagtagggaggaagagtctcttcagcattagaggagggggatgggttaggaatatgtgtcagtgtatatacacgggagggacaggtaatctaagttctacaggtctgtagggcgcaactctacaaagattgtgtttctgagtcatcttcagctcttacaggatgctccagttgtttgaggaagaggatggaaattaatgtggctatttagcacttgcctttttcactaaggtgtgctttttccttaagtaatgggaaaattctgtgattgaatttttcttgctcctgcaggtttttgaggttgagataagtagctaagaagcaacattttttttttcttggtgtgtgtctgtgcccatgtccccagtcctattggactttttatatggaatctaattcctattccgttttacccaagttgctccctttctcattcttacactgcccaaagcagtaaagctctgtttgttctattttcagtcttgatgttggaggatgaaagagccaatgtgaatggaaagcatttaataagtagtcatggtctgggttcctatttaaattagtagcacatgcttttatctgccttgaagggttttggttatgttgcctggttgtggctggagctgtgacatcacacagcttggccctttacagatgctacatgattgattcctaatcagatgaggccctggcggacctggaacttgatctgaagatcaggttggcctgcctctgctcccccaagtgctgggattaaggtgcatgccacgactttaatgccagagacactgtggattccgttccttaatattgcaaggtttgtgaaaacagttaattgccgtgcagttacgattgcaggagtgttggtaagaaacagacagaccttcttatgagtgatcctcattattcctagttttgttgttgaacattaggttttgttcacttttcagctgtttacctgaagttttcttaaatttaagtagctttttttttttaaaaaaattattttttgtgattggggcttctgagtagccctgtctgtctgtcctagaactctgtagtctgggctggtcttaaatgaaagagattttcctttctgtgtctcctgagtgctgggattaattagtggctttcaataccaccgactgcttttgcttaccaattttttgtattgaaggctctgctgccacatctggctgaattacatacacttttctttgtgtgtgggtgtgtaagtggttgtctggtgcctgcagttgtgcaggtcggtcaaaggacagcttttgggaggagttggttctccttttgtgtgctttctcacctgggcactgaactcaggttgttaggcttgctggtatttagttgctttcacccaacttttacttagtaacagactatcaaccaacctacctttctttctttctttctttctttctttctttctttctttctttctttctttctttctttctttctttctttcgatgtacaatgttactctgtcctcttgagtgctgggaatgtaggtgtatgtatgccaaatactaagatgtttgcctctttttttttggatatattttatatcagaatggtagttttatttatttatgtatttatttattttagttttttcgaggcagggtttctctgtatagctctggctttcctggaactccctttgtagactaggctggcctcgaactcagaaatccgcctgcctctgtctcccgagtgctgggattaaaggcttgtgcgaccatgcccagctagttttattattttttttatgtatttcctacatgtcacacattttccctaaaagactgtacaacaaacacagtgagttgtcatcccaggaacaatttcttttttcttaacctgacaagttcacttgacatgcaaatgtgacacaagattaaaatgtggatcaggagcaacagttgccctcaaacagtagtattggtgctgagcagctttaaacgttttcttttcttttttagttgagaactggactgtgtttaacttcagctgtccttgaacttactatgtagactaagctggcttgaaacttgcatccatccacctgcctctggctggaagcaaagacagtgccaccacacctggtcccatttataagtttttgagatagtctttactggtttgaaactcattttgtagctcaggttgctctccagactcgcaggctcccctaagagcctgctttacaagcatgggccactgcacttggctagctttgaattctgacctacaaactttgctaagtagtattggtattgacaccctgacagcatttttaatcttcaagaattttaaagattcatgaaagtaatccttagtgattatctcctgagggcagagatcagatttccgtttaaatgctgaagcggtttatcactctccctcccccacccccccaatgcagggggccaggctggatctggatttaataatgaacttctgaagtccttttagcttggctgatgttagtaatgttttgtgtctttaaaaatgttttcaatactcaactctgtattgtaatcttcagaactactgttaggattccaaaccactgtggtttgaagctaggttggaatctgaaaggtggccaatgagagtgagaagaaaacttcctttaaatacaagatgtgtttggcttgagcttttctgagtctgggctctgggcacagcttagctttaggtcaagtcccatggttgaagaaatcaggggatacgttctctttaccctctgctcccctaagcaaagcaaaactaaaactatgactacatcactcatttttgtgagttagttgtgcagaacttcaacttgatgagcttggtgatgctatatgggatttttgtctagatcataactaataaaatgggttttcttttgggtttggtaactggagaggatcaagatgtttgaggaaaatgcatctgatttggaagtatctactctaaagctttgcttttttttcttttcttttttcttttttttttttaattccccgttcttattccactgcctgctctaattaagtgatgtctggcaatccccaaactgacgagactgggatgaaacatagtctctactcatttagcctattttcctctttcttccaggagactcgctgaacttgtcatgtgcttcttagcagagtttattggagcagtaggcaaagcttcctgggaatataaataatgatgattataaagaacagtcagtttaccagggaaggccattatctttgacttgcaaacctcttacagctagtgttttgcttccagttgtttaatacaaataagcactgtagccttacctcttttaaggaggtgtccttttccccctttgtacatagaggtcattcctgtaaagaacagaagatgtcaccttggccaagcaaacagcttgtttttctggacagacattatataagaaggctttgctaagtgcttttcaaggaacaagtgtctgggtgccttcttgcctgctgtcacagcagcaaagaatcttctgtgtgttgaatgctaaaagatttgtaatgccgataagtaggaatttactttaacagttaaaaataaaaattcaggatggttttaagttaatctgaggcttgttagagtaggccccgaatgactctctgtgacaggtagactcccctgctctttatgtttagcacagattacaacttttgagtaatagactaaagttgctgcttactaaaatactttcgttaatttaggccaaggcacagctttcaggagtccattttgtccttcttccactgtgtgggtcctgggaatcaaaccttaggtccctcggttccagtttgggaaaaaaaaaattttttttttaaacctgggaagccatttcttttgtctctgtaaaattgcagtttttgttggggctgggggatacgtttttcctggtccttgtttgcttttctgttgctctaaaaacaaacaaactgaccagaagtaaatttggggggagaaaactcatttggcttctatctagcttctcctatctccaccttcccagtagctgggagtgtaggtatgcagctgagctggggtgtcagcaacagctttacatttaaactttctgttagcactgagaatgtaatccagggcccaccttctgctgggcaagaaaagaacccttagcgctgaatatcaccccacctcccgctcagttctctttttaggctttccttagcccagaggatggactcctgattcttcctcccgaccgggaggtgatctgatcgggttgcagacatatgacagatgttggggatggaacccagggctttcttgcatttgaggtagccattctttcatctgagagccctaggccagcactttgagtactagactgacctttgcttgctgtgtcttttacaaattgccaactcttaagcttttcttttgtcttgtacacagttctgggcagtcttggtcctgcccccatgtctgtggtattttaaaccaagatgaggcatctcagtcttttcctatataattttatgtgagtgtaatgtcttttaaaacaattctgtggtttgttagtatattcagttatacaagtgtcagtgtggtcaattttagaacattgcagcactccacactagtgcttacttcccacccacttcactgagtttcccagcctctgacaaccactaatcttttctgactctgaggagcatctccgcgccccccccccccccccgccccccaatacttgacatgaatgtgtcaagtatgtggcttttgtgatgggctggcttttttcatgtaataaagatgaatctcacactgttgagtattcttcaaggtttgatcccattcatagtgtggatagatacaccacatgtttattcaactgtgctgattggtttttatttgtttgttttgtttttttggtcaattttacacaagctaggattcactatttacctgcctctcccctccacccccattttctttctattcttttttttttttgggatgaatcattatgtaaggctgtcccattgtgagcggccccacctctgcacaggtggttctgggaaccatgagcctgagagcattcctcccccatttttgcagttgccttctccagcagatgtcctgtgacctgtaaagtaaaagaaccctttcctctcttatgttgttgttggttttttttttttttttttttttaatcacaacaccagaaaccagactaggaggatacatttggggttatgtacacctttttcctgttgtgtgcaagcttttatgtggcaataagattgatagcatttgttagaaaatgcagtaaatggttagaaaaagtacaaaaatgctcattatcactaagtctatttactacagataagttatttctatacttgccttaaggccctccacctctggggttcagtgggggtcctttttctgattggctgccactgttttttcttaaattaactaattcattcatttattgagtgtacagtggaagaggggaagtgggtcaagggagagggagggccggtgggcagtccacccttccatgctgggagaatctttgggaaggaaggcagccagtccctccaaatggtgcttcatcaaaatagactttggttctggcctccatttgattcccaaagggcagcctgggaaccctgtctcactgtggtctaaacccagcgcacattccctattaattggtgagtgcttggtgaattctgcttcacaatgatagaggaactgacatcaaaggatcaaaaagctacgttgctatgggcacttggccaccattagccaattatccctgtggcaacttttctgacacctcctaccttgttcaacatgccagagcttaaatttaatttttatttcatgcgcattagtgtctgagggtgctggatcctctggaagtggagtcagacaggtgtgaactgtcatgtgggtgctggaaattgaatgtgagtcctctagaagagcagccagtgctcgcctctccatccctcttcactctcctccaaaacagggcatctatctctgtgtacctctgtatatccttgaaggcaattgtagaccaggctggcttcagactcagatccaccttcctcttcttcccaagagctgggattaaaggtgtgttccctacttggctggttgtcacttttgatttagccattattacttcctctgcccatttgtgactttttaaatttattatgtatacagatttctgcctggatgtacactggcataccagaagagggtattaggtcacattatagatactgtgagccatcatttggttgctgagaattgaactcagaacctctggaagagaagaagccttaagctctgagccatctctgcagcccctcttctgtccatttgtaaactagtgccatttacatgtttatgtagaagaagccctatattcccttgcttagtggtggagtttcatggttcatcatgggatgatttgcttcatgtggctcagatttttttgtcctgtagtaggttttcaaatgagtagttacctcaaatttctggttttcaggtcttccttcctaaacggtcctactttgggtaaaggacggacacacccacccctcaacacacaaagaaaacacacaaagtttctttatgtacctctggtctcctggaacttgttttgtagaccaggctgaccccagggagatccttctgaatactgagattaaaggttaaaaatgtgtgttaaattttcttggtcctaggctggcctcagatttatccagttgtgggttaacaggcataagccaccacactggtctcatttacatttttatgtgggtagtgtcaatgtgctttgggatgaagagttaactactaagaatctctgagaaaatgtgtgtgcgcgtgagagtgagtgatagccttaaacaggccatcctgcctctacctcccagcctgctaaacactaagtgcttttcatgataaatgtaaaatgaaagatctttgaagaggtctggaacataattctttaaaattctatcttctgtatgtgggtgttttgcctgcatgtatgtgtgtgcctgtagaggccaaaagagggcatgggattccctaggattgaaatgacagacagtattgagcttccatgtgggtgctggggattggacccaggtcctctggaagatcagctagtgagagcttagctactgagccatcctggctgctctttaaaaaaaaaaatacttctgatttgttagatttattcttatgtgaagttgtttagatgatatagttagttgcttattggaaatgtgggttttgctcatttttaagcactcagaaactaaactaaagcaggggcaacaagagaagtggagtgggaaatttgcagatgactggtagagtgacccccatgagattggttgggtagcattctgtcaaggttggagggtacctagtgtccatggtgctaaggatgtccactctttttctcaggattcttgttggtaggaagccaaacactaatgggtctatgtttggaaagttacatgttatacagagtttaagttcattgtcaaagtattttttttctttctaatgatgttaactaacttcacatactcccctttgtctgtaatgacttatattgagttctgttggaaggccattaatttagcttacctatttattgggtgcccacttcaacttagaagttagtgtgtccctgggtgtttgtgtgtctaagaagttagtattttaagctgcgttaactggaaattatgttctgctgtgctgcttttgtgtggcgtacctatatacatagttgtatcatctggaaaacagccgctacatccctcccactaaaattaaaattgcttattagagctaattttagaattgagttagaactgccctataatgtaatgcagactatttcccaataatgcctaggttaacaatgatagtcttgctgtattgtgcaaaaaaggcttctgttcagacccagctgggtttcaggcttaattcattgctctatggtgggatcaccacagctgctgtggggcctttacaaatgcaaaaaagctgtcagtgtttgtttcatcagctgcataagtgatgaggccaagttgaggaatccattccagtgcgcagtgtgcaggctgtagccattattgtttacagaattagtgtgttggagctttaaaatagttggcacatcatctgccctttaagaggcgtagactaaggaacctgggacagttggttgtccttgtagtgcttgtgggtcccggtcctggtcttttaacagggctcttgtcttaaccccttcccatgcagttagagtgctcaatttttgtcctagatttaaaaggcatttatctagaattttgcaattgacttttaaagtcttaatcatctcacagctccaagtaggtatgactgtcagccgaagcttaaatagtactcaagatttagccttgtgagattgaatttgtgatgtgagacagctttgggaattgctttcttttcagcaatctagaagttaggaccacttgacatcagacccacttggtcaggacggtttctcttagttacattgacttcttcaagtcctgatagaactatgggtccacgtccagtttttgtttggcaaggaggccttagggaccagtatacatagtttttcattgatatttctttcacatgacagtaaatgttcctccttatcttcctgtgtctctgccccttgaaggcctgagccttgctatgcagccttgctttgggtttgagaccctccagccctgtggtattgggttgaccataggacttcatacattccagaccaacctttaacccattcaacccattcagttctctagtctttgtaaatgttggagggcatggctactctgccccaactgtaagaatatagctttttaagcctcttaagccaactaggatgaagaactgtgtttctatattttattcccagttgggaaggccacaatagtgctctcccacattacagaaggatgtcacaatcttgaggggctccaaaggaaaggtcagttatcccactgagctttatctggaataacgatcactcctgcttaccaaataaaccatagctatacccaggatctgacctattcagtgggttttcctacagtcaagtgaccctagtttctggattcctgagcagagaccgtcttaatctctttgattctaggaagtgtttgaagcctaaaaggacagttccacatggtgggctgattaagcagggtttggggtaagtaagtccgtgcttggccataaagtattccttaaggtggtatatatgacatgtatttatttacctctcagtcatagacaacttccaacagagaacaaatacagatagccttctaacaccctttctcatgtgctcactctgaacagcagtgatagaaacagtgctggccacatctcccccaggggaaggactaattttacagggccccagaagggaacagcagtttcatggtcattgttgttagcccctgtgcagtacttggttgcacttcccttgcttgacccgtttctcctgctttgggtgtttcgattatatttttggggttcagaattcttatcaaaagcccctacttttttgagtcattttgagacaagtcattttcttgtgatggcttgaaaagttgttgtacatctttggtggtttaaatcttctggtgaggtaagcaaactgagtgtgtgtgtctgtgttctggtaagtgggcagtttcttcttaggagcacagatctccctggtggcttgcttcctagaaaaatgtgctgctataaatgacaaccttagtccctgtcaacttaatttctgcgtgtccatgaagtatgttatctttgacttagattttggagtggggcctccatccctgacagaggtgctctgaagcatccaactgacctccaccttcttcagcagctggtttcttttctttttcttttaaaagatttatttattatatgtaagtacactgtagttatcgtcagatactcaagaaaagggcatcagatttatggatggttgtgagctactatgtggttgctgggatttgaactcgggaccttcggaagagcagtcggtgctcttaaccactgagccatcttgccagccccagcagctggtttcttaaagctgctttgattggtgtggtttactgcttgttggatggcaaaccttatatataaatcctccttgcctataggcagaaacagtaagttgagtactctgcatataaacaataatacccagaagatattcttgtttcttggaggttacatctttgctaactcacaagagggcaggtttcctattccttcattcttgttgtgtgaagtagtctgaggtccatttgtggggaaacaagaggtcggggcatgtggtctgcagtggttgcttgagaggagcccgaatgtgagctagctggttgtaagacacagtaggtgctcagtagaaaagtgtgctactctgggcggcagcggtggtgcacggctttaattccagcactcgggaggcagaggcaggcggatttctgaggccagcctggtctaccaagtgagttccaggacagccagggctatgcagagaaaccctgtccaaaaaaaaaaaaagtgtgctactccttggagggacatttgttgtaaaaattagttcaggtacacagttgttaaatcagattttaaactatatagtacattgcagatgaagttggaactctgctgattgtagtcagtgcctcccgagtacaggtcaatcaggtgggctgctaagggtacaccttggttgtgtggtagcgaggatcttaggaaggttccagctggggagccagcccacaagctcttcactctccacttacctgaatgcgtgatttctatctaggctgtgtgtacaatgatcctaccacttgtgcattttatttacattcttgagggtgtgtatgtgttccttgggtgcaagaataaactgaaattcactaaattctgtaggagagaggcaagttggtttcctgagatacacattggtagcctttcaaagtgttgatggcttagaatttctaagtttctcagaggggatgtttagtagatggaatatacaatgtataaagcagagtcctccctgctgcagagggtggctgggtagctcatgggacacttgtttctaaggagcctttttactagaaattagtggtggctaccttttccctctggaaaaactagcacttaaaccctcacagacaacatatcttgacctaaatgagttttctataaaagaatagagctagacttttttttctgatagctttcaaaacatctgaaaagctcatctctgaactttcagctgttgacagtggcagttatcctgctactgctaatagaaaataaaaagttcatttgccacagtgattgtcatttccttcttaggagcgcagcttaactccaggacttcatttagtcggaggaaaatggttgctacctccctgttaagctgttttccattctccagttgtagcagaaagactgttggggaggcctggggagctgggggtcacataaaggaagactaagaagggctgctgcagaatgtgttcttctgtctggaagcctgtgtggagagggtggtagctttagaaaagggggtgaagtaggagggggcagcagtcgctgaagcatgacaagcttccaaaggccccgggacttgaacacaaaaaagagagctttttgcagctctttcactgcacttgtctccctcagctccatccattctcccctgctgttttgtaaatctcccagttggaaatttctaacctgggagagcttcttcccggcttcacttggcaggatgctcacacgcagctgcaaggaatttgcttttccttttcacagcagctctcatttaaaagcattagcgagactacaaaacaaaatacaaacttgaggatttttcagaagtggaagccaagtttaattaaagtcaaggaagttgggggctataactcttttgtgaagcctcttaaagtcagatgtgagcgtgtgccagtggaaggcaggcaaggtgggaaatacccacgctggtcttcgttaagaaatttaaagccttgcttgtttggggtatgcttgagggatatcctagaatttatcaaaggatatgcagagccatcatctggcctaagaaagaatatttactagtgggtcagtagtggtttctcccttcttgttggaggaagaacgcctgtaatatctttgtatttcttagccctctaaaaaacctcctaattaggtcctccccttccatatgatcaaaccactgggctggaaaaaggtctaataaaacatcatcaaaattttctcccttgccatggtggttaagctcattgtctgcatttgggtctctaccagtgtgctaggccgacctcaaactagtaatcctcctgcctctcagtgctgggatttggtaggtgccaccattcatatattcatatatatattaaatctgatagtgtttgggagtacccgagtcctctattttggaaggcagtttcttaatctaataagagacagcatagttcattaggtcccaagaaaattacttcactgggcaggaggcggatctcagtggtatacagaagcttgtgctacttgcagggttcagttccctgaaaaccattgatgaaggcacctgtaccagaaatttagcccttgggtcagtcagtatctggaaatgtcttagttgtgttagatgcttggtatctcatggacagaagatgagtagtcttttgagtatttgttgaaattgcctggagtttagttttgacacgaaattggttagtgttattaacattccttttatgagtaaacatcggtagctagatacttgtgtttgcagaagggaacatcagtgtgtttagatccttgtacctgaggtttaggatttgttaagggtaatttttggattctaaacttgatcctgcttgttaggtaggcacattaaaaacaaatcaaaacaaaaaaacaaaaaacaaacaggtgtagaattgattcctttattctaggcaagcatggtaccaaggcatccttaatccttgtttgtctcttttgttggtaggtcactcattgggtcttctttcccatgtttgcctcaaccagagcatctttgtattaattattagcaggggttggtgttcctaatgagacttttggaggtttttgaagtagttgaaggtgcagtctggtgtatttttgcacatttgatcaataccatttagaatcaggttcttgactggagggagattctgaaattagacattggttttgaaagaatcatttgtcaaataagagtaacgaaagtgagattaaaaaaaaaaaaatagaggccaggcagtcgtggtgcacgcctttgatcccagaacttgggaggcagaggcaggcggatttccaagttagaggccagcctggtctgcagagtgagttccaggatagctggggctacacagagaaaccctgtctccaaaaaccaataaataaataaaacaaaaaggcaatgtaagggtgtcaaaacccatattggattgcaaggcctaaggattgtttttgaagccctcttttggaaaccagatgtcctagttagttgtgtgtattgtagtgttgttgtaatgtccttttcctagcattctgtgtaatctcgttggacatacacagctagcaatataaaacttcctcagacagtctgtctgccagatacttcctatcatgggtttgaatgtgcattttgtaaatacattaaaagttaaattttaccactaactattcatggcttaccattatctctgacttacctatttcccttacattacagttgtggaaacaaggctaaggaaaggtgtttgtcgccctgtggtagtttcttaatgtgtctgtacgaggattccattggcttggaaacattacagtgttttggtcacctcataccttgggtttttttttttttctttcttttttttttttttttaaagttttataaaacttctgccaagtgcttaagattgtcttttaaaatttctgtttctttcatgtgtttgagtgttttgcctgtatgaatgaaagtctgtgcatcacaggcctggtgccctaagaggccaaaaaagagggtgttagataccccagaaatggaggtacagatggttgtgagccactatgtggctcttgcttcaccctgctcgctctgcgccccccaaccccccctcccgctccagcccaaaggtttcttatttcttattataggtggttgtgagccatgtgtggttgctgggatttgaactcaggacgtctggaagagcagttagtgctcttaaccattgagccatctcaccagcgagtacttttaaccactgaggagcttttcagtcccacaattttgcaatctttactctcaaactttgccgaatatctgaagatggttttgaacacctgtctctacttccatgagctggaattagaacatgggctgttatgttcataatgtttgtgtttaaaccaggtgcagagaagcaggtgggtcccacctagaaagtttgatgctactttgatttatattggccagaaaggaacccataatgagactgtccctgcccccaaatcctagagaaacaaaaccccaaacttttatcagggtacatttcctgaagggtgttttttttttagaacttgggtaaattagtcagggcctgggctttgagtccttaaagatgtggtttttactttgataatatgctcaaaaaataaattattgttccaagcaccacacacacctatgcgcatattctcattgatataacatgcatctctttctctctctctctctctctctctctctctctctctctctctctctctctctctctctctctctctctctctctctctctctctctaacataatctgatttgtgggcagggatggcttggagttgacagagagagatctacctgcctctgctgatgtacctctggcttgtgcttgctgaggccagaagagggcatcagatgctcaggaactagacacacttactgacagctgggaatctgctctttgggtggctgggagtagaagagtaggagaggcaagtaagtattcttaaccacagaggtaaggtgctagatgatccctggcactcgggtttgggtggacctagggagaggtttccactctgcctttccccaaaactgattgcattctgagatctcagcattgagacccttaaaaagctccacctgcagttagttagaaacttgttgtcctgtgggagtcagggagaatcctccaccctaaaatattgaaatttttattaaaatatataaatatttaaaattttgaaatagtggtctctgggaactggcattaggttacaagttgctagtattggattgcatgaacctttctagtagtgtcttatgtgatagaataaaaaatgggttttctgggttacttgtctgactttggttaatagaccagaagaacacagaatgtttgcttggtgcctgctaggagtttggaccaccccaggacttgggacagtagggaaactggcgcttggggtgacaggtgaagagaagaaaaccttacccaaaaggaagtatcactcttgtttgtgctcccctccagatgtgtgtgtttgtgtgttgggggggtggtattatatttgtgcaagccagagatcaacattggtcgagtgtctctagccatcagttttatttttagagattatgatctcattgagcttagatagagctcattggttaacaagattggcttgctagccagttggagtactttgccccaatttctccccagcatcttagttacagcaccctagactgtccaatctgtgtgggcactgggggtctgaactcagatcctcacactttcaaagcaagaactttttactgactgagctctttcagttctgaacatagagctgttggtgggaaatttacctgcacagcttcttcattagacactgatacttgttaatttaaaatccgctgtaataattggaagcagctgttgtttccctgctgactaggtgggtgctggagtcatgcttttgaattagctggacttggactgttcgtattttaattaaagtcccattttatcactttctaccgcagtttttgcctctccagtgacctggattctacagtaatagatttgaattatatgaatatctcagtagaaaggtatataatcttaagttcaaggacttgcagttgatgttcttattaaatagtgaatataatagcatggtgattcccttttcttctctgaaccttgcttctatatctatttagtctttctatttagttgatactgtcttatgtggggatattgatgtattaacctaattgcttctgtcactgctaccagggaagtcactgtgtgaaacgggacagatgattttctgcttctctttgcctaatagagtttgtacattaagttatgaataatggggtttaggggtagtggggatactttttttttttggttttcgagacagggtttctgacagtgctgagattaaaggcgtgcgccaccacgcccggcttggatgcttcctttcttaaatggagaaaacccccaattgttggagagaagctgcggttgagagctgtgatgcgtcctctgtttaccccgcagcttaggtgggaaggttggctggaaagttgcatgcactctttctccatgacacgagcagggaagggatgtgctgccttctcttcctcttggatctaagaaccgatcctgggtgaaagttatgaggaagtggttctggttaattttgttcttccttttcccttgagttttgcttttgcagacttgtaggttagagcagtacagatacattaggatccatgtggctgttttgaccaggaatcaaggattcctggtctatgctccatataggagaggtctatggtctaatggtttggcactgctctatactgagcgctgggagtggaactggagaaactctgagccctgcttatatataggtttagtcagttgcaacagtgcagcaggccctgcacactgctctactagaagaagttgctcaatggtgcacaaactgattgattgctatgcttaagtagaggacatgtggtgtgtcttgtgctgtatggaatcctgttctgagtctaaatcagcagtccttgactacttataacagcctcttggaactcttatgaaccatgaggtcagaaaactactactacaaaaaagtcatggccaatgtttcatataggagagcttttgagtagagttaatactgtagcacctcaaaaaataaataaaacagaaaacagcagtaaaaacttgagcaaatggaggaaggaagctccatcatgacactgttactggccagtgaaagaaacagtgtacagatgaggagggagaaggtctggggtcccttgactttaggagtggttggactaggagtcgattaactcctttgtgtagagctctaccttaggacttaagtttagacctgcttgaatggccttattttgcttgagattttcgtatagaactgaccatgaaatgggctaggtagggtggaaaatagtaaaagttatttttttttcttttttctttttctttctttttttttttaaacatggaaacaagagctggtctctcagtgcagagacccagaattatataaagctatttttttttaaagatttatttatttattatatgtaagtatactgtagctgtcttcagacactccagaagagggagtcagatcttgttacagatggttgtgagccaccatgtggttgctgggatttgaactccggaccttaagagcagtcgggtgctcttacccactgagccatctcaccagccctatataaagctatttttattggatattttctttatttacatttcaaatgttatccccattccgcccctccccacaaccccatccctcctccctttgcttctgtgagggcgttcccccaccaatccacccactccagcctcctgatcctcgattcccccacactgggggccttcataggaccaaggaccgaccttttctcccattgatcccccgacaaggcgtatgcagctggagccatgtgtactccttgattggtggcttagtccctggcagtgaaaggtatttcagctctagtatagagagggctttccttgaagaagactcttaccctagagtaaggatcccagacttgctttttactgggaagaatgccaccccaatgaagcatgaactggaggtttctagctgtcgttcttaagtcttggctggggctaggattccccctatggtgtgggttatttttaactttttataatcttaggaccacacaataagtaaagggggtaggggcattcacaaaagccatgtcaaggacgaggaagcagaaatctcagatctgcaaagaaagtgtgaagagggaaattgctttaattcaacccccctcctcaacaaatgatgctacatacataatgtaatctgcctgtctgtctgcctgtctgcctgcctgttttagacaaggtcttaatatgtacctatggttgtccaaggactcactatatagactagtattacagaaaagcgctaagccattaggccctgactacctgtttattatggacaatagcctccttttctcccctccactattcatttaaacaccttagctgtggccctaaatgtttgttttctggtgcatataaaagaagttctctagtatacagacttaacatttaaagttcctggtcctgggatgtgtgtgtacacttcaacattagcaaccaccagaatgacttgtgaaatcacttgaatcctgctagttgaagcacttgaatcctgctaggtaatacacatctttgcctaccgtgtgagtgtgtgagtgtgtgagtgtgtgagtgtgtgagtgtgtgagtgtgtgagtgtgtgtgtgtgtgtgcgcacacgcacgcacacacgtgcacacacgtgcacgcacgcacgcacgcgcatagtgtataaatttgttagagacagatacttctttgtcgtcctgggtagtttggagcttgcttccatcctgctgctactgggtcctaagggctgagatataggagtgccacctccatccattttctatggtagtctgggctctgaagtcatgaatatttatgccttaaagtttcttcactgcaaatttaagagagcatcacttgcactgatgcactgcctaagacactactacgtatgcagcagttctgtctcctaccccgtgtgtatgtctgtgtatcaatctcctgcatgctttgctgtctgcagagaccagagaggaaatcagatttcctggaaccagggttagagttgggtagccgcagtttgggtgctgggccttagttatgcacactagcactcatccacctgcctcttgtagacttgactaagctcactcacagagacctgcctgcctgcctctgcctctgcctctgcctcctgagtgatggatcaaaggtgcagaccaccatgcctggctggactgctcccccccaccccccaaagtaaatgtaggtctcagctgcagtcatgctgagtctgtttgcttaagttaaattcccacctgagaaactcgatcctcctttaaaaggaggaaaaaaacgtcacaaatttccacttcagggaaaaaaaaagatttaggttttagagactcttgttcctatagggtttttccttttttcctttttttgtcttatatgctaaatatgatcataaagattaagatatcagtgaagaaaacatacatattattcatattcatcatagtgataatagtgacacttcttgaaatttcttctcagtcaaaaaaatggccagtcaaggtggcaccttcttttctttctttttttttttttttttaagatttatttattgattatatgtaagtacactgtagctgtcttcagacacaccagaagagggagtcagatctcattacagatggttgtgagccaccatgtggttgctgggatttgaactccggaccttcggaagagcagtcgggtgctcttacccactgagccatctcaccggcccaaggtggcaccttcttaatacttgtgtattaccaggtagaaaatccaagctggctcatagaaggtactgaggaagtgctgttcttgttttgttgtgcattagctggtgttaaagttgtcagggtcagtgaactgtgaggatatctctggtttgtgtcaaatcgagaaagagtagcatacaaataccacatttggggaggcacagacagcttgggtgcatggtttgcaaaccactaattattccattaagaaaactttgtttgtttttgttcatttgtttttttttttgtacacagtttatctgtcctggaccaggctggccttgagctctcaagagactggctctatgtgggattgaaggggtttgctaccaccacctggcatcttcttttctattttctattcaaaactttcttattaaaagtctctggtttgctctggtttgggccgggcgtggcggctcacgcctttaaccccagcactctggaggcagaggcaggtggatttctgagttggaggccagcctggtctacaaagtgtaccacacaacccccccccctcccccaagctgaggaccgaacccagggcctcgtacttgctaggcaagtgctctaccactgagctaaaatctccaccccgtcttggtgtacttttaagaagtttaattcataggatatggtttaagatatagctttgtttgaaagaaatcagttgggaactcattatgaaatgaattaattttaaagttgaatccactatcaatttacaaaggttcagagcaaaatgtacattgaatgttctgtactccattcctttctcaagagtagtttgcctactctcctgcatacttttgttgtgtttaaagagcatgctcacaggtttttgttttggagatagcctcaaattcagatctacccgcgtctttctcccagtgttggttccaatggtgtgctccaccacccctggcagaagcagtttgtctttgtggacacacacacacacacacacacacacatacacacttgtctgaaattgtagggcattggtctgttttagctttgtctcactagtatcctgaggcttcttcatgtcattgtttttcctgctgtgtagtgtctgattggacactacacatttggagtgtatttaaggacttaatggtttctttcctaaggacttttctaagtccctgcatataggacatttagattgtttgcactgtttggattaccttaaaaatgaaaacagacatcttccttttttcacacacgatatgaacataggtttaattgtaagtacagattcttttctcaattgaagatttaagcagtctacatattcactaacttctctctttaattttttttaaaaaagatttgcattgtgtagctctggatggtatagaactggccttgaactcacaagagattgctgcctgcctctaccacttgaatgtaaggcacgaccatgattggtccagtgttcactagtattaaaggagagtctttttctccttgtcatcatctactgttttacagctttttcagaaaacagatttgatatttgtgtgtgtgagttggtcagttgtgagtcagttctgtgctacctgtcagttctggggaatcagactcaggctgtcaggctcagaagtgagcacccactcctgtttagctacctttatgaccctgttctgtatttttgagatagggttttatatagccaggcaataaccctttatttttctgcctgtgcctcctgagtgctggcattgtagacattcaacactgtaaactttgacaaccatctttatgctgaatacatattcaaatagtcttaagttttcaatagttaaaacttttatattgtttttgtctttgcttagggctactgttcttatcatgaggatataaaatattccttagagaatttctcataatttttcctatttatgtagataacacattacatggaaatttatttatagacgggtctcactatgtagccctaactagtagctgggtgaacagaactttgctagcacatcaggacttgtggtccttcctcagcaggtgtggtggagccacttgagaattggcttagatagagccccactcatgggccacacttggtgaagtctgctgtatgtgttgaatgtagcaatactaaggtgtatatatagaggactaaccctgagttcagcgatacaaagtatgcttagcatgaacaggaccctggatttggaccctagtaccgattccaaccccaaaacaaaactccctttatccatgatatttcagaaaaataacacttatggatgctgctattaacctaacctttctctcccccccccccctttttttttttttccccagacagagtttctctgtatagccctggctgtcctggaactcactttgtagaccagcctctgcttcccaagtgctgggattaaaggcgtgcgccaccaccacccggctttttttcttttcttttcttttcttttcttttcttttcttttctttcttttcttttcttttctttctttctttcttttttttttgccatttactgttgtcagttttcctttcctttcctttcctttcctttcctttcctttcctttcctttccttctttaaagaattatttacttattttatgtaatgagtatataagacacaacagaagaggacatcggatcccattacagatggttgggagccaccatgtggttgttgggaattgaactcaggacatctgggtgctcttaccactgtgctatctctccagccctgtcagtttattttcatcatgtgattaattataatacaggaggtggttgtatggtgctattctccaagcataactgctgtcatcttcatcaaagcagctcaagatgtggcctgttgattcataaaaagaggggcgggctggtgagatggctcagtgggtaagagcacccgactgctcttctgaaggtccagagttcaaatcccagcaaccacatggtggctcacaaccatccgtaacaagatctgactccctcttctggtatgtctgaagacagctacagtgtacttacatatagtaataaataaatctttaaataaaataaaataaaaagaggggcaggagaatggtcaccgaatcctcctcacccaggtctttcttaaccccgtgccttccatcttgctgtatataatgttgcgctaattgcccatggtctcaaagtctttttagtgctatgctttggagtggctctgactccttagtcgcccctcactcatgctctgtaagtgagcccattcaactcaatagttttccaagtttttctcagttgagtcatgttggtcccctaaggaaagagtttctacaacagaaacttcttagctagacttactgtgaagcaaagctaagcttcccctgatagaggctgctgtctctaccttcacatacggacctgggaactgctttgatccctcagaagccagttttagttctctaacttactttctagtaaatgatgtcacagaattctaggataatttgtgatttttcactttggccatcaggttggaacagggctgtgtatagtctcagttgctgtaccttcttgcatacaacaaatgttatttctagctacacatccctcttcaagtagatcttatggcaacaaaacaattcttaagcctttaggattgcttgtaatggattgttgcggtcataaaatatacgttaggcttcagccatgcatttaaaccctcttgagtgaacaggaagcaggtggacactatttgattcattctctctgagcaagaaatttcagggtctcccagtccagggtttcataatgtagcctagatcacaggcgatcttcctgctgtagcttcctgtaagtgcttaagctgaaagtctggggagatgaaggaagtcagtgaaggaagcttactgtgcaagcatgagaaatagaatttgaacctctagtaccgatggacaaaaagctaaagctggggttaacagggcttccctatattttagttcttggagagatgcagaagtatcgcacgtttgttgggcagtcagtctagctaggtttgtaaagcgagttccaggacagccaggacacagaccagtctcaaaaaacaacaaaatacaatttgtttttgtgagcatgtgtgcatcatatgcaagcaggagcccacagtttagcaaaaggcatctgatcccctgcacctggagttaaaggtgattatgagtagctatatgggcgctgtgctcctaatcaccaagcagtgtttccagtctcagactttaccagtttcaggctcactgagtactttggcctggttatatgtgtcatggcatttggctacttcctatactaggcgaggaggccagactccatgatttggagcaccaagtaagctgagcctgtctgttgctgtttgttgtctgcatagcaagatgtagtagtcaggttttctcaaacttgtgtaatgtgatcagaaatattcataaagaggatgccctatagcttaggaaggaaaatcactctattcaagggatgaagctagctaaaaggcctgcacttgcaaggatcagaataaacactaaaggaagaggagagagagagagagagagcaagagagagagagagagggaggaagggagggagagagagagaagagagagagaagagagaggagagagagagagaagagagagaggagagagagaacaggaggttctggagcaagtagtatgtggtctaggactctagctaacccaacagcttgtaaagctgccagtgggaggtgctttgttgagaacctcaacctgatgcttgcttttgagtgctttttacttacttaatgaccctgatggtctgtaataagtttggagaaggtctagggttgaatttgaagcctcaggtagtttaccttgagagttgacaattgatttgtgcttagttaggcctgcataacatgtcatttgatcttggttcctttctctagtgaggggactgcagatggccttgctacacagttgccagagcaattgcttagccaaaagtgattgaggttactgctgtttgttttttcacatcaaacgagtgaggtttgggtatggctattttgcatcattttctttttgtgccggcagtaatgaaaattttgcctcctttgcccgctatgggtatcctgtttgtccccgtgagcatgggcttctgagaatctgttgattttttttttttttttaagatttatttatttttatttatatgaatgcacagtagctgcctacacaccagaagagggcatcagatctcattacagatggttgtgagccaccatgtggttgctgggatttgaactcaggacttccagaagagcagtcagcgctcttaaccactgagccatctctctagcccctctgagtttctaactgccttttctaccctaaagatgttaagttttctctagtctttttttttttttttttgacggactaaagtggggttctatgtatgtcctaaatgctggtgagaataaatgagagactcagtatatctttgtctccctgtttgtggttcatatggtgtagtgatatgcaggctggaatctgtcagcatttcagtagtgaaaaaaaaaaaaactgaatgatgatctttctatccacattttgttggtttggagccagggttttccaaccagtcctccaactggcaattctcttgccttacttctcaagtgccagggttataggtatgtactgcctcatccagatgtgttgttaactctgactactacatatttccttttgtaagcatttaagaaacttccttttaaaggcaagtaagaaatttgtgcagtgtgtttggtgtatacttcccttctgctttagagctgtgctcctggcattccattgtgattggacaagtgatgtttaagcttcatctatagagaagcatcttgtcttgggaaacttttcttatttccagcttttttgggagcttattcataaactacatttgtaattcatgagctctggagttgtcttcaactctctgcagccaagagagtaatgagaaagtttaaaattacaattgttgccagtcatagtgacacacaccctttaatcctagtgttcattgttaaggtggatctttgagagtctgaagctagcctcagaggtaggtaggtctttgggaatgaagggtagcctggtctgtctacacagccagttgcaggccacctgttgtaagcaagcagataccaaatcactcattttggaatatttgaagactgaaatgtcttaattactagacaatagatagagcctctttgcaaagcccatgtgcatacttccgtgtttttagaactgttgtggtgtggatatctatgcatatgtatacacatgtaagtatggctgtgtacatatgcatgtgtatacatatgtgaaagagtagggagagagtaatgagttgctaaccctttttccatgatgttgggattcattaaccccaaggactttggttttgctcgtttttttctttaagttttagattttaatgttgtcctcatttaaaaaaaactttttatgagattatatatcatttctcccttcccactccttcctctctccaaagtatttttaaacttatgcgtatgtgtgtttatcctgaatatgtgtaccacatgcatgtctggtgcctgcagagtttagaaaaggatgtcagatctcttgtaactgaagttctggacaattctgagccactgcgtgggtgatgtgcacttttaaccacccattcagttcttcagtcccacatttttttttttcatttttaaaaatatttgtatgcaaatgtactgcagtcatttggtgcttttagagtggggggggggctgatctcacactggaggagcagacagcagtgaacttgtcatgcgagtcacggtgggagctgaggtcatcaggccgtgagtgccttctctagacccaacacttggagtccttactttgcattgacttttaaagatgggtgagtcagactctgttagtgtcactagatagctgctttttaccaagttagttttggcagacaggaagcaaatattggcaagaagacttagagaatttggtaagattcacactcaagcatttaaacatttgaagcagtgtgtaggtgtactgaaatcccaggctttaaaaaattcccaaggaacagctagggacatggaaagagggaaagttaccgagtgacagatggggttttactcaggtcagcagattggaagttgaacttcttttgtgagaagatcagtaatttcagaagtgacatattacaggactttctcattctgtcatgaactgtacacattttgctttgaatcagccagcattgtgttccataggcatttactgcatctcatttataatgctatatatttttaaaactttcccattcagatctcacctgtaactggaagtgacatttatttattgacagtgtagggaaaattacagcagtgggtaattgcaaacctctttaattttaaatgcatattgctgggcatatgttacttcttttatgaaattaactctactgttagtaagtccttaaaaatatctcttgtggaaccattcagttctttccacagtggttccataggaagaatgaactttgaatatcctttattccaaaatatcaggaaattggtttgccttgtgggtgtgatgatttgcttttgacttccttttgtgaagtagtgaaaacaattaaaataatcataaaatacgtattttatgtgtgaaagctttgtctgcatgtttgtatgttgtgcaccacatgcccttactgaattgcaggaaatgtaattcaggattggtttgttggtttttttctgtagtcctggctgttctggaactctatagaccaggctggcctcgaactcatattcgcctgcctctgcctcctgagtgctgagattaaaggtatgtgccacctctgcttggcttgtttggtttttaaagcaaacacttttatcatatcagtaagctatgcaaactgtctaaccaatagaggctctaacatgttggattaatagcttcacatgagtagtgcatgtcctgttttgcctttcaatggcttctttaggtaaatgatttatagtgtggtcacttctcatgtgttttattcttcactctttttcttttcttttctttttttaaatttatttattatatgtaagtccactgtagctgtcttcagactctccagaagacggtgtggtgtcagatcttgttacagatggttgtgagccaccatgtggttgctgggatttgaactccagaccttcggaagagcagtcgggtgctcttacccactgagccatctcaccagcccactctttttcttatttggcagttttgtttgctctgtatggtgatcacttttatttagttgacttggtggcacttttaattccaggcagaggccattggatctcggagttgtacatagtgagtaccagggcagtcagagatacattcccaattccttacttacctatctagacaaggctgtccattcattgtacagaatgaccagttttaaggtaaagataccagataagctatttaatacacacgcacctattattgtaccatatttagttcgtatagtaccaagaggatttcagttagtttgcagttatggcaggaatataggtaactagataaatttctggttcattatgacagactgtcacagcttgttcctttagtgtttcatctctgcttaccttatgcctacaaggcaggagtgtgctttaagccatacataacacctgctattttaatgtggcttgcgtgtatcacttggggatcttgtgcaattgctctttctggtttgatatttgatgtagggccccactggttgccttcttataaagcgagctcccaggtggcattgatgagccccatctgtgtggcaaggccatatgagtaaatgccgaggaagcagtggaaaagttctcaggactgggggcttatctcactcaaggctgttcaatacctgggacttggtacttttctcagtgcctgatgacccacagggcttgattctctagtgtgccagtactgttgcttttcctgtacaaatttagtaatattacatgtggtcacattcattatgtaatgagacctaagaagacttgcccctctgaatgtaaattaagggaaagtgagaaaactgtgggagggcctcagataatagtttctttcccccttttaatgttttattattgttactctttttgttttgtttttattttttcaagacagggtttctctgtgcagctctggctgtcctggaactccctctatagcagcctggcctcgaactcaaactcagagatctgcctgccactgcctcccaagtgctgagattaaatgtgtgtgcaaccactgcctggcttttacttgtctccccccccccccaaaaaaaaaaaaaaaagaaaaaaaaaaaagatttagttatggccgggcgtggtggcgtacgcctttagtcccaggatgcagaggcaggcagatttctgagttcgaggccagcctggtctacagagtgagttccaggacagccagggctacacagagaaaccctctctcgaaaaacaaaacaaaacaaaaaagatttatttattattatatgtaagtagctgacttcagacaccccagaagagggcatcagatctcattatgggtggttgtgagccaccatgtggttgctgggatttgaacttaggaccttcagaagagcactcttacccgcggagccatctcgccagcccccttgcttttactttttaatgttaggaatttaaagcttcagattgttgactgcaccagttaattccattcttcatcctttccgacagttacattctaataccgttggcttcctttctctgtttgccagctgcacagtcttcacgtgggtgagtttagaatgagcttctcatcaaaaagcaccatactttacaccacaggcagagaggaggtagcgagagttcagtgcttcttggattggacttatctggagcactctggtatcgataacatttggtgagagattcacttaagacgggctcattcttttgtgggtactcagttataatacatgtctgcattctgattttttttttttttttaaggaaaatattttctagtatttgtcattgtaggatcggttgcaactttttcttcgggagaacttgtgggacaagtctgtttctgaaacaccaggttttgagctattacagctattacagtagtatctcaggatttataattttttgacgtgttgttggcatgaagctccatttttagtttgtgataggagcaggcaggtgctttagctgtttatttgggtgacagccatgaggtatgttctgattatctgatttctacacgaacgcagggaacatgaaaggttctttttctagaattgtctttccagccaccagattggccttatcatcaaggtagcagctgttgggttgtatgtattttatgaagatgctctttattaaaattctgtgagagaattatggttttacgtttacttcaggtaataaaaactattgagttcttactaaaaaacacttaacaaacattttaaaaatttatttatttatgtatatgagtaccttgttgctatcttcagacacaccagaagagggtatcagatgccattacagatggctgtgagccaccagttggttgctgggaattgaattctggacctctggaagaacagtcagtcctcttaaccactgagccatctgtccaacccctttaacacactttttttttcttcgagagagggtttctctgtgtagccctggctgtcctggaactcaactctgtagaccaggctggcctcgaactcagaaatccgcctgcctctgcctcccaaatgctgggattaaggcatgcgccaccatgcctggctttaacacacccttttaaaagccagttcttgggttcaagaaaaggaatgagttccccttagtggctatcctaatttcacagataatattctaggcttattattatttttttaaagatgccaataactagcgtggtaacttgcttaccaagtcccaggtaatcatttcacttgatttactcattcagctcacagaatgcattacttcaaacattgtgagttgcacagtgtgtcagcagttctttgctactgaagatgcaggcactgataggacctgtcactaggctacatactttggactagtaattaggcaaggactgaagaaacttgggcttattactgggatcaaccaacactgctctgacaagtcgatttttcttcatggaaatttctccatctgagggccagagctgcctcacaccctttctttctgttgccctgttttcagtccaggcagagggaacttcttgagaaaataaatgtgtccattaggttagtctgtagtccagatggacaggcatttcttgattcattctgtgcagatggtctgagtgctctaagaaagcaggctgagcaagcatggagggcaagtgacccaataaataagccgtagttcttctccatagcttctgctttggctcctgccttcacatcctcctcatagtgagtgtttgcccttacttagttcccttcatcgtggagtgtagctagcatactgaaacaaacccttttctcctcaccagagcagatgtggaggagcaaggaggagcatggtgtgcgaggcatctaaagtgcaaaggagggagagggcaaatgggatttcaacaaggtcctggaattgtttggatagctgagtaggcttgggttccatggccttaatgtggaccaacattaatttatctcatctgtcaggaatgtggactggccaggattaagatttgaggtcttctaaagtgactggaagctctccttttgtcatgtactactatgaagaatgctttttagccaggtgtcgtcatacatgtctttaatctcagcacttgaggcagaggcaggtggatttctgtaagtttgaggccagcctgatctacagagttagttataggatacccaagactgcacagagaaaccttgtctggaaaaaaataaaacaagaatgtttttgcttatagggggattaaatgaaaatttggttttaagattgtttgattttgtttgtttgtttgtttgtttgtttgttgtttttgagacagggtttctctgtgtagtcctggctgtcctagaactctgtagaccaggctggcctcgaactcagaaatccacctgactctgcctcccaaatgctgggattaaaggtgcgtgccaccaccgcccggccattttttttttttaaatgtgtattcatttgtgtgaatatatgctacatggtattactaggtggccaaagtggatattttatctcctttcagatctaggaatacagattgttgtgagcagcctaacctgctagctagaaactgagccggggtcttatggaagagcagcaaagctcttaacttctgagccagtttttcaggtccagatttcagatattgtgttcagctaggttttgtttgattagcttaatttcagatacattactagaaggggatgtgaaatagtaccagatttgttagtgagggcatgcctggtttcacttagtttgcagagtttataatagtgctgaatttattcaagaacttcaaagtgttacatattttatttatagttgctgtcttaggtgctgtggtacaacatcagtaccaaggcagtttatactgggtggtagacacctataatcattgtagtctgggaagcagaggcagggagatttccaggacttccaaggctacatagagaaaaacaacaacagcaacaacaacaacaaaaggatttaattttataaaaggcttttattgggcctactattttggagcccatgatccaaggcatggtggcaggattaacggagacgccatattgtgatatgtaagtaggaagcagagaccatactgggaaacctcaaatcctgtcatcagtggcccacttcttctaaggccccacttccttatgctttccaaacttaaggtccactagttattcaaacagcccatggaaattattttgactaagacaaccaccacaatcagggtagtaactcaagttcttcctgcttgttccccagtacttgctcagtctgctcagggtcactgtagattaacaccccctccccaccttgggcctagtcaatagcgactaaaaccaacatggatagactatttgtccctacttgggttttcttcatgcatactggcatacttttggtttgttttgcacactcacactcagggttttattgcacagcccacgcaatcccagaactagctttcctcctcaccccctctcccccacttcagaatcaattctcgcctaccttatttgaaacagctattgaattcaaacctctgggcttcaatcctgtcctctgtgccagcctccctagtgctggaattaagactcagttttagttctgatacttgtctgtacagcaatggctgctgtctgcattttcaccagaagtttttctagtctttaggagggttgcaatatctgtattgttataagcctctagtaatctcccacaccttttaaaacaaaacaaacgggcaggtgtctggaggggctagaggtttcagatcagatcctctggacctatagttacaggcagttgtgagccactcgctgtgaatgcttgctagaaagtaaatccaatttttccgagagctcagtgtgtaccaagctatctttctaactcccagacttgatcccccctccaaacaaacaaatctattaaactatgtagccttacctgccagacattatcttccttaatattaaccctttattattattttttaaatcctcttggaggataaagagatagtttagtgtttaagaacacttctcctttcacagaaggaccacattcaggtccctacagccacctgtttcagggatttattcttactgttttctgacctgcaggcactaagcttgaatgtggtacacctacacacatacaaataaatacatacacataaaagcccttgctgctggcttgggattttaggtaattgctgaaatgtatctgtattatgagatttaataaaagaaactctcagggtatagtttctttgaagttcattctctttgcactttaaaacgagtcagccgggcgtggtggggcatgcctttaatcccagcactcgggaggcagaggcaggtggatttctgagttcgaggccagcctggtctacaaagtgagttccaggacagccagggctacacagagaaaccctgtctcgaactccacaccccccccccccccaaaaaaaaagaagctgttcagagcacacacaccgctccttatttctttgtgtatcctgagctgtcactatgaagaaaaggccagccttgaacttgagatctgcctgctcctgccagatttaagacctttaaaaacatctttaaaaatgcaaaggagttaggaaagctactttgaaaagctagatgtagtggttattagcaaagtttttgatagccaacagagctagattatctgtgatttggacctccctggcttgtattttctcttaacagtacagcactcacattcacgataaaaaggatgaaaacggttcctatgtgtaagctgtttgctgggaatgcttcataactgtagatgccgatcataacatcatcttatgcactacatgtgtaaaactagggataaaaggccttggcaaggaggaccttaagcaagaagggtcactgagccagacacagcggctcatggtttctttaatcctggcactcacaggcagaagcagctggatctctgtgagtttgagtccagcatggtctgcagagtgagttccaggacaaccagggcttgtgcagagaaaccctgtcttgaaaaggtaggtagatggggctgcaggcatgactcagaggcttctctttgagaggactcagatgtggttctagtgtctgcatggcaatccacaaccctctataactccaattcgtagggatccaacaaatgttgtgcacacaaatacattcaggtcaaacacatttttttttttaaatgacataccagtcttccagaggacctaagtttggtttctagcacccacatagaacacatgcccaaatagataaaaacatacatcattaggaataaatcataaccaaaagattgatagaaatccagaaaggaaattcttgttctcccttgagtaaaataatgactgttgatgtgatgaatcattttaaaaacagaagaccttaagtctaaggtaatgtttcattggcatcatttgtgcttagaggaattgattgtgtttttttaatgcagtgggaacatggagctagatgctttttattttgagaaaactggagctgtattcagaaaagcatgccacaaatgacaaaatcctgtgtttaattatcattttgccttttttttttggtttgttatcattttgtgaggaatgaatgtgctggatgcttggctatagtcagtgcttttctaaggtttaacttgaaggctgctgcatattgtggaattttccccagggttaaaatagtagtagttgaacacaagtaaactttatggttgactgacagcctgtgaatctgtcccagtttaattcatgtcaacattcttccctcctcaacatgaataatagttggagcagatctaaggtggatattgggtagttgttcaggaactaaactctgtttagttaaatttgactggaaggacatgcatcaagtgtatttcattgatatacagtgtaaacaatgtgggatgggttaaattaatggaacatattttccgtgtagtgatgtgctagtaggattattgaatctcataatgtagagagaaagcaatgtagaaaaaagtatgtatactctaatttttttgtggtcttctaatttgtagctcatgaaaggaccaaaataattttgggggctaaggttgtacaagtccttatagtatggcatttaagtagcacacacaaggctcctggcttcaattcctgacaatctccccattacatatatctctgtttagtaaatgtagtgtatctgagaaattttattgatttcctgtgccgtgggttgaacattggtagaaggtgggttacttcactctagactacatttataggaggggccctgaatttgttttttgtgttttgtgggtacagtttggaggaaaatgatattcatttgagccatacacataaacttgcctatggcacagttacttggaagcaggagatggataaagaaagacaagctatgtctttatattcaggagtgagaagaagcccagaagagattgggaggagggatggtgtggaagagataaggtgtatccatccatatttgtttctagcaaacttgtattactttgttatttagaaaatagtatttaacatcttctcaaagctggcagccagggagcagtgagtttgccttcttatctctgctccctagggactgtgggtttataatgagattaagtctagagagactttcccaggttgacttcctggctggcaactcagaagaactctagatagcttatttaatttctagcggtgctgctcatatgcctttgtcctgctatagattggagcagtggttctcaaccttccctgagttcaagttatggtgacttcccaaccacaaaatgattttgttgctgtttcataactaatttttgttactgttgttgtgagttataatgtaaatatctggtgtgcagttggtcttagggccacccctgtggaagggttgcttgaccaccaaaaggcctacaagttgagaactgatgttttggaacaacacgtgcatctgatcaatgtaaaaatacaagaatattagtctctcccccccaccccccaactcataaactggcataaaaatctgtaaaatcctccttgctgaagccaccgtgcagaagaaaattaagcaatggtgatatggtgttcttttacaaaggattagttatatgagaaataatatctgttgaacttagcattaactgattgccttcttccagtcaaaacagaaacaataatttaaagagcactaggtgagtcaagatgtggtcataagctggcatagttgctacagctgcttttgattcttgtctgtcctttctgcttcactctgcatgtcctgaactagtttggagagaaaggggtctttacccttgttacgtggtttttacaaagtgtagacatgggaagggtgaagcctatttagttcttacaggaaatggaattttcatcttaaatctcacccttgccttcagggtacttgtgccccagttctggaagatgagatgtagttcaaattattttcttaaaatgaatattagatgctaaagatttcaggatggttttaaaatagcttcagtataggaagggagctgatttttcccatatttgtatcactcttcaggattttctcacctgaagtgtgggttttggcactgactcgttcaatttggtatgatcagtttccagggaaatcagttcgctgaaatggttacaaatttcaattatctttgtatacacataattaaattacacttacttttacttggtgagcatgtgagaggtatggtaggggagagacgagtcagaacaactgtatgagttgtttttctctgtggatctcagaggactcaggcttggcacaggcactttacccactgagccatcttgccaattaatgtgctctctcttatttaaaaaaaagttgtaaatctgcttaggtttaaaaaatcatttactgaagtctttataaatgtatttcaagtgtagatgactgagtagacttgacacacctgagacagtaccctttctgctgtctctgggcagtgctgacctgatatttagagccatagatggttttgtttcctgtaagtcacagctttgctgtctctgaggttcatgttgtttgtgtcatagtttactttcatggcttagtacttctgctctgtgtcttcatgtatatgacctccagcatcttcgttattttgtatgtagatattaaggctacttttatgaaggagcaaaattaactaaagaaattaactcagtcaagtttaatctgttctagtagcctgcctccctcgcaataggggttggggaggaaggaaagaatgatgttctttagattggagcattggagttaggactcttgagttaaggggctttccatagcctagattgcaatgttcccttacaaagagctttctaccaagtctgtgggttcatcttggtttgagactgtagcatttataagcaacaaatctgttattaacttgcattcctaccctcctcctcctccttcttctcctcctcctcctcctcctccactcctcctcctcctcctcctcctcctcctcctcctcctcttcttcttcttcttcttcttcttcttcttcttcttcttcttcttcttcttcttcttcttcttcttcttcttctcttcttcttcttcttcttcttcttcttcttcttcttcttcttcttcttcttcttcctcttcctcttcctcttcttcctcttcttcttcctcttcttcctcttcttcctcttcttcctcttcttcctcttcttcctcctcctcctcctcctccccctcctatttttgtttgtttgtttgttttttgaaacagggtttctctgtacagccctggctgtcctgtaatgcaccttgtagatcaggccacctcgaactcagaaatccacctgcctctgcctcccaagtgctgggattaaaggcgtgccccaccacacccggctccttctccatttctaagcacttctaagatttatttctatgtatatgagtgcattgtagctgtacagatggttgtgagccttcatgtggttgttgggaattgtatttaggacctctgctcgctccggtcaggccccctcgttcagtccctgcttgctcctgcccaaagatttatttattattatacataagtacactgtagctgtcttcaggcacactagaagagcgcatcggatctcgttatgggttgttgtgaaccaccatgtggttgctgggatttgaactcgggaccttcgcaagagcagtcagtgctctgaaccatctctccagccccctacctctcttcttagaaatgttactggcagctatggaacttgaagttgctgcaccctcccttccccatattgtttgtgtgtttgtttttgtttgtttggtgttttgtttttgttttgttttgagacagggtttctctgtatatccctgactgtcctggaactaactctgtagaccaggctggccttgaactcagaaatctgcctgcctctgctgggatctgctgggatcaaaggtgtgtgccaccacgcccggcttgtttgtatatccttggctgtcttagaactacgaaggcggaagatgtcatttaaggaccccctccccacacacccacccccaagtgctgggagtacagatctgtgctgctttctttccccagctatcttctctacttactttacttccttcggatggatagacagatgtagactcagattgacaaggaaaatggagctttaaggaaccgggcaagtgtaatttcgccaattctgttttagctggtgtgtgcttggtctacacacatttaatttctcattttctcatgcagtgctctattgagaaccaatgtcttgtctgtcatgaggcatttttgggtgtttgtgtacctggggttttaatcatgaagtgccagttcccatgtagggcttaggacagttttgatagattgcattggtgacttgtgtagaagagatccaacttttctgggaaacttgaacttttgatctgcaccaaagctccatgagttgctgttcaagtcttactgagacatggatgccatggctgaaagaacactggacttgtcaaatgaagagtgtaatgtgcaaatacagcaatcggtgtttctctgtgctactgagtttttgacttgcaaatcttgagaactggaggtcttggtggaaatgctttcaggtctacagaaagaagcttgttaaattttaagaagtaattatctgagtactgtgactgctgtggggagggacccaatggaaatctcctatttgggggtctctctctgcccaatgtgtttgtgggcctgcatctgctccatcagctgctgctggggcccctgatgattgagctcagtaccaattttgactcctggcagctgggatggcttctggtagagcgagaattcatcacccttattctatttcttcctaaataatttttaaatgtaggccaaatttcgaataaacacaacaattgaaagcagttccatgtttcctgactgtagagaatgaagagctaacctcattctctgaggaatgtcagctatccacagaactggtgtgaattggttgggaaaaggtctggaaaagctcacactctgagggtgagtgaccttgggttagtcatttagccaggaaaggaagcatgcaaaagcctaataaagactcacaggttttttatcatatggtagccttggtctttcaatgactaatgtctggtgtggaatgcctttttttgttttttgtttgtttgttttgttgagtctcccaagtgctggcattaattaaggggtgagccaccactgcccggtgtggaatgacttcttgaagattcattcattctttctctctctctctctctctctctctctctctctctctctctctctctgggggggaacaatctttaatgaccatgtcggtgattcattatggaggtggggtggcaccagggtgtggcagacatgccagagttgtccctgtcttctccagcagcctctagctcctgaggtaatctgtatttgccagactttctttatcatgaagatgggggtattaatgtctgctggttgagggttcaagatgacacagttgtagctgatcctcggctaattcctccaatctggccagatgtcgtagcctggcttgatggcaactcgctacccatgtcctgctttcgtgttcagttggagttgggtccatagtgtgggctcattgatggcgtctgggttggtggactcaatctctcagcatgatggcacctctgtgggactccaggagcgagtccttgaagatgctcttaagtattggtttgggttcatacttatgggttccatcagttttaattctgtcatgtgctatcaactttgacctcttgatcgtctctgaagttacctgagaaagtagcaagatacaactctcaggccagtcaaaaaaaaccctgtactaacacactaggtgttactactcactcaaggtcgtcatttgactaaggcatgtttaaaggtgatgtgtgatttgcaggaagaccataggagtttttgtttgaaatcacaaacattcagcaataaacctgtattttttcctgttgaacataacttttatcttgtatatataattagtaatacttttcttcctccaatttacccaagttgcctctcacataactaaaaggccattatcccagtcagaagcaaattcttaatacgtgactgtatctgtattttttagttggttcgtttttcattgtggaaatttctactgtgagaagatacatggctccctggcatttgtttcgtcttcccaccccctgatgtcctgaatcagggcatcaattgcacactgctttagtgaagggttgtgtggatggtcagggaactgaggatagacaggagatttttctatgcttggtcctagcatagaaatgtttgcttatgttttctcattctgttatgtgtgttgtgtgttccttgcagatgaggtgagaaatttactagggaggtaggcaagtctgtttcttctagtgttggaatttactgatgtttctaggcttcgagcattgctaaaagaaagccaaaacaaaacaaacatgacagctgtgagagagtaggaatgattaaacaaacatcttgatctgcctttgtatttaaacttcaaatacaaagctgagattccggcccagctggaggacgagtggctgtagcagcatattagatttgaaaggtgagtgtaggggagctgtgtttgctgaacagagttctcaaaatgttcctgagatgtttacagaaaacagcaggattttagttttttggacattggaacaatttacagatccattaagaacaggctaggtcgctgggtgctggttttcttggtgattttgctgccacctgtcttacagcaggagaaacacgccttggagattttcagtccacattgaggctgcttagtggccagtctaggaaatggccactctcttgctctgccacacatctcctgtggctcccacagtgcatgtaccaccccagtgcctctcagaggagcgttttttgagcagggaaactgtacagcgattgtataggtctggcctgtccttttttttttttttttttaataaatcctggaatagtgacagtgaagggtgggaaaaggaatagaaatgtagaaatgccttgggatacctgccttgctcaggatgtaagtgctgtctttgatcttagagggtactttggggtaggcaagaaaggagtgtggtgtttgtggggattgagaagagagctggactttagatacccataatggcctggtcaaaggctcccgtgaatcccaaatgctctgcatttcctactaatttctgctttctttgttgtgcatgcctttaaagacgtattttcatatgcattgcctgcatgaatgtttgtgtgagtatgtcaaatcacttgaagctagctggaatacagacatttgtaatattgtgctttatgggtgctggcaattgaaactgggtcctctggaatagcagccagtgctcttaaccgtccctccagcacaggcctggagaagagtatgattctttatcctttagagaataggatagttcctaacagaagagaagagatagctaccgtattatacagtggcatagaattcagaatcgtctatatcgaggacattggtgtgcaagcacagatgtttctgtttctagacacaggaaggtttcatgttggtggcgctgtagttctcacatcttttatgtgtctgtgatggcactagatattcactatgtagcatgaaataacagtgctttccagactaaatttaagaagaatgatatttgatattcaataaatatcaagagaagagctagcccctacttagcttcatggggtaaaatcctccctagtcaacgttcagggtacttaaattctatgcagtcataaagttcttggcttagcttcattgcttaccttcttatttctgaaaagttcaggctactggctgtttattggaactgctgggagctaaaaaagaaatggttagaaaatgaattggggtaactgtggtttgattattttcaccagaggagacagctctcttagtataaaaaccagctagtatttattaggtcactagttcctctcattggcttagatttttttctcaaaatgtttcagattcaaagatgacacctttttaggtagaaactaccttcttctgggtgactacttatccagatgaaccttaatgggcaaaaaaataaataggctatggtcctagaaatacatgactgggactgggaaatggcactgttgtttaattttcttcacattccaggacatagtatttaagatgtaggtaatgttttggtgctgatccaagcctccaacaagtctgatttaaaacagagaagccttgcatttaattatgcagctcatgggacacaaggataggaataggaagaatccaagtgcagtgtattactaatttagggtggctttctggctgggggaagcaagggtttctatcgtgtaagtgggttgaagtaggtatagtctgactgttcactatccgatggcctccaaatctgatgatttggaggttttttggaaacctactgtgctttaagctcatctggtattcattatgtacaatgaagtccttaaacaagatgaaactgtatagctaatgacataaaatgcttcctccttatctaatcaggaaactatcttgagtttctagattagatgttattcagaaaggataatatagggaataattactctgtatttcattggaagaatttgccacatggtctgtaagtcacattgcatatgaaaataaaaatcaagagcagtctttagtagtttcgtaagaatatgatacttttgttttttttttttaagcttgcatataaaatatgatatgtagtgtgtagcaactttgtggtgttggttcatttgtcagttttgtttggccattacaaaattttagagtttaaatttagtaacaggaggcagtgtaactgattcatgcaggctgtatacgtgttgactgtacaaggtggtgttttgtagtagtgtattctaagtaaaatgaatgtgccagaaactcaaaaaaaaaaaaaaaaaagaaaataattagatctctgtaagattttatgttagatctcttaacattttcacttctaaacactaccagtcatagaaaacctggccctttaccaatcataacatcaacacagtcacctgtgtgtgtgcacatgaattcatgtgtgcatatgtgcatacgtgcataagcatgtgtccccacgtgtgtcgtcctccgtgtttttgcatatagtggtacattgctaaattttctcaccctgctggagatggattctctagggcattgcacatgttaattcgttcatctgtgagctatatttttagcctcagaaatgataagattccgttagtgacatacctgctaattttggcaacgagggtgcttggactcttgcagtgcattttccaaggctactaatacttaagatttgtgggctacagcaataaagtttgcttgaacaggaaatagtggtccccccctttcccaaatcatgaaacatacttcacctgtgctctgactcatttctttctcttgtttatttgtatttgtgtagtccaggctggcctggaactcagagatccatcagcctcttccttctaagtgtccaactcagctgtctgctcataggtcagggttagtgtatttcataaattgtctcatgtctctttcttgctgtgtttgctgtactattctgatttcaatggctgtattaataacagttaaagatggagaaagttagtaatagatgtgagctataagagcagtctacttagaaggggttcttgataaaacaatgtatactgcagtatattgcgcagtggatggacaaatcttcatagctcctgttgggtagtatagtaaatggattcctggtgcagtagtgcacctttcagtctgggatagcacagctgcccgggaccaggatttcaaggttggtctgggtaactcaacgaaaaaaccctcaaaacaacaaaaaattaaacataattttagaagaatcaaagatagtgtggaattatataatgatttggtattttgcgctcacggattaaagacttggacacaaatggacatttttttttcttctgcacacacacacctccgtggacctcttgcctttggaattgtagattttaggtaatggatgtactttgtgaacaattagcatgttcaatatattactgggtataagaggctatattgtagacagtgtttcactgtacagaactggctgtcttgggacctattattagcctaggaccaagctagctttgaatttagaaatgaacctgcttatttatgcctcccaagtgctgggattaaaggtgtgagttaccacacccagttcatttagtgttttttaataatagcatgagaaatgtttaatgttaagtgtttaatgactctttcaaggattagtttcttaccaaatcctgagcaatattttttggccaagtgtcaggaaacatctgcattaatcccgtgactgaagccaacttcaaacaagcagcaagttaagaatccctagctcactttggctgatctttttatgagcaatgtctaaaccctaacaggtggcacaagggaatttaaggatagagaagcctagctgacttctacctatttctgaatgtctctttcccagcctccaatatcatagccacgatctatacactgcagcatattagtgacccattaggagagggagcagaagctgttgtgattaattctgttcccttgctattggactgtatgggatttaacaataggcctgtgggttggtggacgttctgttctttgacttccgagcagcatcatggttgctgattttcttttctactcccgaactgtagtgagggtccatcctctatgtcggtagtgggctctttcttgcctgctagtctggcaggcacagccttattttcaaagtttgtttgtttgtttgttttcctgttttactcactataattatcatgccttcctttctcatagcctgggggttgggtgcagagccctagcctagtaaagttcagcaccaaggaactctgggaaccctctcctcctttattgcacacaaccccccaccatggtggtgtctcttcacaaactatctcatgctatggctctggcgggttagaatcgatcaaggctatacatttttaggaacaagacccaaccaagatttcttttttattccttttgtatctttattatctttatacagttccagattagaacaatcatctagagagatggcacagtgatgtacacaaaaataaatttttacaaataagatctcccctacttcctgtaggagctctttaatttactatcccctcccctcaaaataatttggctatgataactgatggtagtatttgctattcaaaattttctttgaggggacagggttattctgtgtagtgctgggtgttgtgaactcagtgatctgcctcctgaatgctggtgtgtaacaccactacccagcagtgttggaatattagaggacgggctattggtttttatttttttttaaaaattttttttttattaatggttttaaactctgaagtaattcttgttcacattaatggtggtagactctcacctgtctaaactttgctgacagaatgtttcaggttatttatatgtgagtgctactttagatgttattaaaatatgggccatgccacattttaaaatgtggttgaactaagggctttagacatatccctcaatccttagccttacacttagcataacttggtttctcatctaatcttgaagttgtgtttgtagacagtcatcattgctctactatgttggtgaagtgctgactatttttgaacttgggaattcatgttttggaagtttcaaggagatgcatttgactgtgatgcatccctcacattggtgtatgggtcagtttagtaatccaacttttgggactatgatggtttaaaagcaaatgagtacactattttgtttgtttgaattgctgaagattaaatccagacaagtttctgagccacaacccagccctctacattctttatttggtttataatcctgggtctcccagagtgggctagaagtcttagtcctgctcacgtgtctcaccgggggcacgcaggtatgggcgccccgtctggcactcaggcttagggctgtgtgctttgttaggagctctgcaaaaactgctttgcgctttggagaggctgttctttctacctaattttcccccgtgaatggttagatgtaacactcatacttgttagtatgatacttgtgcatacccacatgccagcactcctccacccatagaaaatatcaacttagcattaccattcagagcatactctgatctgtctagtttggggaatttaattgcagagtgcttatagctaggcatggggctatgaaaggaggagggctaggagtctgagctatctgcacgcctgagtcttgtctctggaatagaaggaaagaaatgaaaagatctaggctatgcattttaagtggtggaagtggggtcctagaaaggactacaacttgaataataacatgtgtgtaataaacatgtgtcttggctttagattggcaaatgttacagggcactttatgcctctgttacatagtctcttatgatggctgtgacaaacagaaaatggttttgagggatgacagcttttcctttgccaactgtgggtacttgagtcttgtcactcttttcattttagaagagatgactccttaattgccttggtgtcaacaaaattagataatttttttaaaagtttgaacaatttttttttctcactccacatctcttgctctcaaaagtgtcaccgagggatccatttcttggcagttttgcagcatagaaagaaatgctggcacaaaacaatattattttctttctgtcttgaaagtgcagtgaggactttctttcattgcataatgaaatcagaagagttggctaagatattaagacgtgcataaattagccagctgcagggcacagacctgtaatagcagctagtctggtggttgctttcaagtcttatgccagttttggcaatttatttacaaagacccagtcttaaaataagagccgagaatacagctttagttgtacagtcttgctctgagcataacccctcagtacttcctctacaaaaaggtgaaaacagtgccaatttgcaccttaaaaatatatttttttttcattttgagaaatggaattttcaaaacatttaaaaattggtagcactttgtttagtcattaccgatggtaggtaaatttgtgtgagttttactataatgaataccagcccatgttcctgtaaacagaagttctgttggtccttacagagaccagagaatttcatgctgtgtggttcttcttgtggaatgttttttgcagtttcccataagaaaaagttttgtgtaaccccattttcaattcagtttttcctatttagattagtgcctcaggtggaacctacagtcatggactcaaaacttttacttatattatgggtatgtgagcatatgtgttatgtgtgtgggtgtgtatatttctggaggtcagaggacaacttgggagtcagttctctgttatatattacaaaaccaaattcaggtctttaaacttggtagcaggcaccttttctagccaagccatctcacctacagctccctcttctatgttaaaaatcctgtgtgtgtgtgccccagaattatttgtgagagtaaattccatttcctaggggtcgtcaggattggttggggtcaagcagctttacctgctagattccccaccttgtccttgagagtctcactgtagctatccatgatcttgcctagaactcagtgatccatgtgcttctacccccatagtgcttaaagaccaactctgctgtgctgctaaagaggggcaggcaggcaggcaggcaagcaggcggctggcattgctttagcctctagagtgttggtattacaggcatgtgccatcatactaaacttcattggttattaatggacatacaaggtttctatctaaagagaacacaaatgatagtgataatataaattgtagtttgttgttgatccaagcaaagggtcaaatttcctaatagtttttgtgtaggttaagccacatgcattgtgagtgggtggtaacctgtcccctcagtaaactgttgtaatgaagtcacacttgctgagaggtacagtgcgatgtgtgtatctcttctgcaaaacagccttttggggttgattttgaaacattattgatggggctttgtttgaggggtgaatatatcaactgtcatttcaccttcaaccccttttttaaaattattctatacacacacacacacacacacacacacacacacacactgtagctgtcttgagacacaccagaagagggcgtcagatctcattacagatggttgtgagcctctatgtggttgctgagaattgaactcaggacctctggaagaacagtcggtactcttaactccagccccctcaccttcaactcttgacattttatttttctgggctctttacagactgtcccttttagtcaacttcgagtaatctccagttacttagtgtttatttccatatttagtcctttgttatccccctaagatgtaagtagtcacttaaaatccaggaatgtggagattcttaactgtttgtgagcacagctgctcaagtgagtgcactatgctgcgtcctttacacactgcagaccttgaggataattttcaggcttggtctagtcactgaatttgaatatcctcaccttaatgtgctttcaagttaaaatagcactctccttatactggcttgcagtagcaaagtgcagtagcatttgtgatctcctgttacatgcaagatatgccttccatgcatacctccataccatagaaactttgcttcctctttctcctttcctcccttctttctctgattgcagagagaaattagtaaaataattactaaaaaaagtggaagatagtgaaagttagtagtgggaatcctaatgtatgtactatttaagatgagttaaaattccattgaatacatacttttttcaatagaagttaataagtttgtatgaggcagaaacaaaagatactgttttactgtgtactggtgtacttgcatgcctgtgtcagtgtgtacattcatgtacatatgtacaccttccctaggcctacagttccttggggctagcctgggattctctggttgtaccattttatttcccttctgtcatctctgtggttgcaattgcttccagtatggacttgggaagactgggatattagctgctgtccctgggatttttgcagaacacgctcctggcatctacctaaaattgttgaaataagattcttacaatgttgcccctttatccagatcagattctgtgtaaggcttcagagtgtgtataggcagtatgcattagatttttttgtctcttttgccattgctgcacccatcagaggacacaaaccttatctgtctccattacatgtagaagctttcctctctgataagcggaggcatggagccttctatgtactctgaatgtacatacagcattttgggttttgtcttctcatatatacatgtcaagagtttgtgttcaaatttggaattttgctgtgcccattcctgcccctcctccccactttatttttgtggaatagaaactgtgtagcaagcactggctagttctgagactggctatttagatcaggctgtcatcacagagagccacctgtctctctctctatattattagcccacacatgaacagcttttcactgttacgagtatatgtatatttggtgacctttattttgtgggtgtttatatatagtggtacaatctgtatgatttacaaacaagcatctcctttatatgttggtctatattagaagcacggaaatggatggtcaggagaatcttgccttcagttttcactgtttctagcttttgctgtaattaaacttggcattcacgtaatgggtgagatgggatgctctctggtcatgacccagggagcaggacctgtgtggactctaggagcgctcaattcttgtgagaagctttttatttttctcgcctttgatttcgcaattcaggccttaactttaaaaagaaactctttttaaaaaggcgctgttccccaggttatgcacaaaatgagtctttgtctgccttttcattcaccatctgcttacaaagctaaattggaatcgtgcttgttttaattattttctacttgtgtggccaggaggttatttggtctggtgaggttacattataagctcttgtgctcagtgctcattaatgccactgcatccacatcctgcgccagcaccagaatggttaagtggatccacttgtgtggccagtgcttgatacaacacagtggtcacaactaaattaccagaggaagtgtgctccctctctccctctctccccctgtctctccctgtctctccctgtctccctccccttttttccccttcctctccttttttccttttgtttctgcaatgttgattgcctaagtgcattttttctcgtagaaatgtgagtataaagggcttaatcttaggtgaatcttagagggatgatgtatttcaaaagttgcttgtctttttatgttaaagtttaagtacatttatcatcttttaaccctctacacttcatgaataatggaaattgtgtaatgagagactacagcatacaaacattttgtgtgaaccagcttaaagatgcaagccttgcaaaaaagtattgtttaccaagagactgacatcaaagtcttcttaaaaagatacacggacaattcctcagttgcccattttccttcactggtaggaatacattcctatctttaggtttcttaaccagtattttcaaagggagacatttagagatctcttggtgaccaatttaaaaatgttttataaagttcagaaaaacattcattacgtagcggaaacttaatttacttgttactcagtcttaattctttttgtcctagaatgaacaagtagtagttttttctttcccctacctattctcccattcttcattccataaggaaaacctgtgtaggtcagagttggtggattcttggacttccttaaactcatatctggtttgtaatcccagagtttgggaggctcagtgattggatgctagaggcaggagggccatttgttggacccaggccagcctgggctgtggtgaaactctcccaaagcccaagccgcccttgggatgataccgagtgcttgcagtatcatctcagcagttaggcttttcttggcaggccttgctgttgacactggtgaatatgtttatggaaaagcccattataaattttaggtttaggcatagaatctgaactataggaaatacagttgtcaatagttgtagctagctggtggcctctttagtctatgtcagcataccccgtcagggtacatagtaccctgtgtctgctgtcattaagtgttgctggtcaaaagttttacagtgatgactgcattaataaactggcaggtaggtattttaccatcttaaaacatttattatttctgttccaaaatacatacagcatagctatctctccaccccaacttctctgaaaataacaaaagagttgtgagtttgggcaactgcttgctgtgcctgtgcacagaacatttggtcacttgtgacccgaagggtttacttgctgaaagaaaataatgtggatttttcctgagaaacaatctatattagttttttatgttattttgtccactgcccacgtcacaagctgcttttcatatgtggcaggacaggacgtctttgagatatagccacagactaaaaaaaaattaattcctttaaaagcatacataactatccttttgaaggcttttgtaccttagctgcagaattctttcccactgccccatcctgctattccgctcacattccttcttcaatatagtatacagtgagtttctcccccatggtatttatccagttaccagattattccatttagatgtgtagcttgattcagaaatgtatgagtaaaaagtgaattaatgacacataatggatattgattgcattaagcacatagtatattttgacatctaaagtttaggcaatgctagagactaggaaaggtgattaataattcaaataggtcttgtcccacatgtcttaccccaaccctgactatggatggagagtcacacaggagacattgaatagtcaaacctttaacataggagtgtggaatccataatcccagaggaaaactgattctcccagcacacaaacaggtgctctcagagctggtttgatttggcattggcatgcaaacaggaatttgttctgacagcatgaagataggaactcctttaaaattaaagcctcttgatgacattaagctgtattgtttaattatagtaaatcatattttaacagagcagcatttctctgaagggacagtacaagtgtgctgataatggaaaattgtctgaccttgtaatcataatgggtcctatggacatgatttatgtcaccatcgggagcctgagacctaattcatgtgtctgggaacactttctcacagtcttattctgatgtatatttaacatgggtggacaccatatcctttaaaaggaatgctcttttatttcattcagtctccatcatgaacttcacatttacagtaccagtgctggcagccagatggggcaaataggaatgactatgctgttattacatccttttatgctccctgtgcctttttcttgattgagtattggaatcttagagcacacatacaaggtagttttgagactgtaaaaagaaacaaaattgtagggcatggtggtgccgagacgatgattcttggtcagaatggatgggcaggatgtgacaccaggcttatggatggatgctactattattttgtttttattgcttgtccttttttttttttaaaaaagtaatatgtcagggcaagaagaaaatgaaatcccagtaaggatatagtgtactaatcatgaagcagaaatcagacaatgacaatgacaatgatcatttgtaagaaaagctgtttgggcaaactgggacacaccacagcttccacaccgatttgttgtttgttttaatttttggggacattgcaaaggcagagggcacatatggagaaatggggagatacacaggattggggtgtgctatgtgaaagttacaatgaatcagtaaaagtagtctggttgagccagtagggtgggtgtgtttaatttcttgttgatgaagattattaatatgtcatacagggcaattgccacctcactgcatgcagttcaaacactttctacttctcagtgctgtttaaatcttaatatctgacatgtttgttttagtagaaattgtttttctagtgtctgctgttgtttttttaaaaataaattaagccatatccacctgtttgctgtgtggtgggtgtagggaggaaggtgtgccttgatatagtgtttctctctatcatgaggatctgaggcatggaacttagggcagcaggctttggacagcaccttcatcctgtgacatcttgctcttcttctgtggctattttggtatagtttcctttctctggtttcctagtgttcactgccacaatgtaggtaggatgcttggctaccttttcttttttcctgtatgctgatagtgagtagtattcattaggatgggctctttgtgttgtcacatttatttgtttaaggtgacaattgtgggaaagaaggagtccttatataaagtcaaaatttgtgctaaagaacagctgtatttgaaagataagttgatatgttaaaaagtttatttttggagcccaggtagtggtagctggcatggaattggactgtgacttacaccaggatgcaccgaaactcagacttacccacttctggtccccgagggctgggtcattatgtaaagatttctttttatttttaactaagtgcacgtgcgtatgtcagagagaggtacgtgcaggatacagaagaggatttgtggattctcatggagctggagttacaggttttgaactgtttggcatggtgctagaaacagaactctgctcttgccagagctcttactcactgagtcggagcagtctttccatgagacaggaacttaccatttggcctaggctgtctttcaagtcacggagatctacatgcctcttcctgtccagtgatgggatttaaaggtgtgcaccatcactcctagcccctttttactaataagactattaaaaatactggcatagtgatattacagaagtctggcttgcctagctagcagtcttgagatgcccgagaaccgtattgggtcatacccaatgaggtagcaagtagtcagctctgaacttaggcagcgaccatgacgcacccactgatggtcgctttttttcccttttccttttaaagagtgaaataaaagagactgttctcaagaggaagtgtgttttctgcccacgctttccttcctgtccctgtgatgttagggaaaatgttaatttggtggttttgtataattttcttgtcagtggaaaagtgaaacattggtgcagagaagtagcagctcccccactccagcctctgtcttctcctttgctgggtggacctatttacacgaaggttcctttcccccatgcagtctttcctgctcctgcacatttggcctggaaaatttgcaagctgttctcacatatacttgaaattttactttgcagtagcatagtaaggtgagtgtagggagtctcagcatttgcataagggaatggtgtagtccagtgggtttcacctgtgccatgaccaacaaagacaacctttgtttctaaaaatacttatattatatatgtttcatagagtagcaaaatttcacttatgaaatagcaaggaagatgattttatggttggtcaccacaacctgagtagctgtatgaaagggtcacagcattaggaaggtggagaactgctgcagtagatagtaattagtttggtcttttgtttaaggacctgccacttgctacacttggttgaccaggtttccccagaaaaggtcttatgctgtacaatagaaattattgatatgcctgtcagtttttgttttgtttttttttttaaatttatgagtacactgttttcagatacaccagaagagggcatcttatcccattacagatggttgtgaaccaccatgtgattgctgggaattgaacccagggcctctggaatagcagtcagtgcttttaaccgccaagccgtctctccagtcccctttattcatttaaacttttttttccttcaaagattgatatatatatatatatatatatatatatatatatatatatatattaattatgtgaactgttttcagacacaccagaagccaattattttattactacttgcttagtcttttcgtttgtatgcaatgttttctcatcttaaacttctgacctcctaaacccctccactttcctatccccgacctccccttgctgcacccaccatttcactggcctttcactttggctactggaggtctaaactgaggtcttcattcttgctcagaaaagcactttttgctctgagccctctagcctcagtccccagactttagtaaatggaaaggaataaataatagaggaaagtggtaggattgtatgagcgggatctggtgatgcctacactgatcaataagcgttaacctgtagttgagtgtggttgattgtaggatctaccgagagagtaggagaatagcttgtcacatgttgagaccttattttgtgcttgaaatttagtttcatttcaaaattactaaaatgtggttgaaggccttgcaggtaaaagtgctgccaagcctgctgagccctggcatccacatggtaggtgagacctgaccccatagggatctctctgaactccacaccacaccggggggtgggggtggtggggtggtggtggtggtggtggacacagactgcctataatgcacgaggccctggactccaacatgaaaaaaccacgacacagatacagtcttaaaggtcacctccactacacagtgacttttaggccagcggggatttaaaacacagttgttaaagtccttgtatattttagttattatgtattttgtaatgcagctaaaacattcctcatggtgaacactttttagaatatctcttgtgtatgaggccaggatcctgtactctgggtctgtatatttagactacagaatttgcatcagattaggtgtcaacatggtaatgttggtgtcctagtttgtggtgtcttaaggtttgctctaagcatctgttgttacagatataccattcccattgtttagtttatcttttcttttgataagcctagtttgtggatatgtcaaagtttttagttgctaaaaattatgtctaggaggactggatagatggtacagtggttttaacagcttctgctactctggaagccctggcttagtttcaccagcagtgatgaggatgcacacagccttctacagcttgagaccaggggattcagtgcgccccccccccccctttttttttaaagtctgtctgcactgtacgtgcactgattaaaatctaaagatcagtagaatattaattttataatttcttgtgcatacttttacttaatcaacatgaacagagattgctccgtcatccactttctcactattttccttggtacttgctgtttagacgaggctgggcttgaactcgcagatctctgctctaattgctgggattaaaggcctgcaccatgatgccccgatgactaggtgctttgtttttgcatgaatagaggtttttttttttttttttttttaaagatttatttatttattatatgtaagtacactgtagttgtcttcagatacaccggaagagggcatcagatctcattatgggtggttgtgagccaccatgtggttgctgggatttgaacttcggaccttcggaagagcagtcgggtgctcttacccactgagccatctcaccagcccatgaatagagttttaataactcttttaaacgtgacttccaagtttggttctgtgttttctgggatttttttttttttctttttcccactaaacttttgaagaagggtatatttagttaggttctctttatgcaactaaatgagtcctacaattttggacattattatttctggttgagctcagtgatgatgaatgtcatggtataacctcccctaaactggatcacagcaaaaacataggacattgtacaccaaagaaccttgggctgcagaccgttcagtgtatgggaggaaggacagcctgctattgtgctcttcaatgcttagcagatgttctatgaattaatattgctcctcagttatctctgacagaagcaagatctggataaggtcaaaatgcacattgatcttggtatcacaaggctatttaagccagccagacaaggaaaaggctggcagtgaattgttagattaaaaaataaaggtagttaataatagaatagcctccatgcctcggttttgttttctgtatgctaattttaaattgcttttggggaggccctatgtaaaaaatagtttcagaacatgaagttctgtggtatatgaatattcacacaattcataaacaacacataattcataaacacacaattcataaacatgtggtgttcctgcccaagggtcagggttgatagcatgagctcttaaggcagctactgcagtttgctggagttttaaggatttgagtttgtagttttgtaaggcagtttttaaagaaagatgttgatttattcaatgattttgcttgagctttgcataattagaatcttgttattataaacaaaggcttttgtgtcgtggtgtggtgtattgtgagttacttagtcagattcaggctcagctgagaaagagaaattaccatggggaaagagaattaccacagatggacagacaagtgtcctaaaatttgattaatctctgtttaaaacaaatggtttatcaggttccggcaagactgctctgcaagtaagtacagtccttgctgtgcaagtctgctgactttcctgagaaatacagatgttgtttatgaattgtgtgaatataatctggtgatttgacaccatagcctttttttttttttttttttttaaagatttatttatttattatatgtaagtacactgtagctgtcttcagacgcaccagaagagggcatcagatctcattacgggtggttgtgagccaccatgtggttgctgggatttgaacttcggatctttggaagagcagtcgggtgctcttacccactgagccatctcaccagccccaccatagccttttatgctgcccatttactacatagattttctatggaaacttataatcctggattgacagcttttgtctgcaggttttttttgtttttgtttttaaatagcattatctctcaattcttattgttcatggatatcttttattaatagtatgctctgcagaaattataaagtacagcatatatatgaatcattgggtcaatacttgttgtttgggctgctggtcctccccccccccccccccccccatcttgaaaataaaatttattgagagagacaaagtcactgtaggtgtaaaaaagaaaaaaaaactcatctgattcacaggggctgtgagtgttctggtttgggggttgtggtgtgaactgtagctgtttacctggctcggtggcttttctattgctttcttgggggctactcatgaagtttctagttactgccttgtctaagtcttaaagccttatattccacttaattacctatacatgtatacaggtttatctccattccatttaaaaactacagggttataatttagtttaatatttatgcaaggaccatttacctgaatggcctgggaaattgccactctaagctctctcctcttaattcaactcattgtggtttaggatcattgtatacatgtattgcttgatttatttagcttttgttaatttgtctgggaacttacagcccccaaagtatgaaggtctggacaggtccttcctgcttgttgcctgtatgattgggaaagagttttccatctgaatgagtgtgtgggaaaattgttcaatgtcttaagaggaatttttctctttctccccctctccttccccttccatttgtttattttggtgttagtaagcacatatgacatgcatgcagtgcccatggaggccagaagagggcatagagctgcagtttcagattgttggaaactgccttggagcaagaagttttgttaacggtgtctagtttctcagtggatgggttgtatgtatggtatagtttcttggttgcttaatgcagagagattaagctggaggaaagctggactcttctttcttgctgtccagctttatggttgtctttaagatcatccccagccctcttgaaagaacatttatttcataggtgcctgcaatgcatcttgatcatatctaccctctacctggattttccacttaaattacagaaccctctcctaccttcgtgtctgttaatctttttctccatgggtaacccaccgagaatagttagttctgcctcctggaatatggactaaccttgacttgatcttgtccaggtaatcataattgtaccaaggaccatgacatgtcctgaaggcaccatttccccacactcctccccatagttatagatattccgtgtaggaaaacgtatacagcagtcacttcctctcaatacttgagcagtgatgaggctttccataaactgctgcctgctgctgaagctcctttgcttgtcaaggctgagagtagcacgcatctgtaggtatcagtatttagaaggcaacctgagagtgcatttactaatcactagtaggctccccttcaatgtctgtaacctctgaagctacgggcctctgactaagttttcacagtaccagacctaaattatatctgtggaacgtgtttccaattcattaaatggttacccctacaactttgcctgcagttattgaacagtggccattgcaaggcactggatcgtagtcttcaaagttcatcactgagtaatgctctcccagtggtgtggatagctttgctactatggaaggtagccttcagggaggaaggttatataggtcacttctgacttcatttttctgtcttgcctccaaattgtgttctgtgtctttaacagtaggtttttgggggagggggcacataaggaggtggcccacacttggcacttaatgctttcatggggtgcatgggtcctgtgttcaaatttttttatttttggttttgcaaaagacagggcgtttctgtgtagcacttgctgtcctggaagtttctctgtagaccagactggcctcaaacttagggccactaccacctgaatatgaagatatttgagttaacttaaagcaattaaaaaaaaaaaaaaggcacactagcctggaacttgtctctgcctctgcagggctgggtttaaaggaatgcaactccaaaccttgctgtagtgtgtagtgccttttattaagggtttctcttaataaaagatttctaggtctttatttagttctggatgctctctactgtgttaaattagttgacatttttactagtgttgcattgttaggaataaaatcaagagtattttatgtgaattttataacttttctaggtcttataagtttattctttcttaaaataccctgtgctggccgtgctctgaagaggaatgccctttccttctctttgtttatcgccgcaaggttgtgttaattgtagcctttggtttctaggatccacttagctttgtggagacaggttgggcttcagtctcagctctggttcttaagtatgcaagtttggtttctcatgggtgtgtcctgagagtttactagggctgtgatacaagaagaattttacaaagtaggcacccactttttatgctcttggtctaggcaatactgaagtgaatcatgtctggtgaaaatcttctgtatttttgtctgctgtatgtggaagctttgaagaggctctgacttctttaatcctggcaaatgcacactaaagtatctatttgctgaatgtaactggtccatgaagtaccttcaaatgccttttccaaagaatctggtttctattaatgaattcatatatatttatatactaggagaacaattcattttttattacacagtagctatggcaggtgtcagaaactcctgttgttaatactaatggcagtcagcatttaactttttttctttactgtctgctgtcttgtggtttttcaactagttattcttaattgtcatgtatagtagaaataattaaatccatgctgctcctcctcttatgaatgtttgcacctcttttaagttttcttggctttctcacattctggtttcaattatgctgatgtgtctctggtctgtagggcagattagtggctttggtgtggccttgctgcatttccctcagctctcctgcagttggttgatgacccacgtgtcatgtcctcactatcaccataaggcttgcttcacctgggccccgtgtataccataatagacacacacagctgagtgtcaagtgcagagggagtcagcttagcttaattagagcagtgaaaatggactgtttgcttaaagctgtattgtactctttgttatttattatacacctaaacttttagaaggtgaacatttaggaattaagcaataagtaataaaaaaatgaatgaaacgaccttttagaaagggtctcttcactgaacatggagacaccaatataagtagagttaggtgaacagcaagcctgagggatccccctgtttccaactccctaacattaagattgtaatgtggtgaccagctttttatgtgaggatttgtgtgtcctgactcagggtctcatgcttggttgacgaacaatttactgatcagagtatttcttcagcaacaagtaagtattcttaaatggatttttgtagtatacggaggcaaatcaattgaaaactggctaattaagaccacaaaacagcatttgtacagaagcagaattttaagttaatagtgtgtgctttagggatggaaatatttccagtgagacaacgaccacttcttgttcttttttcttcttcttctcctcttccttttttcttctcctccttcttcctcttcttttttcctcctatttccttccttccttccttccttcctccctcctcctcccccccccccccccgatacaggacttctctgtgtagccttggctgtcctggcactcactctgtagactaggctgctctgaaactcaaaaatccgcctgcctctgcctcccaagtgctgggattaaaggcgtgcactaccactgcccgggtccagtgagacttcttaacttacagcataactaatgttcatgacttttgaccttgaagtttatattgatttcttagctatgcaggatgtaattcctgttttaggtcttagtttctactcaaagatgggacttccttttggtgtggtggtagctgctaaagaaaaaatgttccatttgaaagtggaactctgtgggcaggtacatttttagtgtttccatttactatcatagtcacattctatgttccagtttatgcctgtgtgagagaagtgggcctaattgggttagtccgaaagagtggtttcactaaagagctatttccatgttggaaaattcccatttctatttaaagggttgttcattctggatgtagaggacaaattaaagagtactgttttagaagtgtggctggattttttggcattggcagcctgataattacagtttttgcccaagagctttgaattctgactgttttgcttggaagatcttctgaggaaaagctgaaggataagggacctgggtaccaggaaagggaggattaggctgtagtgttttggtagtgctttgttgaataaataggatagctctcctggggattcccatcaccaggcaagagaaatggcactgtcttattttgtctatttgttttcatggatacatcatcttttgtaagtaaaaatatgagtattgtctgttctcatcaataatgaagaaaatagagcatacctccagctagtaatggtaagcaataatgtctgaaaaccagacattattgtgaataaatcagtcatttgtccgttttactcacacacagctacttcttcacaccttccttctacaaggtggcaaaattctgttggatcaggttaatgaaacaggtggcctgggttatttttagccctatccttctcatgaactgttactctttctagatttctctttcatgtgaaatgaattgacatgttaaatttaggtttatagtgtgatgtagtgttctgttactagaagtacaaaccatttatgtcacaagcttagatgttcttggtcagggctggggagatggctctttgcttaagtgcacaatctgctcttccatagttcaattcccagcaactgcatggtggttttatctatactgggatctgatgccctcttctggcatgcaggtgtacatatacacacagggcactcatgcattaaataaagaaatcttttaaaaatgtctctgatttacagatttttttttttgtggccaagcaatattccatattaatttgtgtccatgccctcccatcccccatattgaataacttaggagttctgcctggaagtttctcaggcttctgcactcttgctgtgtggtcagctcatgtgtacatgtatactttcatgtagtgtatcatgtgtactcttttggcactggtggttgcttctgttggtaggtaagaaaagacacatccttatttctctgctctcatgcttcttcaaggctgcccaggctcatttttctgatcatcgatgattcttggctctctctttaaactctgttagctccatttcacacctctcattagcttctcattcctcagtccagagtagatgctcagaaccatatagcactgaattctgttcctcctcctgccatgcatacttattactacggattcttactatcaggaacgttgagattaataactaatcataataaaacagtagttatactttattagaattagtatgaactacttaggatgcctagagtgaaaatactgtataaaagtatgattaatttatatatcatgggcatacctgctcaatggtgtaagatttcatcatttttctaagaatgataataaggtatttagttacataatttgccatacgagaagtgtatttttgagctggcaaatgaaaatggttttgtcattcttgaagttgctgctttagttttctttcatgtgtacgtggtgttgttgttgtgccagaatgtatttctgtgcacccagtgcatgtatgtagtgcctgcaggagttgttaattttggcaacttttacaattagtatctatttttatttctaaagaaaaacactgtactgaactggaggattttaaatacttcaaatatatattgggtttctctaggctgtttttttctctctttttaaaaacagtcctaatcaactctgccatctttcacatgtacagagtaagtagtagctcagtaacttgtacaaggaagagcagttgcccatataaactgtagactttgcacacttaaatacatctttcccatttctttaagtcttgtttcttgaactcagataaatgtattaattaaatcatgccagcattttctgagatttctataggagactaggaactctaaatgtcacattattgtgacattgtccttcctgcttcctgacagtatgttttcatgtggagacacacattggattctgttgttggtaccaatgcagcagagaatgtatacatacattgggaggtcggagtgagattcacaaaagacatgtgcggtcatctcttggtgtaacctcctgtcttgaatttgttcatttgtttgtcccaatatatagggagcagaaaatctgtggtttcctattcaggcactgcttctgacagtgaagggaaaggaagctgtgaaaggtagcacaacagatattttagggtgtgaaaggcagttgtctttcaattagagattttatattgataaaaagcattcttggagtccaggaaatcattagtttggacatgtgtgtcttagtcattttgagtatgcagtctgaacatacgtttacaatgaagatgatttgtgtggacatgggtttgattctggcttgttgcttgtttggtatcttgactattgattgggagaataggcaagctgcttttcaaagcacagtttctcattctcaccacagtgtagtttcctgtttttcacatcttgactaaatgattatggttgttggagcatagcaacttgtgtggagtggcatttgtttgtgattttgctttgggtttgtttctacactaactaggcctactgagtaccttacttaattacaatagaaaccttgtacccatctgagaaagctctcatctctcgtcagggctcttatttggacttcaaaatgttaggtctgagggaagcactttagagacagaaatgtacagggtacattttattctaaaacagtatactgtccaatactaagtctgcgaacaatgttgcagagcttagttgtctgcctagatgcaggaagcatcacggttgaatgatttacccttccatcctcttcattgagaaatgagaacagccaggaaacccctgagccaattctccatatctacccacatctgttatgatttcagcgcaggggcttctttccagtgctctgtctgtagtgccccgtccgttacaagggagatatggcttgtatcacacagatccttatggaaggggtagggtgcaggcaggagaggaaaacgaactctggtactcatgcgtacttgcggggtgtgtgcgtgtgtgtctctgcaaagccgggtacgtaggcaaccactggaagctaaagagtgctagaagttaagttctttgaaagtagctgaaaacaaaaaagaccaaagtcagtcacccaggaaaagaggtgataacgcacacatgtaacaacactgttttgacttctaatattacactaactttttttgagtgtagagacactttgagaaaacctgtattcttgatcaacaggctattacagactatagatgggcatacaccgacacgggtcatagttaacaagtggccatttagatgccttcataatgtcaaaaaacagatttttatagagtgtgggtccaaatttgaaatgaacaaattactttacttgaattagctttgggggctcctttgaatttctttgagtctcctccaatacctctccccccctttttttttttttttttttttttttaagatttatttattgattatatgtaagtacactgtagctgtcttcagacactccagaagagggagtcagatctctttacggatggttgtgagccaccatgtggttgctgggatttgaactccggaccttcggaagagcagtcgggtgctcttaaccactgagccatctcaccagccccaacctctcccccttaaggaagagaaatgtattctctaaagaaagttaaaacagtttagacttggttgtagaatactttggaaaagtagcatttgaataagaaaagaagatctgctaaagtaaagtaggcaaagggaaagaggtgtaagagagaggagagagaggcagagtcagccctgctgaccgcagcggggagggatccataagaaccttgtatttaaccttgtgaacatgggctcctcctcccctttctgcatatttggtcagcaatctcacaaccccgtccttttgagttgtgagtctaaattacaggggcaactgtggacatacagctttaaacacatttcagacgaacttgtactttgtttacagtggctgcactaataattcctttgcattcactactttttgcagtcttgattgaaggaaagtaattagttttgttttgcatacaatcaaatgacagtacaattgatatgtttgttcaattaatggtacttctagaacttttaccaagttaattttactggggctaacattttcaaagtaatttgaattttttaagtcaaattaagtatcatgggtttatatcagtggaatcacttcatagctgcatggcaccttctataccagttactatgaaaagatacacagtgataaattgcccagatgcaagatttattaaaaattatttttttatgggtgaaagttttttgttttttgtttttttttttttttaattcacgtaccttattttggttgtcagttgataggcatttgggcagtgtattggtttgttaacttatttattacgctatgcaatccagtctggttttagatttactgttttcctgctgttgctaataattctgctgtgtcccctttttcttgcttatttttagggtgggcgtcatggtgtatgttttgtgtgggtatgtaagtcgaaataaggtgttggtttatggtatgatatttaaaattcttagttgtacctacatatgatggtgcaacacaacacacctttaaccacagtaggaggatctctgctctatttactgagttctacagttatacctgcctgaaagcactgcttgtaaaggacagggcaagaaagtgtgtgctggtttacatggaatactgcagcaagaaccagagctccaaactgcattagtcattttccgagttttattctggtatgctcaaaccttagtccctaggaagacagaccgcccagtggtcttcttaccttgtgactgctgtataattcctcatcaacgaatgtctgtcatggctgtgcagaacaaagttgaggaagttcaactacaggcatttatagcacaaggttttgcaggtagcagtgtagctgctgatagacagctaaggtaggttagtcatatgtctgtggccctaggccgtagtggaagccaaggattgtgaattgaaggctagcctggattatatagtgagaccttgtttaactccctcctccacctcaaaaagataaaaaagagaaaagaaaaagcaaataaaactagtgaggagggtccaagggggaagatgtgtagatttaaaaaaaaatacctttcaatcaatactagctttaaatcacatttattagtatggatattgttttttatatttttaagaaccatttcaatatagtcaatagaaaactgtcaatggatttaagctgtactttgtaataggtaactgtacaagggaactagcaactgatagcaacattatgaataggtccttttatacatgttttcttgaatagatggaggcttttaaaaaaatgctttagaagaataagttattttattctgatttttaaaccagagatttaaaaacattttaaagaggttttgtggacctttgagatggctcagtgggtcaaaatacttccagttaaccactccttctcccagcaactatttggataggttaaagggtccacagcaagtgtgcacatacaaataagttaataagaaataataataaaagacgctttaaaggaatgtatggaaaataacacctggagcagtaagaaattcgttttcagttaaattcaagtgtagattgctcagtgtgggttgcactctactctctgtaaggccaaaaatggtttgcattgggtttcggtgttctctccttaatacggccatgtaggggtgtgttgtgttgtgtagctcacaaccaccccctttcctgtcctcatctcacttgggtaattacactctcccctaccttgtccatataatttttttgtgatgttaatttcacaggtgttttgttttttttccccctcccccccttgctcttgtagtgtcactcagaaagttggctccctttcctgtttatggtaattaccagagaacattttctctaggggagtacccgctatgtttctttgtggggaattctgttaaattttgaaaatggcttctttgaggtcaggaatttgatctgactcttatcaggcatctaaaaattttctttattatgacagtttttttcaccagcagttaatgtaaatgtaaataaaaacatttcttctaaccaattaatttgtatttaattgctatttttgatgaaggagggctctgttgaatcattttaactgctggtgataaggtccagggataaatgcatctgtgaccagagtttgattcctgggacactaacagtgcagaaagccaatgcccataagatgtcctctgatctgtgtgaacacatattctcaaggagaggatacagaaataaaataattatcagtcctttcaaacttcttccctctgatagcttcagggaacagtcaatcctttgtagccatgctgctattctgtatcccttcatccctctgtaatgttgggagaacagaacctgcttgtctgtgactcggaaggatatttcctcattcagtcggagctgtggagcagtatagttcagttcctggaaggtggcaggtgctagttttatgtttcagtgaataaaatgttttgtgtcatctagagcccttgtgtgcattgctcccctcccccaccatttaggagaatattgatttctcattttcaggcaattactttcaaggaaataaaatgttctgataacctatgattttgttttagcagttgtctatttttttgcaagtatcattttccgaaagcttcatctcttcaacaaataccatctaattccaaatgcctgccaattagacttaatagagaacttccacaatacagagtttaatgcaatagtgatctcattaaaggtgtgagcacagacatgccagtactgtctttagaacgtcgattgtgagtttattttattcaaggcaaaggccacatcaaaatagagtgagggcctgagctgtcacagctgtgtgccagtgtccagtgtctgtagcctctgctagtggagtttcactggtgtttcctagccaactaaaagaagctcaaaatgtgagctccaggttgaaaggaaggaagagtagatgggaaacagacacatttgtagaatagtgaaataaactaaagcttatccttagattaggactaatgtaagaagattcttattgcagcagacctcttgtggtaagcatcttacggaattgtttgctttttgttataaaaccacaagccattgtcaggtaattgagatagacatggctggtaatgaaacctatttgtttccttcctgtttatgcgaggctatgaaaaaaaggtcggggtgttctgttgtatttatttcatgagaaagtccactgttgatttacagttgaatcacagggcaaattgtcactattcgtggaacatgaatattaattgcctggtatctatttgctttgattgagggtgacaaagatactgaaataatctctgcctgagatcttgacaccttctcaataagggaatcaagtaaataaagaagtgtttggtagataggatctgagaacttatccaggatttgcaggtgccttgagttaggcaaagtgaggtatagatatatttattcgttcactgtagggcagttgttttagagacagtctgaggagtgaagctatttgggacaggaattggttggtgtccttttgtagaggtggttgagagcctgattgatgttgaagtgtgtgtctcataaatttaatggcagagaataatttcctcgtcccagaataaatggaagctggatgtctatagtgtatactgactatcctgttagtgtcatttggttttcttgtttactcttcatagcaagttccaggtcagcctctcatttatatagtacaaataaaagtgaacatataaccagaacaaaaagctacaaatttacaatccataggtagccattgatagaatttactggtggtgaaatgagccaattaaaatcgaatatagtatgaaggcaggtttaatgggggcaggagttggtcagtgttgacagtgaggggaggggagaagaacggaaatgtttggattatattttgaaggacctcttgtggataggaagttgttttagagacagtctgaggagtgaagctatttgggacaggaattggttggtgtccttttgtagaggtggttgagagcctgattgattcctgggcctggaacgtttagggtagagggcaatgcatgtcagccatgcatataagcataccaacagagggatgctgagagagcctgtaggccaggagactaaatatgtgttataacgcatctcatgttttggtttgttgagtgttttgtttgggcttgtgtgtagttctgacggttctggaactggttctgtagaccaggctagccttgaactcaggagatggattaaaggggcttaccaccacacatggtggaaggaaaatgttaaagattcccagaggtcatgtgcattgagatgccgagggcatacttttaaagtgtgatgggcacatcaatgagattttagtgtggcaggtgaaaaagaggaggcttatgtatggtaaatgaatttattaaggatagcatgcctcctcctctttctcctcctcctcctcctcctcctgggcaattaggatagttttcattaaagttgatgagggttaaagttgcatacactatttcttctcatccttgaatagtagtatcagtaatgtgtcttaccaagccctatcctataggtattttgttcgccgtgtgtttcagcactttttacagatttcctttgacgctcctgtgttgctgttctggtgctccctataaccatcatgagattgaaggcaggatatgatccgcagtgttatataaataaagtgtggtgatgtttcataggcttattataaaaggtagaaggctggaaacatactatgtggtgcacagcgacattccagtgtgaaaggaagtagtagaatgggtggggcaggtatttaagggtgtgtctatagatgcaatctattccatgtaaggtagggtatttagtatgggatggacactaggcacaattagctgtttctataataattacactagtgtaatatttatggtcagacttgcagacgtgactatcagtaaaacctaatgattggtataatttgtctggatggacagtgtagaggtgtgtatgtgctgatgctaatttttgttggtttactgctgagccgataagccagctggatagtgattgagcttgtaaagaaactcagtaatgttccgtgggaaggagtgtatttcacaagccagggtttttgagtgaagtagaggcaagagagaatcacagtcaaatggctttgagtggcctcagtctccagtgtcttcgtttatagccttgatttctggaaagtaatttaaaagcatataaaatattatatatttttatattatacacaaatatactattgtgtgtgtgttggtatgtgcgtggtcatgcatacgcacatgggtgcatacatgcatgcatgcatacatacattgcactgtaaactgcattgtcttatacgcttggccctgacattgcactggtttccttcatggtatgtgaaagtagtatatattagtagaagccataatattgtgaaatatgtttttagatctcttcctcagaagtatgttctattattttctttttactccagttggaactgcacagtgtttgacaacataactgtatgtctcagtgtattttgtacttcactgtttttaaattactatgggtttaacagtggcataatcctgtggtgggtttaggagcatctgcacagaatgctatatatataccttctctgaatgatgggaaggccatgtgtagcaggcagggttggaatcacttgcaggatggttatgtgaatgggcaccgagtatgatgtaataaaatgcattatcaaatagctcatatggtcacttgaaatcttaaccagtgtcgtacacagtactgtctagaacaagttcctatgatggaactttatagctaagtcattatttaattttgtgtgagtgctttaattgttgcgttgtacattgtgtgagttcagataatcctgctgtagatctggcatctttaaatatggtaggataagagatgtaggagggattagttctgactactctgtcctgaatgtaccccgtcatggcaaaatgtgtagatatcttcctgccatgccactacctacttgacaacggatgtctgacatgttcagacgcaaaagagctgacttggcagctacccagcagttttttataaaagcacagctggtggcctgaggttcagtctgtcagagctgtgttatgaaataaatcgttttcagcagaagttcctaatccaatttcaactgtaactttaaaaaaagggcagtgatcaaagtaaagccacatttatttagggagtaaactccttgtattagtgttttcaggctcatttctttatcccaagaaagggttctgagaaaaccttttcatgtttttattttaaaatcaaattcagagggtacaccccctcttagaaagtttcctggatgcttttttggcttctggccatgaattattttaccaggttttttttttttttttttttttggggatgttttagaaaagagttttaaagcatggattagcattgaattgatctgagaggattctgcggaaggaaacttttcccagtgtcaaagtgacagaagtggccatgtcccaagttgaagttatgccctctctgcagcctttctctggcagtgcctttcatccctctgcctttcactgccagggaaatgcttagtctctatcaagaagcactggttagttccactttattttaagtggattattatgtaatattatttattattgtgtgagttatgtatatgggtgtttgattggtgcacgcaccacttgtgtgtatagtgccagcaaatccagaaggtccagtagagggtttcaaatctttggaactacagcgaaccaccatactgtttcttggaaacaaacctgggtcctctggaagtgcagcctgtactttgactcttttcagcccccatttttactgtttgatactttcttcattgttttgtttgtttgtttgttttgtttttgtttttttggtttttgtttttttcgagacagggtttctctatatagacctggctgtcctagaacttactttgtagaccaggctggccctgaattcagaaatccgcctgctcctgcctcctgagtgctgggattaaagtcgtgcgcaaccatgcccagcttcttcatgttttaaactgttgttggaacaggatatcattgtcttgtacaatgatttaactgctggtacctgaaatattaccctaggaggaggaaatggctggccatcctgctttttcagatttgtcacgccagcactgtcagctgagcaaagaagtcacaattagttcatgaagtacattgagggcgcctggctatcagtgagcacttaggagaccttggtatcaatgcagacagtagcattttcatagtctgagtctccatgaaggtcatctgtacatggtctgcaagatttggttctgtgtggatttggttctccctcccatctttgtaggttgtggcaaatgacatctaattgctgagctgtctccctagtccagtgtgtccaccaacttcctgagattcttgttttggaacttgaaccaagtgaggattttgcattgtaatttctgtcaaaagtattttgcctaaatatcaaatttgcttcctgaccaattgtctccccatccatttaaaaaaataatattttaggattgttccaaaggttgtcaaataagtagctaaagaaaagaaatcatagcgaacctgttgcttgggtatgaggaatttcttttcactattgaactaactttctatctgtggggagggagagctagatttacaaagggtttagggcatgagactcttggaagatagagaaaagcaggaacctatacacatatggttgtgcatgagcaacacatgtgtaatgtttttctatgactggcaaattatgtccatgcctacattcagataaagattttctctttctttcatttaggtggggtagagtgttagaggcagtatgtaaatgggttgctgagaaggagagatgtagtcaagccttttgtgtttagtgattgttggataatacaaagttagcagaggttaaatcatcaacatggctgtaatttcaggcacttcacagtagatgttgtctaaggttgaagagtaggaagttaagtatgggaaaaatggggtgggttgtgggaggagggagataaggatgaagccctctgctcagtgcttttccctcaggcttctatcctgatcctatcattctgtagactgttctatgtatggcacctcagaatgaggagatagccccagcagaatgtttgtgtggctcactaggacttttgctctgtgtaccatgcattgctagggagcagtggggaccctctagatagaactctgagtctgtaagtttattaagtcagtttactaaggtgataggttttgaccagccatgtagatgataaaagaatagttgtgcatatgtgtgatttttttttttttaatgtctagcacttgaaactacaatctctgccattcataccctgcttctcccaaatttaaagtatttataggtgtaataaaattgctggtgtcagtaactcaaccttgaatgtggctttctttgtaggcatttccaccttccatggtttagtctttaaatagacctcagttgtggggtggggtagttgattcttttatctagagccctagtcaaggtaaagactccagccttcacagaaaacagtaaatcttcattggagtttcataggcagagctgctttgggactttgtgatttataaactgttgatggaggaaatattagtttgtaatcttacatcattgttgtggagacacacggaaagaatgagactgggtacttctctagagaattacacctggcagctttaatgactaggccctggatgtatcaaaggcggcttttagcccgataagcccacctcccacctgtagttagcactattgtttggttgcagattatctacttggacagtcatatgaaaactcaagggaaagttaattcggtcacattttgttcttcatgtgttatatatctgcatcatctgcctcttgattaattatttgaattccacaaatggggtgttacttaaaaacctcatgttgctggttctaatgatttttgaaagtccctggtggcatgcctctcattacaggtttagcagttacttgtaatttttaggttaggttggcacagtttcttcctttttcttggtcctctaaaggtgctgccctgaaacagaatacaatcttggcaggcctatcaggtgaaggagttctagtcagggcaaggtggaagtggtatcttgtttcctttatctagaacagtagttctcagcctagagtgatggaactaccccttcttgtctcagggcttgtctcagaccataggaaaaacattatatttatactatgattcataatagtagcaaaatttcagttgtgaagtagtgaaaatattgttatggttgggaggggtcaccacaatatgagaaactggctctattaaaggggcacagcattaggaaggttgggaaccactaatctaggaaatccttgatggggatattgggggtacatgaggaaatcagggtatttgctgcattccttcattggaggatttccttgagttttacgcagaaggaatgtattaccatttcatactctggcactggatcatataatacttgttaggaatgtgacatgcaacaccccatcaccccactctgtccaggatttttacatcatagataagggtgtccttaaatttatctgtttttaatcaagtgttagatatatccactgcacccagtaggaattttacagtgaaatatgggtctgaatatttgtgtgcctgattttcagtaattctccttccacaggatgacagcgatgggatcccgtggtcagaagagagagttgtacgaaaagtcctgtatttgtccctaaaggaattcaagaatgcacagaaaaggcagcatggggaaggccttgccgggagcctgaaggcggtaaatggtgagttgaaagtggaactggatggagtctttctgtgccttgttctgacctgggcacaagcaagcttactaagctaagagttttggctgtatgaatatatatttcagacatcctattgtatttatagatatatttttatgtttctttacaaaataatatttgggaaggtgtgtcagtctgttagaggttataaactcaatgtgacatctatttacttatttatcattcatgtatgtatgtatgtatgtatgtatgtatgtatgtatgtatgtaatcaatctacccagtgagtgcataggaacctttaatgatcttgttggaatatggagacttgcaccctacatgaggaaatattctaaaaacctactgccctttgtgctatgtgctaccaacctgtgagcaccctgctggcttccttgttgaccagtagctacaaggcctgggtgcctaacagaatgctcagtctcttcctgtgattgtcaaacagatctggaaaagtggagggaactgaccctcacatttcttactttctctgcctctcattcagtagcattttaaaagatgaatgctaaagtaatcagaaaacatttggttgttatctggttctaggtgtgatatatttcatagtctattgtatgttcctttattgcgtatagattagtgaatgaaccgtgttcatgttccactttatacttggctaacaacaaacaagaaaaccacaggaagagaccttgttgttgttgttgttgtcctataggtttggctttggaaatagtggaatcagcacttagagtgtactaactagctgccatgttatagctcacatatgccttccaatatttcccctctgcctccctacaacctccagtttctcatgtgtgtatatgatgattatggaaatcagagaatcatttggattttggtttttaacctctctcttgtctgagatggctttgtttgctactgtgttacaccagttctcttttgtagttctcttttgtagttctcttttgtttgctttaattggaaactgaatactccatggtttctccttggaagtaatagttatagagtggatctgtttgttgactttttttctttttttcttttcttttttctaaagatttatttatttattttatgtaaatacactgtagctgtcttcagacactccagaagagggcatcagatcttgttacagatggttgtgagccaccatgtggttgctgggatttgaactccggaccttcagaagagcagtcgggtgctcttacacactgagccatctcaccagccccggcatggttttctgagaccacttctgtgaactctactatgtacccaacttgttttacacagtcgtcttttttttttaaagatttatttattcctgtgattgtcaaacagatctggaaaagtggaggaaactggctcaaatttcttactttctctgcctctcattcgagacagggtttctctgtatggccctggctgttctggaactcactctgtagaccaggctggccttgaactcagaaatcacctgcctctgcctcccaagtgccgggactaaaggcgtgcgccaccactgcctgtattttatgtatatgagtacactgtagctttactgatggttgtgaatcatcatgtggttgctgggaatttgaattcaggacctctgcttatctggttgagcctaaagatttacttattattattatatataagtacactgtagctgtcttcagacacaccagaaaagggcatcagatctcattacagatggttgtgagccaccatctggctgctgggatttgaactcacgaccttctgaagacccatcagtgctcttaaccgctgagccatctctccagcccctgttttacagtcttaagatggtgctctatcttcttactattttttgtatgggtgttttttctttatgtattatgtgtgtaccatgtgcaaacctagggtctgaggagtccagacagggcatcagtcctcaggcactggagccagagtgggttgccatgtggattctgggaatcggaccctggagctccggaagagcaataagcactcttaacctttgaccatcccttcaatttgacctactgagtatccttttaatttcagcagtgctcattttagccaacatgtattcgaaagggtcatttggagaattatgtaaattctagatggcatttttctatttcttggttgcaacagagtaaactctaagccctctgtagatagtatttcttggtttattatacagtattcttcctggtttaattcatgaatatttgagtgatgagaagtcattggattgaatcctagagcaagagtagagcaatagtaaccactgattgaggttgctgtatgtttgggaacaggcatgtcatgtaggagcagcagtcagtgccttaatagtattctctatctttttttttcccagcaattaaatataatttttcctaactggtgttatgagaagaagttagacggtcatccaggatttgtagtaatgctactatttagatttatgaacaaaagtaaagatcttgtattagcaccaagtggtgtgcaggtacacagaggtaatcctgtttcaccctttgccttgttaaatacggtttctcctgcttataatgccgctggtccacatactttaggctagatattctggtcaagtctctgattttttttttttctccctcttgcttataggactgttgggattgtatatgaccactacatcccgtgtgttctggggatcaaactctggttcaggcagctaggattcttatctgtagagccttctacacgactgacttgctcatttgtattgtttcaaagtcattttggctgtgaaattgctgtttatatgccaatttcttgttcttgttgatgttattcaggctgtttctaagatcacatttgtctctctgcagatcaggtttcttcagggcttgagttcctggtattactaagaatatttaaccaggcaatgtggtacctacatgagtagacagaggcacatgaggttttatacgttctgagaccacctgaatctacacaaagtgaagcccgtcttagcacagtcactcctacaccagaatcttgaaggtagctatgctgagcaaaatttggttgttttcttggcaagagccagaaagcacaattaccaaaatgggaataactccttttttctgggcatactttttccctcttaacccagaatgttgtgcaatagggtgcacacctcacctttcctggaccgccccccaagaccttggagctggagttgatgttgagaatagagtacacgtgcaagaaggaagggtttatttggctcacagttcagggaatgcagcccagtaagaagggaaggcatgatggaactagtgtcacattgattgcatccatagttaagaagcagagaatatacaggaattgtgattaggtcatgaaatctccagaaaagctccttctccccacacacacatctaaaccgcacctcccacatgagaaccaattgttcagaaagcctgtgggtggcttgcatatctgaaccagtacatttcttatggtaggatgtcccatcactatatgttctctaggtcatgtgtagccctggcatgggtgaatggggttgtggctgtgaaacaaggaatatattgacttaagtggcaaaggacagtgggggagctttctctgtcacagtactagagcttgggtcccacctcccgtgtttgtgtttctcagttgcctgtcattccagctcccaaggagccaataccctcttctggttttagtaggcacttgcccacctctgtgtttatacacagtttctaaagaaaacttggcttaacttggccatcagatgaaatggttctactatttcagtttttattattatggaatgtatatggtagcagtaaagaaggttaaccacacagcctttactaggaggggaggtgtctagtggtagggtggtgcttttttaaaaattgaaaataccattttttttctcctcccagatcattcccacttctctacccacccaaccttgctcttttaatctctctcactcctctcttttcaaacaacaatcccaccaaagcaaaacaaaaccaatattaagacacaaggcatatgacaaaagacatccaggctaaaatgtatggatggacacacacacactcttaaaataaggggcttataccaaacttttcccctcaaggctcaggtaggcatgggggaaaggtaggtggattgtttgtttgttttagttcataaaacagccgttgagatttttttgggttggccattacttgtgggtacactccattgatagacgagactccaggggagcaaactggttttattttctttgctaccctatctatcagttgctgttaccttcttggttagggggaagaccatgtccacttgctcctcccagttccaggacatcctctgatttgaaaacgtgtgcgtgtccttgtgtgttttagggtttctgttgctgtgaagagacaacccgactacagcaactcttataaaggaaacatttcattgaagttgactttttcagaggcccattatcatcatggcaggacccatcacactatgcaggcagataggctgcaggagaattatcttttttgaatgtacatttggtagaggttttgttgagtcacataggcatttattctataggcatttattttgcagtagcagaattgggattctgctcaaattatagagctgggatttcagatgagaatctgaattcagagcacatggtggaatactaaatcttcgaaattatgttgaacacagcatgctttatttccacttggccattttttttattattatttttaatgcttttgtcctctttaagtttttaaaaaaacttatgcgcattggtgttctatctgcatgtatgtgtgtgagagggtgtcagatcctgtagaactgaagtcacacatagtgatgactttctgtgtggatgctggaacttgaacctagatttttttggaagaatagtcagggctgataaccgcagcactattgctcctgccttttctcctgtcatttaaaaacaaagatgtttccagcctattgcttcttctataggactttcttagaaaaattaaaaaaccaaaaaatagtgttagtttcacattgaaagtggtatatggttgacttaattttctttaaagacttccactaaatactcgcatgattagtcctttgcccccagcatttgtgtgaaggagttgggtggatgtctgctgttaatacagagagctaacatgtgagcctgtgtttgagtggctgatctcagccttccacttctacagggcctataataatgcaaatgggcacaagatatcatagatctcctttttatgtcataaaattatgtgcaccttccatcttacttttgtgctccagaagtgacaaggcctgcaagcctttgccttgttaaggaagcccatgagctgtttcatcagtggtgtggattgactgtaggacttaacgtcattattgcagtttcttgctggagctgggtggatgggtgtggcagtgtagagatctgctggtggcaagccttctgcttccttgcttgtatattctaccccgttccctgtctgtaatgaaatgacgggttattgagaaagcttctggggatgcgaaccttggccaatctctcaaggcccttgggcctgccgggggctaaaattaggaacatttaaataataacatgctacacaaataacaagtacacataattacacagtaagagaggggagctattagctgcatttgaatttcatttgctccctataaatgtcatctcagatcagcaagcccttttggccagcaaaacaattttgagtagatttaatggaagctgtatttctttctttagatgtacagcaggcaggaatgtaatagttaagctgttcttcatatttcacagttagtgttggaagcctgtagctgtggtttgtgcactcaaaccatcagaataaatgagaataaaatggatgaggaaaactgtaccttaagaatggagtagcagtttgcttacccagctcaagcctggtacttccaggattcaagctcagcctttttggagtagactcctatttaattaatttaccactcagataaatagcaagtagttcctcttttttaataacaaaaaatatttagtacacaagttattaaatagtcagattgcattttgaaaacattacagtgattccttgtcccgcctgcctcttatctcctgtgttctcctagtctccctttcatatcccatgtgccattttgctcatcctgtgttgcctgtggttctctcccttggtgtcctttctaatttttttcgaccaggcttttaatgatgtagctggaattgttaattaggagaagtgcctcaggaatggagaggtaagtatttactaaagtgaccatggttctctaattcaatcatagaagccataaacctagtttttggttctttaccctcctctgctttggtcatagtcctttaaggtcatcagccaccgtgaggtgtgtagtttcaagtgcacgggcctttcccatcagtctggcgcacgctttattcagatggacaatcttctgccttactgtcttgagtgctggggtcacaggcatgtaccaccactcctgatgtcactacttttctgatgaaattgtgtgtctaaccatgatgcccaagttgaattgccttggaatgtctttcactctcatggaacattagctggtacaaaatgagtgaagcaaaaaaccaaaagagattcctatagaataattaggtcagaagtccacataggaacctggagtgaatatggctagcagggaggcagttgttgttgagggcccatttttcaacaaccatggaaaggctgcattgaagaccttgcagaggggggtccttgagatgagttaggccttctaatcaaagagtacaactgatgctgtcagtgacagaggctgggacttgaaattgagctctactggagagtagctgccaggacagatttccatgactggtatatgtgtttgggctgtgggtgagggagattaattggtagcagagatctttttagcggtatgtaggtctgtctcaatattttaaaacaggaatcttgagccttgatgaggagcttaatttgaaagaacggatcaaactgaagacatactagaacctagaaactgaagacatactagaacctagaaacccaatttaaatgacaacagtgccaagttgtccccattctggctgctcagaaggaggtatttcatggagcatttgcaggtggcactgcctatgtaggttaatgtgttatatcctgccttagacctagtgtccaacactctcagcccgccttgtgcttgacctttgtgaggggtgtccttgctgatgatgtcatcgttttcatggtctgtgcatgcacggccacctgggggatgaggggagtttttagatgccacacggtaagacccttgtctgctaatttgtttacataaagacctatgatctggatcctggccttgaagagttgatcctttagcagatggatacaaagcaggatgctggagctagaacactgactaactaatttggaggccttcttgttgattggcttctttatgttgggaagaagacagtttcctgcctcaccttagggctaacaataatcctgtaccacggacagtacagaatggtaacattagcggcagaaagagatgcaaactgccttccattacagtctggtaggacacaggggcagattacagcaggagttcattgtctaagttgtgttttcttctgtgcttatgtgacactttcctgatgataaggtagcaagatgtttatacttttcaaagttcttatttggatgaagtcattctatcttaagtggggaaaaaccgattcataggtaaagaaagctaatgtagaaggcaggatggttgagtacctctctgtgttgtacagtatgtgcagaaggattcatgtggtggccttgaaaggaaaaatctgtagtcttgaccatgagaatcctatgttgggcttttgggacgaggaagcacttctatatctatagtgatttcgtttagtagccattttagtagggcttaatggccattttctaagtttaaaccatgtgtaaagggcaaaagacccctaggatcactagaaagttcttgattcctacacaggagtaggaatttgagtaataggatctgcttattagtgttcattcttgtgaaatgataaggccacatgtgtttttaaatttaacacatttcatgttttaaactctaatatgtatattgatggtgctataaatattgtttagcacagtgaacttctgtagtgttgcagtctttgtggaaatgctctatctaccccgccaccagttgaaaatacgtttttatttctaagctacatgaatgttagaagtcctacatacggtgtatctttgaagctagcagagtgattaccgatattttaaagtatctagtaatactaggtatgtataaaccccttaatttacaattcatttcttaatctattttgctgccaaaatttcatctatcctcttggcatgccccccacccccatacccttcctcccaaagttcacaaaactttatagctgtctcatctgaggaagctgggaggatgataggaacatgagtagcttagtagtttaccacttctgcttaagagaagggtcatctgtgtccggccagccctgaggataaatctgcagagtgggccacttcctccacatgtcccccatttctatgagtgtatcatttcatgctttgtgtctcactactgattcggctcttgggagatctgaagctctctccttaaataaaacccattcatttattatttcttttgtttcttccatgacttgggagaattttcaaaggactcatacttagtaatgaatctagtgaaaagctattttattttgtcacagggacacatgcccatgctgcaatcctagatacttggcagactcaagcagtagatcttaagggtttgccaacctgggggtctcgaagggatgtggactgcttgtctaatagatacaagaagctgattcagtttttagtattgtgccaccactgttcccaaagaggtggtcccccccaccccccgtgggattgcatcttgccgccttctttaatactgcacaagtctttgggtctagctttgctagaagacagtctgatgcgccacactcgtgggcacgatctcatggtgttctaactatgagggaaatttacccattctgcacgggactttggcttgtacagagtgggttactatgtactctactttattagaagagttttatgcattttatttgtgtgggatgggacgttgtatgctgtggtgaacatgtgaaagtcagaagacagcttgttgagagttgggtccatggggttacagaggtcactgggcatggtggcaggcagccttagtcatagatagggctatcttcccagttcttacaaaacaagcacactagaaagaaagccttgtcccaaagtgctcataggatttgcttctttaaagtcttacggtaattttaaacttgcacctctaccttttgattcctggaagtgttctgatactagtggaagtgtgctgtcaattgattgttgcttgtcgctgtccctgtcgatccttaagttgttctgagaaatgtcatgtgaaagcactgtgatgccttaggtttctatttttttgaactgtttgagagacatgcatctcctaccagttcctgcagaggtagggttggactccagtgggaggctagcatctcctgtttgcctgcttcctcctctcattctcaccacgtgctgcacatctcgactatgtggagatagcctttctagccccttctacactatgcaccccacaaatgttctgctctgctagccttcccaggctctccttgcttgtgtagaagtcttccaagggaataggttaagattgccatcaagtggttggtcttggtagtggacaatagtgtgcacataagtccagtttcttagcctctctgtgcagaacagtgaagtttaggaatagtgtttgaggagtaatctgctcttacttatttgagctgatgtatgttaaggagccgtctttgtaatcccaaactgtgccttgtatcaaagacaggtacagctgaatctatttggctgggttcagtctggctactggatggagtacaggccatttagaaggagtgtacctcaagatctggcttaaaagtgcagtgcgtgtcaatcccgtcaagatcctgatcaaaagtgtgtcatcctacctcatgatctggattaaaaccctgtgtctattccagcctagagatctggaacacgagtgtgaccaccatttctgtctggttatagttcattccagataaagtcaaattgacaacctagaattgctatccaccccttgtcattcaccactcgacacacagttatatctccttatatcatagattattttcactaaattcaattcccaaacaataaccaggtcataataacgcctaacaacatttcttgtaaaaccacagatgcttattttaaatttacaataggttcttggggagcagcatccttttagtatctcaaacacaaatatgattttaattgatgttaaagaaattgaaagaaaatacaaatatgtaaaaatgtattcttaatggaatccagtggaagcaggagagtcagttaaaatgctcatttctgccgggcgtggtggggcatgcctttaatcccagcactcgagaggtagaggcagtcggatttctgagttcgaggccaacctggtctacaaagtgagttccaggacagccagggctatacagagaaaccctgtctcgaaaaaccaagaaaaaaaagagagctcatttctgcaactgctcacatggttcatagatggtatttataactacttcttctcttcattctgcattatctccatcctctgcaagcacctcagcccgtcctggttcttttcctggaaaagtgacccttaccttctttcctcatgggaatccttttgtccttctgcctggataggctgttgtagtttcccatggactttaaacagggcatggcaacactaagagaagccctacaggatctccttcactccagacataatctttctgcagcagaaagccctatatgtttggctcctgttgtttttctatttctaaaagtaaagtagtaatttttctctctctcaggagtgtcagtctcagaatcggtgaggattcctttgacgtcttagtagaaagcacaccctgcagaaggtgattagggttgaggcagctgcacgcaggagcagaccacttggaaagaattgaagaccaggtgtgcaccgttccaaggttctggatgtcagtaccttgaaatcaggatccattctaatactaagagctatggctttgacccggccacctttactttccccttgcaggctctcctccatggcgtgggtaaggaaggactgtcctacgagcatagaaggtggtccgaattagcaggtgctcctaccgctgtatgcagttgcttgcccttgagatctgtgagctgcctgcggtggtagtggtttaactgcctttgagctgcatgagaaaggtttctgcttgctcatttggaaggagaaaccttatttggagggaaaaaacaaagaatggaaaaatatccaaatggtgtaaatatgaaacagtggaagaaaaaaacctttggacctattttgaacagttatttcaaactgaacgagggtatactttatagtcatccacattacaatctgtcaagtcatattaagccagaattcctggattctagccatctcaagcaatattgaacacatcaaaaattttgaatgtgttggaatgaacattgacattggatcttaattttcattctcttagtagcagaaataatcagattaccagaaataatccgtagcagtaagtttacagattttgcagtatatttggagactttgatggctaaacataattaggaaatctgagatccaaagcacctctaaagcagagttttttgagcatcataagggctttgggttttgtgggtcttgagacattgctctatggtttagaacacttgtggtttttcttgggtgggcttggctgtcctgagtccagcactgaagagcagactggccttgtacttatcctctgcccccagagaggaacacttttttcttgtagataaaaggacgctggtttggttcccaacaaccactcacatggtagctctagttgcacttacatgggtactgacgatttgtttctgatttccaagtaagtgcactgagtacaaatggcacacatatatacatgcagacctgggcctgatccccaggacccagatggtaaactaacaatctctctctctctctctctctctctctctctctctctctctctctctcacactctctctctctctctctctctctctctctcactcacacacacacacacacacacacacacacacacacaggtgttagctttgtcccattcattgggtatggcagagaatgactttctggtatttatatggcatattgtctacattgtatttttggaccaggagttgtcttttttttttttcccctttggatgaatgcatggaaggtccttgtgaagtctctgtcaaagaaccaaggctgtatggtgtgttcatctccctaatcccgtgcaatgcagaaaaccgagtgtgagtgctgcactacctcttggtccaggtgttaccaagttaataacctaaaaagtgattttcattatgaatgggtttagaagccatcttgatgtggcctgggagtaaaggaaggtctcaaagtttacaatggggacccaaagagagataataggcagtgtgcactaaataccagcaatagttacaaactgtgttgaagctcttgtaaatatattgttgctttctgacatataaacttctaaatataacattactgaagtctctcacttgttggcatccatttttactctagaagcccatttttacattattaagtatacactcttgatttgaatatgtgcaagtatgcagtcagatatacagatcagagatcagctttctctgtctattccctttccactatggggtcaggctgttagtcttccattgcaagtactttcatcccctgagccattgtgctagctggtttactagtttagaacgatactagctgtgtatgagcgaatcaagttaaaagaaccagatgacgctccttcttaaacaatatttcactgtaagtttcatatgttcgttgttccttaagttcaaagttcctgcatttctctttctgccagcagccctccaaatgtgtttctcagtgttgtataagtacatactttcaaaagattgaccactcccatctttaactttatgggtttttttttttttttttttttttttttttgtttacctcttaaaatcagttgagtgcttttcagatattttaaaatcgatctcaccgggcgtggtggcgcacgcctttaatcccagcactggggaggcagaggcagggggatttctgagttcgaggccaacctggtctacaaagtgagttccaggactgccagggctataaagagaaaccctgtcttgaaaaaccaaaaaaaaaaaaaaaaaaaatcaatctcccagccatacccttcttcaatcaaaatgtatttattgggatgcttctctgttgaatcttgatcaggatgccgtcagtggtgctgtttcttgaaggaacagccttctctcattcgtgcttttctgcctatgagctgacagtggagcagccaacataaagactgctgtttgtgcatggctttggtgattttatagtgtccttgcatttcatacccaccctaagtgggcttctataccatatacgtgatctagtatttcctctcctatgtatcctggagaaggagagaatcatcccttgggaggtcatgttctctacagggaggccatcaccacagcggaagccattcctctaatgtttgcctggcggccctcccactcatggctgtatggctttagctttcctggaaactcagctctgtaggcttttgtaggctttgctttaacccctaacacgtgtttacctgcctcttcctcccgaatgctgggaccaacgctgtgtcaccattacctacctgttttgttctttcaattacagttttggtctcttggtcttttcgatgttgttcagagcaggcaatgtttaaaaagctttgggacacttgatttttggaagctaattaataatacaacataagattatagaccctttctatcttgttctgcttagtaggccgtgttcctgtgacttgctctaagcctactcagccagtaaggacactgggactggaacatgcagtcttgttctgcttgtactatccttagagaaatacctcaccagactagattctctctctaatactctacaactgcatagaggcatctttaattttcaaattatcccattttgcaaagagccctggcattttttaatctggccttctgttctgtactctagactacattgttgtgatgcccacttaagggtactacctcattaatgaccaccatttgatccaatgggaaagggaaacagagggttatagttaaggttagacattgagtattatctcttctgactcatttccccactatgaatgctttttagtttagttgattctagtggtattttattagcacgaacaaacaagttagctgtatgaaatttgtcactcaatgtggatcactcttttgagttactacaattattggtattattatgttattgtatgggatggccccgatgccacattggttatcagcacaactgcatgtattacccagtatgtgcaggcctccctcccctctttggcattttaagaattatcaaggccatttggtaggcttgtgtatacataatcctgcttggtagagagccagtgcactaaagcttagtaaaataaaaatctaaacaaataattacatgcaattgtccgtgtacctgattttaataataacaatggttttagtatatttggttattatatattaatatcttatattatatattaataaaagtcaaatattagcccagtgtatccttttttccacctttttggatcttgttttaataaatcacacctaggtgacaggatcattacaagaaattggtcaaaaggatcattagggtgtaggcatcctttgacactgttgggagattccttacagataccaaagctcatggaagactcatatttgtaaaactttatagccaggaatgttcttgtatctagtcttccactactcaggatgtgtgacaggagaattgtcagttcagttccagtttggacaagatggtgagctaaggccatcttagatcttggggagtattaagggaaactagattctgaaacttcatttctctccaactgtatgtgtgataggtttcctctattgcactttccccagaactggtcatcaccaaagtatcttgcccatcttctttccagttttctgcagtgggtgctttcagtattgaagagcctagaggagccctgcaaagagggaaacaggggtggggagattcttgaatggcccccctgtctaaagagacatggtaacttggagtgtggttggaaaccagactattctaagccacagctttatcatttatacaatagattcgcaccattccatatgtgggtattacaggcttcagaggagattgtcacttccctcttcaggaagtgctgaaatgcaggaaatttcttaggtgatctaagaaatgaccatggtaactgtcaggcatcataccccagggaaagctagtatctgcctttaccatttgcaattaaattatgactatattttaagagcccagaaaggtaagaaaaacagagtcaacttcttaggctggggtgttccagtccttgagtgtgaacttcaattcagtgctccgctcctgcttttagacaccatctttacctttcttggaaggacataaagagaagcatgtgggtagtgtaaagcgtgtattctgcacatcagcattgtcagatgaagctcaaaagcttcaaaggaaataaatgacgttgaaaataaaaaaagacagacagacagacagacagacagacagacacacacacacacacacacacacactccctccctccagctactggaggccagttggatgcctgcctttttcacccctctcagcagctgccaggctacagagcctgttttgtgaaagatcaagaaacaatgagggaaaacagcttcagcttgattagattagatcaatttatgtgcctggggaggggcctaggcagggctgggggaggggtgtcctgtgctggcagtggcccatgcctgcccattcggtcacttcataagtaatgaagctcccgtggtggctggaattgcaggaagggggagggaggaggtggaggaggagcatgtgaagagagatttctgcagtctgtctggagagctgcccagggttcccagccaaaaaaacaaacaaaaataaataaaagccaagtgctgaatgacacagattatgatattaaaaagggatactattgaaacattgccctgtttcctactgttgttggaaatgggtgtgtgcagaagcgaggggcggttagtgcactgtacaacaggccattccttggacacaaaagtccgtacaattaaattgtgaatgcccctcgccaacgtcccctcccccacctcatgccagaaattctgtaattttgatttgtctgcattgcaggtcatggaaatagcaggatggaaagctagtttcttttgccttttctcattttaattcatcaaaatggtaaaaagcggggagggggaaagtcagccagatgccccctccttttcagtgttcaattctcttccaggcacataaataatcttctctcccgactgtctcccctcccccttggcccccgctggtgttcggctgtcctattgccgcgcggaatctgcactgccgcttgcttattacgtacaggggaggattgttgacaagtgctccggagcctgcctcactgcgctctcccttcctccctcccttcctctgtccttcttcctctgtctctgcaatgatccggctctgaggatggctgctccacgggtctgtcaggtgcagtttttggtggcttatcttgaggaacctgggatagaaggtctgttcctataaataaaagaaaaaacaaatagcttgtgattcatttcagtctgatttggcttttgttggagaaataggcctttgtgggttttcctgctaggggtcccgattatatatccattatggatggcaagggacacacacacacacacacacacacagtatttaaagtgttttgatttaacattattttagatttttatatcttccctaagggtaatggtggctcctaagataccatggaaatttacaagagagaattaatgtcgttcttagcacattaagctctgttgaccattttgaccaaatctgcagtttaaatcttgtatgaatttagacatttctctggggattgaccaggcattcagcaatagcagatttctgtgttaatgttaatatgccagtgtatttgtttatttgccatcgtttagaaatagatgcttcatgaaagttaagtcacttcattcttaccctacatctagttgcttttataaatagaatgtttggtttcatttccctcatttcattcttttcatgttattcttcccttaaaagatggaggaaactgaggcatgtgagtagaagccccatccctatgtgattctggctataccagaatgctttatactcggtgttgctttgtttttaatttttgtacatcatttcatattttcattagtgtgcataaagtcaggtgtaccactggtccggttgtggggcacattatagccacattcctatagtcttgtatagcttttcattttatttcaatattcgaaagactgttcatctgggtagcagtaggccttggtaacttatttgctattcgtgtttggactctcaatattgtcatttgaaaagtgggtgggcagttgatttgtttgtatgcaattgagataattaggtgcttggaagaaattcaccccgccaacaaaacaaaagaaaacataacttggaccctaatgtgtttagtgtatccatgagctgttgttaaagatatggctgataaacacatccataaattggtgtgggtcatatgtggctttggtaattataagcaaagattagttcacaaactgtttaaggttatggagttcaatgaaggcctgcaagccagatatttgagaactggtttcattttggtacgtacaagctttaaagttctaaaccgttgcacacatttcaatttcttgtagaaatctttatctgtatggagcaccaaaataagtcttgtaaacattagtctcactgatttttttttttttaaagctcttgtgcctgtcctcatagctctcagttccattgttctgcagctcattttccacagtagcccaataatcccagtagtgcctgtcatgtgctctttccttaatatagcttttgacctgagatggtcagtactgggccttaaatgctgggaaaccatttttgtaggtggggatccaagctgttggttgtttgttaagtaggttgcatggtaggcatgtgcttaacctgtgtgtcagtgtgaaatggagacagatattgggatagtaggtatatctagaagttagagcctgagatagtggagtggataccgtctggaggtagagcctgccattgtagagctctgaaggtgcttgagggcagtcttgaaccctacttattctaattgctgggaaagtcatgattagcatgagtgagtgaaagggagaattaattactatagtgtcaggttaattaatataacctgtggttgatctttgacccaaagaaatgatgctgtatgctaaaataagtgcactgatagtccctgggctgtttaagtttgttgttgttgttttagagatccgagatttaaaagaaaatgtgcatataaagttcatttacgagatgtgctttgtttgatgtttgttattagagccctctttctccttgggagcattggttaagatgtgtgaagaaggggtatcttttgtctttgggtgatgtggttctctttcatccagagctctagtcatacagactgggacccattttgtaaagctgctacactatattgagatggccacagggctttttggtgaggaatatggttcaaggtgaggaaatgttttgttggctctggggcacgtgataccttgcttgcatagaaataaatagcttttccagtagcccagatttttcctgtcaccatgttgggctattgcttcttttatcaaaatgttgcccttgaaaaagagaatttaaatttctgaataataatgtctgtgggagctgagattgatggtgggtgaagaaaggtctcatgtagacttttggtatattaatcagtatttatatctatgtgtttgagatgtgacagaaatgatgaacaaaactcaatcttacctttccatagtttgatctattttgaggttccacagaggctggtattttgattacattttcttgactaaaatgggaaatctcttatgctgatttgagaggagacaaaggggagtctcagttggctgaggggttgctctcatgagagagaaggataattattttctgtaatccagggtaggaagccattttcatttgcgcctcgttgaccacaagtgtcacttacatcctgccttatgactatcatttgttctcagccacatcagagtggatctgttatgggcttcccaggctctgtcctgctcacccctgcccttccggttgtgttggatgttcaatgctgacctgcatatgtatagttgagggttaatatctgtccacattcatgtgtgaagctggttcggcatcagaatgcctgctctgtttgtaaagcagacaacccagtgtttctttctaagtctgagagaaccaagactgtgttttttactagtaatggcggcaaaccaagcattctgattacctaagagaggttcttgcgttaaccaagaaggatgctattaaaattttcctcccaactaaaagtgaacacatatgtgcgggcacatacagaatgataaattgccattaaaagcgaaagctctttgggtgcttgactgtttaatatgtaatgtgataccttgtgtcacggtggcagacggcattggctctataacagagaatcaccttttgtgcatacttcgtacagcaaagctaaaaacattgactctccctaatatgctaataagttttgtgtgctccagatgtttgagaaacattggaacagcttcaaagccctccttgttttcatttctttttaacccttctcttgacactgtctttatagaatagagttttcctctagttttgtattctgccatgtcttctttgtgtctaaaacataataagtgctctgtactattttttagatgttggaaaacaattattttgtgtttatacatttgtgttgtataatctagatttaccacttattgcttaaagattctttagttgaagaaggcattcattttcatgtaagggaaacagagatcatgtacacagaatttccaacatgcatttaatcgtctgctactgttctagactgtggtgctggaaggtttttcaattgttgctaatttaggagatgagctgaaaagccactgaacttgcagaggccctggtagcagcatgctgctgtgtttaatttcttggagggggtttctgggtaatatggtggtggactagtagtatccaggctatatccagttggtggtggtggcaggcccaatttctgagctgtctctatgccagtgattctgactttttgattcagctcatatttattgcttttgtgaaagacaatagactggtttaatttaagtttaacctactgaatattaatggaggagaacaaatgtagagaggctggatctttgggccattcagtttcctctctgttagcctccagtctccagcaaacatttgtgttagcatttgcagaggtggggaatgagggtaggggtcgtgaggggtccagaaaatgtaaaatgtggggtctgtgtatgggaagggaatgctgttacattatttctactctactaaaaataataataatttacatcattggtggctgtgctgttaaacaggagaaagaaaaggcacagaatatacatatcttgtgttgtcatgatagctattctgccctgtggcatcatactccattctgcagatgcaggtctcctagtccaggcaggctttatttaatctaaagtattagaaaatgtgatagttggagatgtaaaagaaagtaaggaggagatggggaaaaaagaataaggaaataaattgggaatgaatgctctatttaagcatattgatgaggaaacttaaaaatgagtataattttctgaatgatttttatacggaatggaagtattgaaattgaaaatattgaacatgcacagaatacaatcagctctgctccctctttaaggttctttttcaaacactacctctatgttgctctctctagttcaggttcctctcattgtatgacttggaaggtgaaaagctgggagtgccctgaaggtacgagtttgatgaggccagtggatagtggagcccccatttctattgcattaatgattcagacttcccttaggatcagaatagctttattcctccttacttcccactgagtgcttaatttctgctaaaattctaagagagatcgcataccatttccctatgcattctcctaatagtttgcttttgggtagaggccattttaaggcattttgtactttagatgtgtactttcttccctaagttctttcctactgtgcttgttggcttgggttttttgttttgttcggtttatatttatccttttatctgattcttggaagcctctcgacagaactattgagaaaagttatctaaaattcgctggttatgaagaccactctgaattgttacctataattatagtcagttgcctgggttcttcttttcttgttcaagtttactccagcttagtagtagctcaggaacaataggtcttccattaactgacattagtcatggattccaactagcattacctcacctgggaacagtagtgcagaattgagcacatgtgcatctgggacatgttcaaattggacaagttctttctgtgtggagttcctggtaaagcaggaataaagcttccaatgtgttctaaaggaccttcctcagtgtcagtagcctgtcttctgatcacttcttacccatccccacctagtttgtatcccatggttccttagtttctttccattatccaattagagttgcatcgtagtttcctattagatttttatttatgtgttggtgatttgcactgatttccattcactagctttttcctatcacttgttccttacttgatgtgtaaagtctttatgaccatatatgtgttgtgttctttgcttgtatatcctaaagtcaatatagtagacattttgaaaacttttcaccctttttttctgatgaattttcctgtgtgtgtgtgtgtgtgtgtgtgtgtgtgtgtacactatttaatcataataaaaaataggtatactacaattggaggtgggatatcaaaattttatttccgagtctttcccttttcttgctaagatattgaaccagacttcactgctgaactatattctggccccagtcacatttctttttttttttttccttttttttttttttttatgattgcttttctttttttccattttttattaggtatttagctcatttacatttccaatgctataccaaaagtcccccatagccacccacccccacccccactcccctacccacccactccccctttttggccctggcgttcccctgtactggggcatataaagtttgcatgtccaatgggactctctttccagtgatggccgactaggccatcttttgatacatatgcagctagagtcaagagctccagggtactggttagttcatattgattcttacgtttgcctttcgccatctggtaatctctgaagctagctgttatagttgtctctgttaagagcttgttcttcaggtgaccctgttagcctctataagcagacctgggagggtagctctctccttagtttgagtgggcagagtattctctgcaggcaagctctcttcttgcagggagggtacccagatatctggtgttcgaaccggactcctggcaggagttgtgttccactcactagaggtcttaggatcccgtggggaatcctgtgtgggcccttgcgggtgtcgggctcatccgctggcaaggtacctcggggcgcgagtggagcggaaggggcttgtgccccaggtcaggcccgggtagtccacttccctatttaccgcagtctcaggttccgcgcgattggattggggcaggggctgtgttccactcacccgaggtcttaggatcccatggggaatcctgtgtgggcccttgcgtgggcgcctccgctggcaaggtacctcggggcgcgagtggagcggaagggccccagtcacatttctaatggtgttggaaatcatatttgtataattccagtattggtgtgccaatgtactgctaatagaaatgatattttggataaatatacaattttttttttttagatttgcaaagaacattgaaacaagtaggcaaaattaggaaccattaacatcatttaatcctttctgctgttatatttggtgattgctgcttctgggatcctgtggtggacctttccatgtttgtgtccacaggagtgcatccatggtagtgtgtatatacgcatcaggacttcagatctagagagcaattgttctttgactaggtctgagacaagactgggtacaagctacgttgttaagggctctatttgggtttccagtttgcctctaagatgtgtttatgatgtttctgtgggtagctggtattggtcaatttttgttataaagtaaatatttaccagttggtagctatttagaaatgactcattgggtttttatgataattgtcacatcttttctagccttgaggcacaagagatgttcaaaataaaacgtactttagtcaggtctctatctaataggtagcatcttagatgctgaaacaataggatcactcactcaggtcagactgcattgagatcctttctctgtatcaaaacccgatccagctcccccccccccccctctctctctctctctcacacacacacaccccagcactcacgcgtgcgcctgcctgtctgtcttgaatttccttgttaattgtttccttcttaagcttttgattctcttatggagtgaggctaatttttcttaccccctttaaaggattgtatgtgtatgtaagttttctgtccttgtcagcttgggcacagggtagaaggaaaagtgctgctctgatgtaatgtgtttaagtgtttgtcccttttctcacctgtagggcttcttggtaatgcccaggctaaggcactaggaccagcctcagagcagtcagagaacgagaaggatgatgcctcccaagtgtcctctactagcaacgatgttagttcttcagattttgaagaagggccgtcgaggaaaaggttagtacccaagcattagtgaataaatacatcatggggcagggactgtcaattcagttgctaatgcttgccacatgggagcaagtgtgaatctaccacaggagtcagaactaaagctttcccagtaacaatcctcaaaaacaaagatggataaaagtcattaatggcccgggtgaaatttgttcctgcctgtgacaccatgctggccagaagagggaatccgatattattacagatggttgtgagccactatgtggtactgagaattgaactcaaggacccctggaatagcagccaatccccccttccctctttttttgtttattttgttttttggtttttgttttttttcgagacagggtttctctgtatagccctggctgtcctggaactcactctgtagaccaggctggtctcaatctcagaaatctgtctgcctctgcctcccaggtgctgggattaaaggcgtgcgtcaccattgccctgctgcagccaatcctcttaacagctgaattatttcatgagcccatcaaatttattcttaatcagcagctgttttgaaatctgtattaaatgcgtttttgtcatttctgaagagatttctttcccaaaatgatagagacttcctgtggtattattagcaaataattgttcttgtcatgaaaatattaatttactgtctacaaccttaatatgtctgattttaaccaaactgtttttatatgatttttctacataatttaagatagttcagtaaggtggtaggtaggctaatgctattttaagatttgtggcagtgaaattacataacggttccaactgggtctttaaagatctctttgctagcaaccaccctattttatgtcttattgtccaccccctttaaaatttacttttaaatttgcatttgatctttatgactataattttgcaatgcaggtggtcagaattgaactcaggacctttggaagaacaatcagttctcttaactgctgaggcatctctttagcccctatgactatattttaaaaggaaaaagttcccttggtttgaacttcttttcttggttgattcatcttgactataatgaccctttggaaacaatttagatgtctatctttaatgaagtacagagaaaaattaggtgaaggaaattagccatgatttgtgcttgcaagttgagatgcatagctcaaattctggttttgccttcctttccttggtgtctaatagcatatggtctatgttgggtctgtataataacttctcctagtcattgtctttaacctctcaatagtgtctcacattgctgttttgtatgttagcagatttaaacacacaccagaggcgtcgtgtcattatactaggcctgtacttttctatgacgaaccttttactgtataccataaggagcctctttccccatttgtaaagggaaccatcactagaactgaaggctggaaaaactagtcgcttcagtagatacattggaatgtgtgatagtatctgtgctttttagcatgggtggtattcatgtccctgacatcagctttcacctgcatttggagagtgcattttttgagtcaatggttatataatggttaaataatggttatataatggttatatattcactattgtgtgactgaccatccacccctcccagtgtctcattctcttggatgacagtgatggtggccttttctttttgttggtgcactcgagtgctaagtagttatttaatctgaatttataggacagtagaaataggaaataactttgtagagttaagatttaattagtgcaaatctttttctattgcattaaatagtgctccactgttgcagggtgctagagctggtttagcagaacagagctcttgttctcttgtagaggacccaggcctgattctcagcacccatatggaatggctcagaaccacctgtcactccaggttcagggatctggcttatgcccgtggtagcttactcacacgcagggaaagcattcatacacataaaagtaaactttttaaaaaatcaaagcaaaagatttcattgtcgcaaatgaaaaaggaaggcgggagagtagaattaattacagtatcagttcgagctaacagtcaaactcttttagtaaaacttattaggtatgtgtggcttatggttagataggtaatactggctttttatcacttttgcaaaaagtgattttatttttaaattacatgtatgggtgtgtctttgtgggttgtgtacatgagttgtagaagctgattgttggatctctctgtaatggaggccatctgatttggtgctgtgaatcgaatttgagtcttccgaaagagcagtacatgcttttaattgttcagccatttacttagcccctaattatgctagtgtgagacacactcaaagttggattatagacttgaatctgttagttttacagtgtgaagaaatactttgttttggttttgttctgtatttagtgggttgtctttggcttttttttttttttttttttttaattagaatagatgaattggaattcctgcagattgtcatcgtatttgatatttagaatttctgggacaaaaattctcaaccctaaaagtccagggtcatgatatatatatatatatatatatatatatatatatatatatatatatatatatgcatgctttgtagttaactttttttttttctgatctgaattgtggtgattgatagcttatccttttaccatttagttactgctactgtgtgaatggtcttagttaacctgttttcacttatgttagggaaagaaaacagtaagtagaggagagtgaggtcgtgctgttgactcattctagagtctatatgcatttgaatgcattttacccatgaagaacaatatttgtaatgataattcttacatactacaaaaattgtctgttgtttaagatgaccttgtgctctgtaacattctctttgagaaatcaggttaagctgtatatactcagtatacttgtgccatagttggtccctgatatagttagaaggtagaaggtagaaaatagtagaccgtgtggttctttctgagtctgtatcattcctatttcaaaagcccgatatgttccttttatcctgtccattcaagatatcattgaagccagtcttcatggaagacaaagctgccctggagttttctgctcctttgggcagtgggcagtgttttcaaatgaaggctggacacttgcaatacaactgagtgctcctgtggggtttttgtttatatgttaattaattgaaagaggttgttcaggctgtctttgaccctgccctcagccttcccagcagtgtaattagttatgtgtccttattcttgaccttccacccccttcctttttttaatgggtgatatttataatatacatcagagttttctgttcgtgtatttgtttacgttcaaaaaaattgatgatgaccctgcttagacctttcccttaagctgtctgtctcattccttcaggcagtcttgtggaggaaacattttcaagtgtttcagtgcgtgtagaaacaaagatgaagagattcaggtcaataccgtgcagagtagtggagaggacaacattttagaggaggagttgtgaggataaactgataaccacagttgtcaaatgagccagctgagttggaagagaataaaggtgtgtggtatatatagtctgtgtgtctgataatcactgtcagccaccagtaatggttgtgatagggttactgcaggattaccagagagttttggtttgcgtgctgtgttatgtctcttcaccatttcctggcacagcgatctgtaggcagaggaaatacaagaacccttttccccgttttgaagtgaactaatgtcatgaaaaggatctttatggtgaatggtagtgattttcctgtactgagctaatgcatgccttcagatatcaggagtggtgcaaattatagtttataaaaacaggtgttgaacagattccatggagactattcataccttagtcatctttttagctttggtagaggccctttttcataatgccaacatctctgacaggaaggtagtcttccaacataaatcatgcctttggtataacatgcttttcaaaaggaaatgttatctgcgaaactagataaaatgctaccagcgtagggcatagaagaaatgaaatctggttttagattattatatttaaagtggcttttcatgtaaaaattcctgggtttgtgtgatgtcacgactgaatccagttaacttctggatatgaatacctgtgagcgttctctagtagattgggtcttaaagcatctttttgtcaaaactcattgctggtggtattgttcagggttaaatgcactaacttattggaacctctaaagtaaatagacaaacaaaagatcactgtggaagtaaatatgaagtaaatagtgatgtatttaaactcttcttcttcttctacacacacacacacacacacacacacacacacacacacacacaccccgtctcttatgtatctcctggaacttgctctgtactgatttggaatccacctgcctgtgtttctccagtgctgagattaaagggttcaccctgccctgtgtatttagcactggttactttctttgctttagatctaatgccctggcatttaaaaaaaaacaaaaaactggaaagagtttaatatttataatttgctgccagtggcaggttctgttctttgttttagcctcatgtattttattctgtgaagggttgtacatatgtggtaaaatagaatcatcttctcacttcacagtattttttgcctgatatagaattccatgttaaaattgcttctccagcagcatgacagtggcgtcacttttttgtttgtttggttttggtttttcgagacagggtttctctgcagccctggttgtcctggaactcactttgtagtctaggctggcctcgaagtcagaaatccccctgcctctgcctcccaggtgctgggattaaaggcgtgcgccaccatgcccggcctggcgacttctgtctgctggtttgcgtagttcttagttttttgagagaagttacctgtatatatttcattctccagactagaatcccactgttcatacaactactgattcttacttagcaggtagacggttcaaattttgagatttcatatgcattatgtttcttgcccttgttgtttgctgattgtattgttatattgttactggttagtcttaagattttactgcttctagaacaatttatgtaattgattgattgagtggggaagagtctgtatttctggctcacatggaccttaaattcattctcaacttgaagatttttctaggacctgagttttaactctcatgttgaatcctgaataagcttacactggatagatagctcagtagataaaccacccgaggacctgagttcaaatcctcaggatacatataaaaccttagtgtgctcacaagcatccgattgctggtatggaggcggagacatttagaaccatctgaagcgtggatacaagttagcttggcatgttctgaccaccacacatctgcatgcacataccatcaccgccaccaagctggatgaattgtctcctgtgggcagaaggtaaatcctgtctctgtactctcatagctaaaaacatgcattccttctctgtgtgagaagagaaccatccaacagtgggataaaagttcaagtagcattatcttcagccaccagcttttcatccactttagtgaaaaataatatttcaacatttttgtgtttgagttgtacatattgaatctcagcccacagtaaagcgaatgagtattagaaatgcttatatatttgaagttctaaaacctgtctctgaatgaggctttacattgatagatgacatggtgctaattactagagccaccttaattctcttaattcagaagaatctctaagatttttattactcactctttacagcttcattaacaagatgtgaacagaagagtcaaactgtatcgtgtcaccttccaaatcatgtgtttaaatatatataggctttattcttgaagattcttcctctgcccaaaacacggtaacaggaactcctttggggtagccattgttttatgaactcagccatgggcacatccatgctcactgaccgacttggttattctgcctttccatggtccccacaagtcatgtgcaccagtgtataacttcttctctgccaattgtattccttctttcatgcaatgaatgatatatttatccctcataaactaacaatacagagaaagtgaaaactttcagcttgcttcatgcagcacacacacttctgaatgcctattgggaccctctgctgttatttgcatgtgctctgcctgaggctggagaaccaagagagagaagggttcttcccactgttcttggttggtcttgaggtaggtctgtgacaattttgtgactttaacaggttttgcctccctgtgggatagtaattgtcctcattttcatcagtggtatgaaaatgtttgtgacctgaaggcatgggtaaaggtgcctcaatcctgctttggaagatgagtatgtattgttgcagtgtgtgttccttaaccttgggcttctgtcctttcccagggaacatgctcacaaggtgaatgcaaggcccccaagtgggtctcaggtgcataaacacagagggggtgagctctccagtggagtttggtctcccccatgtttacttagattctgtaggtaggctctccctggggatctttgttcaaacctatgttctgtgttgtctgattccccatctttcagtagaacctagcatagcagtctatctgtgtaacttgaaactagtcaaacaaaaggccttatgggtgaaatgaatctgtttttctccctttctgtcttacatgtttaactgcctgctggttgatttcttatagttttgttgtggtgattgattgttttgggtgtatggggttgggttgtggatatctttatcattgctcctacccattgaagcagatgttgagtttagtttatgtgtgtctttctcacacatcaggactactttgttctgtataggcagatttcttcaagtccttaggtgcagtgcagcttagccttccgtgaaggaagtatatgtgataaaaatggtttctgtggtgatcatggtggtgcaggatggtggtggtgtttgttgggaactaagttcacagccctagaaggcagagtttggaattgtagtgtgacctctgcataggatcatatagttgaatgcctagtcaccaaggagtgaaactctttaataggattagaaggattaggaggtgtggccatattggagctatgtgactttggggtttaaaagtgtatgtccagcttgaactctctcatgctctcatgctctctccctccctccctccctgcctctgggcctctcccctccccagattcaactctcaagggcttctacagtattctgtttgctatgctccctatcatgataatggactgagaggttgaaactgtacttttataagaattgccctggtcatagagtctcttgacagtaagtagtgtggtgtatgtgtggtgaccgcagtctttcggtgaagtactatgggatcagttatacatgagtgactaaccaaaggcagccagggatttggagttcagtttataaagatacatactgtatggcatttggaatgtacctcttcctctataccctatccttccagccaaagtaaactgttattacccagataaagatgataatagtgggagctgcctctatgatgctttggctgaatgcctgcattttttccaggatggggaatctgaaatgtgggacttgtgggccttaatcatttatgtccttactctcctttcttttcttggagtcatggttgggagctgatggatggtatgggtgctgtcccattgcaggttccctggtcttggatgagttttagttgtcctacaatggttctctgtatttggaggatttcttttactccactataggtatagtttccccatagttggcttatgtgtgtaattgaaaatagtatacagaactccatgattgttatgtatgttcacggccccaagtaattctcaccacaatcccttggatctttattatttaaagaacccattttatatgcaaaaaatcagaggtataaaccaaagtgcctgtcttcttctgtacccctctatctagtatgtagggaaaacccaccttttggcttcttaccttgaatgctcaataaagagacctatttaaggcactgtgaaggaatatagaagagttgtgttttgtagttttagtagtctgatgactcttgagtgtgactttcaaggcggtgaggctgctgtcacatggagaagtagcttcatgcactgtgatagaaaggccatggtggatccatggctatcttgactcgacactcttgttgacaccagtgaagccaagaaattctggtttatgcgtggtgtgtcctaaagtctctagtgtggatgcttcccgagtggagttttcagagcagggatatatggtactttgagcacacatgtaggtcaagagggctcaccccccttggagtattacattaatctccttcattgttgtggtagtggttcttttgttttctatttgaagcatctagtgtgtgctcctgccttactatgattagtcaagagtgtcctcacctcatgaggtttgactattaactacacttgggatgatttaatggtattaggtattattagtaggaagtctatcctgtgaagaataattagatagctatctagaaatttagagcccttctcttcctttagggagggcttgtaagagtgggggcagggggagagcctgtttcatgcttgccaggctctccttggctagtcttcctggtgtttcaatgtgttttgtttttgtttttgacgactccccccccccccccccccggcataagtaccaataagacccagaagccacctctaaagatcagaatcgaagtagtgttagtactaggaggagcttctgtgtgttgggattttgcttgtaaggctggatgcttggagtagagttatagagacccttgtttgtaattcttggctgggtttagtctgatcgccacagtgtgtttctttgtgcttctctgatagcctggtttgcaggcatccttttattaccagatgtggggtcacaacctgtgcctcaagcaggtcttgctatcctgaataagaactaaattaatactgggaagtagagaaagattcattcattgtgatagcactgtgaagaaggacaaagcgatcctggtcccccatcccccaatttttaacacagataaaaattattccagttcctccagtaaaattattttgttgctactcaatactaattttgtgggtgttctgaattataatgcagatatctgatacacaacccctaaacaacctgggaagttctgatctgaggggatcagttaaacagtcagtgtatgaccctgcttaccattaacccatcattgactgggcctcaggctcatcattttaagaaggtttgagagttaaaattctgtgactgactgccctccacaagggattggaaaggctgaaggctgctgtgctaacttcagccaccctcaagcttttgaggcagagctgtttgtgggagatgaaacaaagtggtagtacagtattcatctcttttggaagcctcagtttacacaatacactgatttagaacattatcaagatgctcttcatattcctggtatcctttctaggaaacatggaatgacaagttagggggctgctacaggctgggcaggatagtcttaaacctcagaagcctagctagctttttgtaatacagtaactaggttccatatcacacaagggagtacttggaatactgttatcaatctctgtttctacccaggccaaggtgttcttaaaggcagtacagtagtatttcaatgaatttagaatatagctttcttcatctgtaagaaggatcaggaagagttcttttctatatcttaaaaattatttatttattcagttaaatttttgagattcacatagtacagggtgactatgaaggatattggatgactgtaattttagttctttgactttttcttggggtccagggaaccaacctgttaggctgtggagcaagtgcttttactcctgatacttctttccagctctacattatttgtgtatgtgtgttcatgtgtgagtaagcagcagagtgtgtgggtcatggatcagaggacagtttcttcttcaccagggattgcactctgggcgttgagctttctgggtaagtgtggtcttgtttgtttgtttgttttgtttttttgtttattttggtatttatttatttgtttgttttactctgtgtcatgttgtaggcccagagatttaattttgaagcagaatttctcctaccaaattagctggcgtaagagatgtgtaccatcatggcccagctttaattttccatttgtaagcatgtatatgtgtggtcacatgatggtacaaccctgtatttccagagatcccattgcatatcaattctggatatgacatgctttgtgatttccttggagactgctaggtactggtttcttcctgtcctagtgttatggttttataatataaagtgatgtcacatgctttcgctctcctttacatacctccagcagacaaatctaaacatcacttcaacatttcagaatagattggccatcctgcaacatcttattagttctatgttgaattttagtttggacagattcacattctgatgaaagacactagatctagatatttaagggtttgagttactaggattgtgaaggaggtgatagcagtaagtgtcacttgtgagtcatgggtttgctcaggtagggagttcttagacttggtgagtgttctttgacactctcttctttcccctcctccaacacggggaggcagcaaccagtatgacttgtttccaataaatagcgttggctcattcctgttatttaaaattcaaagaggggatagaagtaatagattgtgtatggtgtggattccccagccctaacatttatgataactaccagacaagacagtttgtttctttgctttagtcttgtccgctttgatttatagagtagaatttttcagattcccttaatacatttgtctcccaatagtttcaagcttggggttgtttcaaattgatatcaccagtgtttggttttatgtttatgtttgtgataggagaggtatggcaaggcttctcttgatggctcagtctttagagagttgctcttaactcctgtacagatgcaaaagtctttgtttatctttgtatctccattgcatggtaaagagtatgtggtgtttgatgaatatttgtttttgagaatataaacatttctagaagtagctaaataaaatactagaaacgaaaaagtttataaaggaatcatgatatttcagtacacaatcctgtgtacaatagttcacatctttctcagtctatcatattagagaactgtttgtgtatgtgtgtgtgtttccacctgttcttttgtgtgtggcaaggtgtcttttctgtgcatccccacatctcactttctgttgttgttttctcccagtttataactttatagctctatatggacaccaagatgtactttttcaatttaatcttaattttagagtacatctaactggccatggtatatcctcctcagagtaaaggccagagacttgccatggccgtctttacttagtgatactgagagaacttgcctcctgtttgcttggtcactctggttcttcctgtcacaccaacttcagttttcttgtttctttattcttttacttatctttttttcccttaaattctgaatttcaggaattttaatatttggtctttgcctagccaataagcctcctctcctgcccctcccctttcttcctgagccctgcagtgttttcggctgcctttgcctctgcagggctggaatttaaggagtgtgccatcatgcccagctgcctacttgtattttgactttgctttcaagacagtttctctgtgctgtcctgactgtcttgagacttcagttatgtagatctggctggagattgccattcctctgttggggagaaaggtctgcaccacctcttcctgaccccagtttatgttttgatgaagtttttataaaaacagtacctgtgtcctcatattgagctaatctgtgtcaattcctgccgatatatgcaatgtttaaaagaaaaacaaaagttcgtgtgtgtgtgtttgtgcgcgcgcgcgtatgtgtgtatacacgtacatatatgcactgtaggaagggccatttctgctgggatactaaggtcagcacaggcactaagggcctggtctttggaatgcctttgaacatcctcatactaagactattccagtttccctagagattatagaacattgtgcctttcctgtacttttggtgtgtagttgtttattttcatggattccatttttactggcaagtgtgcagtatacatcagatttattcctttccaagaatttctttgcatagccttgagtttcccatagtttcaatcattgtgtgtgtggtgatgatagaatggattgagaatattttgtatcagggcacttagtctttaaaagccttggttacatgttgctttaatttaaatcccttgaagaattctagccataaaacacattcctccatacaacggtctcttctttttcttgtattcatagtagtttctgtttttaaaaaaaaaaagtgttgttttgttgtagatgtcaggagggatgacactagataacactataactgtatctcaatgcacacaatttatgcttctagtcctgtgtgctctgataggtatatgcgcatcaatgttttcatcgtgacctgtgaattgtctttagtttgtggtgctgtaatgggtgggttatctttacattgaaggagcacctccctagaggacctgatgggaagaagtattttcacattttctgcaagattaggtaaggtcaacattctatgtctttaattctgacaaggaagctgtttcaccattgacaaggccacagaggcttctcccttacctaggcacaactgtgagtgagcccagttcatctgtaagggttttagagttcaatcatatgattcctttaattttgatagaaagtttttgtgtgtgtgtgtgtcttttccaatagtattctgttgcagcttagtgctggtctaagtaagtcaataggaatatttttctggcctctatttcttttcttttctctttttaaaaaagatttatttattatatgtaagtacactgtagctgtcttcagacaccccagaagagggcatcagatctcattacgggtggttgtgagccaccatgtagttgctgggatttgaactcaggaccttcagaagagcagtgttcttaactgttgagccgtctcactagctcctggcccctctatttcttgatctctaaggaagctgtaggacaactaatatataagagctgaattgagagccagtgaacttgctcttgatataacatgcctgcctctctctgcgccccccctcatctctctctctctctctctctctctctctctctctctctctgcccccccccccccccgtagttacccctgtctttgcccccaccttcccattactggttatcattgtaggtagtttttaaatctatctaaccagtatgtttgtttgagaagaggtctttgctaggttaccagtgctctcttgtatctacgagttcttgttcataaaaggttaatgtacagataaaacttgtttcattgtgctttgcaatgctcactgttttaagacttttctggggctggagagatggctcagactgactgcttttctgaagcccagttcaaatcccatcaaccacatggtggctcacaaccatgtggctcactgccctgttttgtgcatttatgtgtgtagattggagatagaacttgattgatccttgccttactgtctaagacatgggctcttgttgctctatttgccccagggctacagctgtgtattattgtgtcatagctgtttatatggcttctaggagtctgaacctaggtcctcagaactctacatagtgcttattccacggatgtggtgtttgtctattgaaacagtcctgactacctgaaaccccccccttggcttttgcttggtcttgctcacctagcttcatttcattattagttgtttggtagatgtttgtaggtttgtgtgtgagagactatgctttaagaaagtattaatctgaatccaagttattttcagatattaatctacagttcaaggttttattttacattatttgggttattcttagaaaccatttccattctttaagaatgttagatcagcacagtaagcagggtttccatttttgggtttgggcagtggttgagggcccttgcatgtttaaatatatctcctctccctgtatgtctacgtgctcatagataactgaggataattaatggggatccattctcttcattatgtggctgccagaaatccaagtcaggcaggaaacacttttgtttgttgagctatctaggtcactagcatcccgtgtacaattctatgggaatcatgatcaggttcttcggaaggcttggtttctctctacagctctagattgtagctttcttttaggcttctcagcaatgattctcccttttatttattcctttgcattttatgttaatctgcatgtgttattctgttgcctttctggatgttcaatgtttagattcatattgttgctttctatacccaccgcctcactataatagctaatttgagaagtgtagttttggtagaatccttcattgcaaacatcttaaggttccagtgttaaaatggaatggatggggctttgtctttggaagcttctgtatgagtgttgctatatgataatactgtctttgagctaatgggatctcattgtctctccctcttggatgccatgatttttaagtatgtaggttttccttttgtttctgggtttagatagttattttccccattgttgtgacaagattccagcaggaaacatgtaagaagggtttgttttggctgatggttgaagtccatcatagtgggaagtttagtgtccagagttcacagcatggaaatatatggctggaagttgggctgggcagtaactacagaggtctcctggtagcttagatcaggcaaatagcatagaggggtgttgtagacttttcactaggcttacttacaaatggctgaagatagtaccaccacaacacttcccaggactgatcatgactaggagtatgtaatttgagtctgttgacacactaaagatggatgcctcctggatcaaagagattaagacatgtttaggctggtggaattgaggagagtcattataagtgtgcagtaggttccctccaaaacccatccccctctatctctgtaagcaagatcctaccttggcccattttgctggcagaacaattttgttgaggccaggagtaaggagaatacacatactctcaatcagggactttacagagtagagactcacgccatcattccacagttaattgctcagcattcctgcctattttggttttctctccacctgttccatctttgttagtacttccaggtttctctccctcaactttctgggagataatttcccttctcaaacacaccttgctttgcacattatggtttgaagtgagctgcaaaacagggttctcccatcctatgcttttcatcttcattgtagtagtttattccactttgggttggttggtggattagggaagacaagagctaaggagcagttgattatgtgcttcgaggaatcttcgcagtttcccttcctagttttgaaggacttgctaacgctgcttaagatgagagatgccttccttttctatttgagagtaaataaaccaatctgaatgactgggcctggagtatagagattgaatattgtgatcagtgtgcctgtcccatgcactaaagcccctcagttttgtttttttaataatttcatttgatttttgctgtctgaccttaaaggatgggcatatatacaaatcttaaaccttagcaagcattgaaggttaaattttggccatcctcagaagggaaggtgaattttacaccttcactatatgttgcctctatttccaaatattgccatttctttgggtttttatttaaattcttatgccactgatttcttccagaactgctgtgccagctgcaagtggcagtggctccttaatggagattctgagcccgctgtatgtgggggcgctcctttttcaggggagcatgttccatttttagtggatgaatgtttggtgctctggcgtgttgaggaggatggatcacttgcgtgtgtgagctgtggcagatttaattgcagtcacagttttcctcttgacaatcatagtatgtgaatggtaagtaatctttttagatatggaagctgcagaatagaaaacagacagcatttagttggtgactgtttggtacttcgtacctagatgttttagtgtttggaacttggtccttaggaaattacaaggctattaaataatttctgtcaaagcccccaaataaattctttgggttattcatgaaagaaatatttattggtactaagcagcatagtgtgcccccccccccctccttttttttttctggtggtatagtcactcatctttatgagtatcaaagaacagtcccattcattttagctgtaggctatatttttgatatccaaaaatgcctgtagagatggatcagcagttaagagcactaaatgtttttccagtgtacccagctcccacagggcagctgacaactgtaacttcagttctaggggatctaataagatttttttttggcctttgtgggcactgtatccatgtggacacaggtacacatgcttgcaaattaaaaaaagtattatgagattctctgtattttcaatattagttgattccttgagttgtaatggaattggtgggattggaaggtatttctacgttcactttgtcctgctttctgcagtttttaggctattttttcctacccaatgttaatgaacattctgaaaattggccagtggcaggccatgttataattcaaaatttctttttagagaagtcgattgccatctgttggtggtttgtggccaccacacttcattttcagtaggtaatgaaaatgtttggcatgtgttttctgtatatatcagatttgtttctttctttcttatcaattttatgtatgtgagtacactgtaactgtcttcagacacaccagaagagggcatcagatcccattagaaatgattgtgagccaccatgtggttgctgggaattgaacccaggacctctggaagagcagccagtgctcttaaccactgagccatctctccagcccagcagatttttttaacgtaaaatgagaggaagatgatgaagtgttggcctgctctgcttactgtgggcatgtattgtgaatagcatctctttctttttctttggaggcattaagtgaaactctgctaggatgctgttgggtgacacagttgcctgcacctttatttatttttaaactattgatccatcccagtcctgtaccagactttagaatcgcacccattaaaccactgcatcttgagtatttgtgagggacatttcagtatgattgacttttatattcaggcttttatatgtctattgacaaagacgagcgaatgaattgaatcatgtggtaggttatagactcttcatatgcgggcccccccccccccaacattttcgattcacaaggtcattcaatccttctccttcccagcgcctctctttgccaggagatggctgccaggggatttttggcaccttgcagttgggttttgagtaacctaaaattgaaaatcttgctagtccccccacccccattcccccaatgatatttttaagactacattggcaatctcacctccaagtgtgaacattataactggcacagctaagggttttaaaacagtgtgcttcagattatttgctaacaaccttgtaccataccatagtatgataagagtttctttagccagctcctgttcagaatggactcttccctttgttggtatttttgaatcttaatccttatttactcccttctctcttgtgtcaattttgtgtcaatccctgatgaagaggttccaggcattgatttatggtaggacatgcagagctttgcctaggtggtgcacagaaactgacacccaggacatagagcattgtgaatgacaaaagggctttgttggccacttcaactgttgacttataataattctttccccttgggacctgattgcttccttttttttgaacaccaaaaaataatgtcaaaaacattttcctgattgtgatttgtaatggcttgtttgtttttgtttttgtggtttgttgttctttttttaaatttcctgatttgatacaagattattactgttctcgttccttcatcacctagcttgagagtttgtatgccagcaaatgttcattgtgaagctgtcctggcttttatatatttagttctaactttaggctttctcttaatttttttctaaggacagttaaaggttcttctttcctgtcttgtgtatttataaaaagtggttatgttcttgaggaggctgggtgtttatatatagaattactaatttcttatgtgaaggattcagtattaaccagagttgatattatcaccattgtttaaaaagtctaaggatttcgatttccttcttaaaaatcggattgttttctgacttctcagtttcctggattggtttgctatctgtatttttacactaaatgtctccctattttttttttttttttccgcctgttccctggcacagttagaaaacatacctttatcttgagccaataatttcctactgggcactggtaaaagatcagtcttctcagctagcacttgttagttgaggagtcaccataggaactgcctggattgcctgcccatcatgcttagagagagaatctaatctttaccatttttttttttttttttttaattaatgtgttttgaggcagggtctgacatacagtagtagcacaggctactgtgaagctgataatcctgcttcagctcccgactttgagaaaatcaaggcccacactggtaaaaatgaacttagttgagacacagcccaagctgtggctgttcctggtgcctgctgatccaagctaaaccttttgggaggtgattttcccaggcaaatctggctataagaaacttaaaactctaaatagctcttatgttatttaattaagttaaggggtacacatatttaatattctgtgttttttttttcataaaccatgtaatctgttgataagtaaagcctacccaccccctgaaaggaaaaagtctatcaatcagtatagctggacagcaaaagacttttgtgtagcaaaaccttctcaagtgaccattgtctgtcgttgtggtggagtctcgtgcagtggaagcagaagatgggttatgcttacaggaggatcttctgtgactagtgctcttgttacacagtgtgggtgagctggtatttgcaggcttctgagtttactacggatgtatttatattctctccaccatgcagggcatttatagctatcctgtgtgttttgcctgccactgcacttgcatttgaatttgatgggcagcttgccctggtagatggtatctcctgcccccaaacctagtgcccacacatgagcacactctgtttctttgagcagctgccaggtttcttgtgtgtgtgtgtgtgtgtgtgtgtgtgtgtgtgtgtgtgtgtgtgtgtgtgctaggggtagaatagagtgggtaattattttggggatggaaacacagattttttttttctgtttgaataggcctttcagcaagttggcaaagtgtcagggccagctcccacactgccacaaagcgtggaggcccactggtcattctgtatctgccagaagcagtttcttatttttgaacaaacagaccatctcctcctatttcttaacctttgattagaattgggatatcatctaaataaatggattttatagcttacaagtttaatgttgggggattgaattaataaaacgttttggtatgtatatctaacaaggtactggctatgcatggtgtccctctccttgttatgagtacatactatttttgatttggagactattagaaatttttgtcagcagtgaaattcagtcaacctaggagttgctattgtgctattgccctagaaatagacatgtacacacaggagtaaggtggttataatgcattatagatggctgaggaaagctagaaatgggactctgattctttatgtcaggcttcttaatgaaaaactgacctggaaactttcatatccatctttgagaaaggggaaaggacggggaggaggtaaggaatgtgtatggaccgtttgggttcacccaagaactttatgcatgagatgtttgtttttgtaaaagtgttaattgtgtttttatacactcagtgatttttaaaaagaatttgtagtatgtattgggtgtatgtgctcatgggggtatgtaaatgtatttatatatgtatgtgaatgtatgtgtgtgtgtgtgtgtgtgtgtgtgtgtgtgtgtgtgtgtgtgtgtatacactttttgcagatgatatgatagtatatataagtgaccctaaaaattctaccagagaactcctaaacctgataaacagcttcggtgaagtagctggatataaactcaaacaagtcaatggcctttctctttacaaagaataaacaggctgagaaagaaattagggaaacaacacccttctcaatagtcacaaatagtataaaatatcttggcgtgactctaactaaggaggtgaaagatcagtatgataaaaacttcaaatctatatcaaccaacaccttttctggggtctgatgagcgtcgacatcgggcgccttaacccggcgttcggttcatcccgcagcgccagttctgcttaccaaaagtggcccactggcactcgcattccacgcccggctccacgccagcgagccaggcttcttacccatttaaagtttgagaacaggttgagatcgtttcggccccaagacctctaatcattcgctttaccggataaaactgcgtacgtcgggaaagagcgagagcgccagctatcctgagggaaacttcggagggaaccagctactagatggttcgattagtcttttgcccctatacccaggtcggacgaccgatttgcacgtcaggaccgctacggacctccaccagagtttcctctggcttcgccctgcccaggcatagttcaccatctttcgggtcctaacgcgtacgctccacctccccggcgcggcggcggctttcggacgagcccctgactcgcgcatgcgttagactcccaaaggtccatttaggtgccagtctttgctttatgttttgagacagtatctacacacacacacacacacacacacacacacacacacacacacacacacacacatctcccaaaggtccatttaggtgccagtctttgctttatgttttgagacagtatcttatagaacttggatcttattgattgagttaggctggctgactgtcagcccctaggattcttatgtctctgccttctggagtgctgggattccaggttggagtcctggttctcagtccaactatttacatggatttgttggctcagcctcagggaagacctcatcatgcttgtgcagcaaactctgactgagcatctccctagcctccttacattgtttttattggtcttgcccaccctgggtcttctttctgctagggcttggattgctattcttgcaactgtctgccttctaaataaatgaataagtgttgtggacccatggcagcagtgtggtattctcctgattcttgaagatattttggaagacttttatgctgatttgtctttaagtaagccataaagatgaatctgcaataaagtcctaagtagttgacagtagaaggggttgaggggttgaccatggtggtgaactgctgcttttcagggtgcgtgaatatctgaggtgacttgagatacaaaccaggcaatttatttctattaaaagttaacatgcttctcacttctctgttaaaaaacaaacaaacaaacaaacaaacaaacagctttggaatgttatctgcacttagctcacctggcttcactcatttgtcttctctatttttctataccacctaggggattgtatacacaagttgctaactttgagcatttgttccaaataacagattgaaatactagcttggatctctacttttgggagctgttcactgtattttattcataaatatagacagtcatgcacctttctacacaagtaacaaggatgttacttgtttatgatgaaatatggtcttgaagatattttaaacaacctctcttcctcctagtttttttaattaacatgttgttctcttttatatttctaaatcatagataagttacgttcataaatttctcctactggcttatattcatgaaattttgtcactttatattggcttatgagatctagaatgagggcatcttactgaaaaattagccttactatttctgttgttggttttaggactttcctggcctgtgccctgttctcagttttttcctttaatcctatatcatactggggagtggtcctttggccttacccttgctaggcaagcattctaccactgagctatatcttctgcccactgtttctgtgggctcttcctgtggcttctcctaagtttcagaaccaccactgcagtatgactgtgaagcacgcttaggccaaaagcattttgttgtaaagcatttttgcactgatggtgaagtaagaggtgatgcttcttttctttaggaaaatgctaggcagttgttggaggggtcgactgcagtggagtcccaccacccatacgtgcattctgggtaacatcctctgcaagggtacaccggccttctgtcccaccagccctgggttctcagagtttcccggaatgttataggacaacattctgcagctcctcacctgcctttgagtcatccactcacttgtgactatgcttacttcaaggctttggctccatatgtccctctttagacaaggccactgtgctcctggtaagtgttgcaccaccgggcgctctcagttcctgctctcagcagtgctctcagagtcttcacagatggccccagagctcgtcttctcttccacgggccttattattccttggtggctgatttcatttagataataccttggttttcataggcttatgaaagtgtcctgaggaacagtttatttagtcttttcttcgaatagttgtggaggttgagattgtgacttggtttttggtgaccattgctgccatctgcttttgtgtttacttggttttcattatgactgatagtttcttgttgttgtggactattttttaaagcaggaagcacttgatagtttattcacacgctgtcagcatttctgtatactctccataggattctctgggactcagatctctttaatatgtagtaagaatcaaatcaccagcaaaaagctggcaccatctctttcagaacttgactccaaatttcttagaaaggtgaaacgttagttggaaaggcagggcagctccatatggtcgtgctacttctaaggacacaacaatgtgcttttaaataagatggtttcttgaatttagtggtccctagtatgtggcttctgctaggtgttatgttatgaagaacataaagcactttggccacgtcttttgaagtttgtacttaaaaaataatgttaaaaagtgtaaatacccatttgaagaggacagaaatattgaaattaaaatgtaaaaattgaacacaaactccccgaaattagtttaagcagcatatgtctgtgttaccatacttaagtgtcacttatgatgacttctttctccccttcttccccccagttacaagacaattagttggttgcaaagaagcactttgtttctttgacagatactggtattgtcgaatttccccgtttctggaacatttaagggttagatttgtagtaatgctgtgtcattgtcaaacttgcacattttcggagatcctttccaagctttaatttagttaattaatttagtgttgacgggcgtacatttgggtgccaatgacattgggtctgttttggaggccagaggagggaggatccaggaatcctgctctgcccctctctggctttctcattctttcgaggtaggtctttaactatccagcttgcaccagtgatttctggtttctacttgtaacaaagtagggctatgggcacacttgactctacacctgagctagacccttccttgtgagccccacttcagtgtcatttgtccagttagctcttaggcagcttgtttttaaggatttttttttttaaacaaataaggcaggaagctcaagcatactgttggaacttggaagatttaagaagttaagatgtaatttattttacagatgtaaaatagactaatgtgtgtgctagattgtcactgctttgagcatactatttgcataacattgattcccagcactcttgcaaaggaaacttgtgctttactggggcacagttggtacagttaccagtgcctcacagtgtctgatcacagtgtgtgatgctgacaggtgactctctagacttagtgctctgtataatgaaatgcttgctggagatttgctcctgctctaagatgtatttctttagcgtgcatctagcagatgtagactgctaatttaaagaaagaagaacataagctaagattgttctcattctgatggtttacatatatctgctttttggtggtttgttttgttttgttttgtttttgtttttaaatttcaggatttcattttttttttttttttaagaatttatttagtgtgtataatagaacagaggacagttttctgagttctggggattagacttggcgataagcatgttttcccattgtgtcatctctcctgtccctactgctctttcgcggtaactctgaaactgaactacattccccagcctatgactgaattcaggatgtttgaagtgggtcattagttccactttggaggtagaagacagataaaggtgcagtaggtatcagcaaacaataagggaaggaacttgtgaaacaggatgctgtttagtatgagagccactgatccctgtgggttcatacatttttcttgttgctttttgagccacagtctgtggagtccaagagcattgaactgatcttcccacttccccactgatttttttcatttgctacacacattcatactaaacacatactttatatctacatagaaaacaatagtcccttaggtggatttattgctctatgtaatgcaggctgtggtttatgagagagacatagagctttaattggtaagagtttgtttgaaagattgtcagtttgttcttcctgtatcatggttttactgctgcatgaggtcctgtattctccagtctctgcttaatttagttttacatttcttttgttgttgcaggcccaggctgcaagcacaaaggaagtttgctcaatctcagccgaatagtcccagcacaactccagtgaagatagtggagcctttgctacccccgccagctactcaaatttctgacctctctaaaaggaagcctaagacagaagactttcttacctttctctgccttcgaggtaagcttggaggacacatggcaccactgtgttctcacatcttgttgtttgatttgtgggcagggttttctcggctttttttaaaagaaagtgccccactatatagggcatactagactctgtgtatatgaagatggattcaaaatagagatttgccttattccaccttctgagtgttttatgaaaataatgcagcaccactgctgctgtttctgcacatttttttttaaagatttatttatttattatatgtaagtacactgtagctgtcttcagacgcaccagaagagggcatcagatctcgttacgggtggttgtgagccaccatgtggttgctgggatttgaactccggaccttcagaagagcagtcgggtgctcttacccactgagccatctcaccagcgcctgcaaattttttacttactgaaaataatcattgttcatgtgtctaccacatagacttcactttactttggtgttgtctgtacagtcagaagaaggcattgtatccccagagactagagttacagatggttgtaaggcattgtgttgggtgctaggacttgaacccaggtcaagggtcatctgcaagagtagctagggttcctaaatttggagacatttcttgttttgttggtttttcaaaacagattttctccatgtggcttggctatcctcaatctcaggtctgcctctgtctctagagtgctgcgagtacaggcctccaccaacaccacctggccaccttctgtaattttgaaaaagagtcttattacgttccaggatgacctggaacacatgatggtatccagacctccctcaaagcctcagaagtctccttcccagctactctgaattctggtattatacgtatgggatgccagagccacctaggaagttactttgacatcatgggattcagttatgtgaatcttaagaatttttttaaggactgtctcagtgacaataagcatcacagaacctgtgtatatgtaccatgtgtttttatacttagtttaaaaaatcctctttcctctattctcggtggttggtcagggttacacaataaagttaagctggataaaattaccaaccacacatttgagacaaaagagacccatctcttttataggcagtcacctttgctggaaagctttaggtgagatttggtccagtgaatgtatttctccactcaaagagccagacaacaaaagcagctctgctttgtcttagctggcatacacaccctctgggttctcactagactcctttcctacttctttctcttacaggttagatctgagctattaaaactgggagtcatcttagttttcaaaatcttagtttagagcctgtataggtctaaagagtgcagctaaaggatgcatgctgttccttgactcggtggagggaagcatcattagaacaagaagtggaaactgaattctgacaggtgtatgggttgtgtggatggattctataatgtgatcctttaatgcaccattaaagtattattcttatttcttactctcgttgactgcaaagtacttctttacatttctcactgaatttttcactaagcaaaactgtgcccatagacttaaaattttttaaaacagtaatgtgtttaattttgtagtagttatggaatttgtctaattgagttttgctgttataaacagcggtgagatctgtaacatttttaggcagtcttaacatttttagtttggaaaccttttattgtttttagtccttctttcttgcctgcctgcctgcctgccttccaccctgcatgtctgtctgtacgtcttattaaatatgcgtgttcatgcgcagctacttagagaatagaaagagagattattgggttctctgaaaatggagatatacaggtagtgtgagctgagggtgctggaaagcagactgcctgggagagcaggaagtccagggctcccaacatggtgagctcagttttaaaataggaaagactgcaataaataaaagacatggaaggcatatttttggccaaagtcttgagttgtttatgtaggcttcaggtatttcccttaatatttggaatattgaagagacttaattgattgtgccatgggaaaggcaacgattagagtttgtcaaaccttgtttattacctatcagtgatgacatgagagccaaagacgataagctctcttgagaagccccttaggggtttctcaacccctaagttttctcaccaagtccttgtttctggagatcctatcaattagggattctgtagttaatgtaaataccatacagtcatttctcttggaaagctttagatatttaaaatggtccagtctcaagacactgactgtcagccaaactaacaagactgtccctctcctatacttaatgccatatcctagaacttacctcttaaggaagtggagtggaatgaacaattggagcaggacctgaaatgttcgcctgctgtgcatttatctttaaatagctgctgtgaagggcgcacatggtttttgccagaggcataattagtatcttccaaggttgcacatggggaagagagcttgtatgtgtactgtgaggagcaactcagtatcattgctgcctttcctgtcaccaatctcattattcttaatgagttctgtcttcctctctttgttctgactataattattaagagatttaaaagagcttaatgcagtggagcaattgtgggttaaatgattctcttatttacattttctgtttatggggcactgcaaaccatgagggattcccgaaggagactcaggaaccatacatagcacacagttcattcttaggaccatggctgtcatagtgcagcctcctagctctctccagtgaagaatgtctttgggagggggagttcccagtacatattctgatacagccatcgtgaaggcaagttgtcttttttggggatgactgccttatttcccctgtcttctgtcactccattgctggctaactttgccaacatttattgaactttctacattagacagtagagaacagattaacatgggaaaactgctgggcaaaagaggatatggtaaaagatgtgcagtcatgtcagggtagggttatatgggataactacagaaagggaaggaaggcatatctaagctggctcttgccaggtatcagaaacctttgctggcaggttggttctgggactggggaggaattgtgcagatatctgtcaaggtacaggctgtgggggatcagggctggttatttggaaggccaggcgctaaggtgaataagttaggcttcgaacaggtctctctaggttgtgggtgattaggaagatggtcctgccagtgagtgcttcagaaacatgattgaagccttagggcactatgtttaggcctctggaataaagccgtccctggattgttgttgacttatgcccctttcagcttgtttgttcatgtgtaaagtggatgttctggtttctgtagtcacagctggtggggttaaattagagataatgggtgtaaaatgtatcacagtgacagcctgagaggtagccatctaagcatagatatatttgctggttttaccttgattttacagaagtggcagaaaggacaggattagattggtgatgagtcagagaagtctgaaaagcattctcagatacactatctaggtaatgggaggaagccaaccagtagcatcggcagacaatacctgtccctgcctgaaaggattacattctttgttgtaccactggccttgaatattgagaaggaaagttggaagcgggcagtctggcatgatttagcagtcaccataatgagagggaattatctgcaggaaagtaattaatctccagttgcaaggaacattgaggttgctactagtgaagcatcttgagcaaaatgggcggaagacaagctgtcttagagggagggagggagggcttcatgagtttgcagtcacttttatgacttctgccttagtttctgagcatagagactatcaaagtcggttttaacctttgctggcttctttggccatcctgcctgcctactgctttccgcaagtcactcaggtctgatgttctgtgttcacttagcatcttagttctgctgatgcagtaatttgtttgcgagcatagtttctttgctggtaatgaaggaatcagaaccattggaattcttgatcttggaagaatgactccttttataattgccttgtgaccttggagcttgatgtttggtccagcttagggccagcttgcctcagaccttgtctgctttgcaggaagttcaagtcattctccctgccagggggctggcctggcttcattggtacatctcagaatacttttctatacctcagtgactagagaagcttgtagtgtttcttgggccttctggaactcattcaggtacatgggggcagggaatgggatggtggaaatttctcagtgctagcattgctgttgtgttggtcaggagctttattggtgcatatatagattttatcttatgtgtttttctgaagcctcttgtgcctgtgccttgtaggcaactaactgttcaatgtctgtgggagtctgaaaaggctttgcataaatcataaattcatgttcagacttgatggtaattggaagttggaaaatctaacttattttcacttcttagcttgtgctaatcatcttgtggctaggaactactcaggctgaacactgttatagctattgtgtggtgttggttgtctattcagttagcattaaaagaccacagacttgtgggatttgactgtgtgtgtgtgtgtgtgtgtgtgtgtgtctgtctgtctgtctgtctgtctgtctgtgtgcatacatgcctgcatacatgctctcacacacttggtggttgaactttttgttgttgtatgtaccagatgggaatcgtttttggagatgagacaaggcttttaaggttcctgttgtgaggcatgttctattgtaatctttgtgtctctgtaaatctacctgtacagaggctattggtaaaagggctagtattcagtctgtgtgttgtgaggggaattgtgctgaatcccttatctttccagacatggaaatagaaccgaggcctcacgaggaatttacatattacaattagatagacagcgcctgatgaaaatgcatttagggtagtgtccaagaggtaactttcgaccaaaagtcgtctcacatgccattttcctcaaaagtataaacacagggttataagttctgtagctgtcttttctaatcacagatttcttattttcaaactcacctagaacatggcccatctaccatttattctttgggaagaagttttgtttttgtttttccttcttaaaaagttacatccatttaattgggggtaactgttgctcccaaggcaaggtcagaaaacagcttgtgtgatttgagccttgctttctatcattgtgggtccttactgtcaaattcaagcagtaagtatgttttttcactgagccatctcactagcctgaattgacaaattttataacttaggagttgttttgaagactcattattaacaccatacaagcagtagcctaatgtaattctttttttttttaagatttatttatttattatgtgtaagtacactgtagctgtcttcagacactccagaagaggacatcagatctttttacggatggttgtgagccaccatgtggttgctgggatttgaactcaggacgtttggaatttggaagagcagtcggtgctcttaaccactgagccatctctccagccccctaatgtaattctgttgtgagttgtttagagtgccattacctacattgccatacactgtttgctcataagagcagttttggctaaatataatactcacaccctgtaaccagcttccagaactagggctccttccttaagctctggatgccatggaggccatcttcacggctggcatgcccatgattgacaggcttctcattaagggtggggtttcttttggataaaggcctccccgaatatacctggctatgtctcatttccatctgaacatcttttaaatttaaattacagttttgttttttaagtcgttgctgcaaaatggagaggaatcatctagatagaagcatgaatgatggcacttggaagctctgcatgggcgtctgcagatgggtgactgtggagaaagaaagaccagggatggaacagtgctatttgccatatcttcttttcaaggaccttcagcattgtgggtttcaatgtagaagtaaaaatagaagtgtgtggatcagagtggcatgcacatcattggattagattcatggaggcatttctgtagttattgttgcttatttttatagcttctggttttatggagacaacccaactcattgggcactgcctcttaattgggtcacctaaacgactgtactgagagaaagcctttttctaaaacaaaggctcttctaagagcagagcgctcggtctgtttgctagtgttaagaattgagttccaggacagcccgggctatacagagaaaccctgtctcaaaatacaaaaagcaaaacaaaaaaaaagaattgaatgatgagggagggtagagaaaaagccataaaaaaatccagcccaaattagaaaatgcaagcttttggattaaaataatttttgttgtggttctaacatgccacattttgatttttgtccagatgaaaacatttggtttgtatttcagtaaatactgtggagacgttgccagcgaattgtaaaaagtaatgaaatacaactttggcaaagcacagatgcatcctgtagtccctgtttctcctatctgatccaaagctttaaaacaaacaaacagggctggtgagatggctcagtgggtaagagcacccgactgctcttctgaaggtccagagttcaaatcccagcaaccaaatggtggctcacaaccatccgtaacaagatctgactccctcttctggtgtgtctgaagacagctacagtgtacttacatataataataaataaatctttaaaacaaacaaacaaacaaaccaagtttgataatgcaagtgaataatcaggagagaaatacgtgactgatgtaattttaatagattactatttatagtcattgaatatgaatcacttccttgatccacaaaaaaagtaactactctcctccctatacacctagtcctccaagatattctccttcattgattatttcaaatacacggttgtgaaggagagcacagataataattatgagtggtaaattagcacctctcactagctaatgcactaagaagggcattgtttgtatcataacaagaaggtgccactttgagaatggcttgtcttatgcctgtcttgttcccagtgtcatggctggagctctgcaatggggcttgagtcctgccttggaggaataataacaacaacaacaatgaccatgataatgatgatgatgataacaaccaccatcaccaccaccaccagaactgtgtttttcttggttgggaattgcctttcttccagatttgcctattattagcgtgtctgtctgtctttttttttttttttttttaaagtgcctggatacttttacaaaatgtttaaaatgatacctcttttgtacttgaagaatgagaaatgatttccctcagtagcagtggtacagattcatgcctgcattgaacatttgaaattccttttcctcaattcctcctctaaattgcttccctgtaagtcagagcagcaggcttgtaggaaaggagtatttttctgaaccacatgtcttttagctctttttggatattttaggttattcacaattttctggatcatagagtggagttttggcagcatattgatttctctatttttttgtctggtgcaaggttgttaacttgtaaatgaacagggcagcaagattcatggatagatttttcatagttacataggtggaatatgcatcacagtttttcttatacctatgtcagtctgacagggaagttagtgacgcatacaaatttaaggccagcccataatgaagaggtctctgtgtgctttctgtatgctatgctagttgttcctgaatgtcccttctcctaaacaagtgataggttcgcttggagttttagtactatcctgaaaggcagactattatatccaacgtaaggggaccattgtggtaattgaaagggtctttggcagagggggagtgggttctagactaatgcttggactgagggtgtcttctccctgctagtgctgatgaattgaaatccacagctggaagccaagttaatgagcctcaaatattgccaaaagacatgactcacaccagtgaaaatgtgctctcttctctctcctctcctctcctctcctctcctctcctctcctctcctctcctctcctctcctctcctctcctctcccctcccctcccctcccctcccctcccctcccctcccctcccctcccctcccctcccctcccctcccctcccctcccctctcctctcctctcctctcccctcccctccccttgtcttctcctttctttttggtttttcaagacagggtttctctgtgtagccctggctgtcctggaactcattctgtagaccaggctggcctggaactcagaaatccttctgcttctgcctcccaagtgctgggattaaaggtgtgtgccaccactgcctctattatgtttttagtctcactttcttgacaaatgattcttcaaaaccaatatctaatttcagaattttcctccagtcaagaacctgattctaaatggtattaatcaaaggtgaaaaataaaccagaaatagttttgtgagaccatgtgcaactcttccctggggtctttgtagcctgtaatacctctggtattaggttgaaaaaattaaatcattttatacttgttattccagtgttgattcaggtaacttaattggactgctgttgtcctctctcccacccctcccctcccttctccaggggaagtggggggacaagtttcatgtagcctatgcttgccttgagccagcccatgatgcttctcctgcctccagctcttgggaatttgacaattgattttactgggactgatttcaaagaaaagagaaaagtgatgtatccagttattctttctgtttttcaagctagaaaaggaagttttgttatttaagagcagattatgtctgggcaccatgtgagtacctggtgcccctggagtgcataagaggcaaatacatccattagagctggagttgggatgcatagtgtatttactggaaaagagcagctgatgctcttagctgttgagctgtctctccagacctggcaggatgtttaagatttccttttgtgatattcctccaaaagttatctgtgctggtacttggtggtgtataatggggaaagaatccaaggttgttatctctgcacttttttttaatagcttctggttctagaatatataccaatttgttgattgcacctccctcaggattggctatgtttcataagggaaaaatattggaagtgaccttcctttattttcagtatgaagaaggcaacatttgagaagagaggctagagtgtaaaagtgtgggttgttcttgcatagattgcttaactgtctctctagcctaaggaatttattttaataatatatcatctataacttcagagtggtttgtaaatacttgaggtgttgggggggaattctatacttggcttttataataagataatagagtggcctttaaaaaaacaattcagtttcttcttcctcatcagtaatttttttctctcttatttccaaagctttaagttaaatgcagagtaaacctccaacactatggttggatgttttcattttactcacattgagttatccattccttgctgttgtttatggtccgtttctccacagaaatattacagataagattctcaaatatttatctcctcctgggcgagttttgcttgaaattactcatggatacaaatggggtcatatttcgtggggggaatatttgaaaataaattagaagtggtatcatctagtagtggtaattagctttgttttatgcgattggcatgcagttagggtcctacctttataagcctctcctttgcattactactcctggaaggggtgaatgtcaagattggttttgatgaactacatatgttaaacccatcaggttctcctgcgctgcccaacagtatggtatattttggaagctctcaggatgaggaggatgtcgaagaggaagatgatgagacggaagatgtcaaagcaaccaccaacaatgcttcatcttcgtgccagtcaacccccaggaaaggaaaaacccataagcatgtacacaacgggcacggtaggttcaccgtggaggctgtgtgaggggcagtggaagccaggcttgggtgagagctgagaaaacatttgaagcgtttcagccagatttcttcagagtaattcaagttccagactcttaatgtacaaagaacttagtagttcagcccaaaagtattctagatgaaaatgaagatgttctatgtggaaatgattataaatgttgtaggaactacagatgacaaaagaggaaacttgaataatgacgattaagatcacttttgtgatcaggtttctctatgtggcccagtcagtcccaaaactcactctgtagaccagattggccttgaacaccaagatttccctgcctctgcctagtactaacttggtaaattttatatatatgtgtgtgtgtgtgtgtgtgtgtgtgtgtgtgtatcatacattatgtgtatgtatgtaattcagagaaatacgtatacataaatatacagcagtttagttagggatatgcgtcaaacacaaaggggcaccaaaatttaaaggttgatgggataaaagtgcgttaacctgtagctatagtcttcaggaagtctttaaaatttttattattatatcacacatgaatgtaggaaaactatggaatcagaactccctacttttgtgtgtgttctgttgagtatcaggcttgtatcatgagataccatgtgtttttatccactgtccattgtttatgtctcatcatggaaacttaggattgagagagctgccttttagttgccattcaagttcaagtgcatagatgacttgtgaggggtagagtttgtgcgatagagttttatgtatttcatgggctaggagtctgctgttctactgtcttagagaatatacttacagggaaagtataataatgactgaggctgtatttgggaacctgaaaagaagactttggaggaaatttaatttccagaatagggagcttgatgattttaagtgcgaagctaagatgaaatcagtaaaattagagcagtctgtctgtcacagagtaataggaaaatcaattgcagttgggggtttctacccaggaaagcactgataagaacctggattacaaacgtgcaatggtgtggctcatcagatgaggcctcagacttgttgactcttgtaagagacaaattgtgggcaagcacactgctttcacacctttccattgcttttcttgtcagatctctctttgtatgctatagtcaggaaacccagagacatctgtgaactctgtggattgagaatctggctaggatgcagagataaatacacagaaaacagtttagtaaagaaaagttttatttttactacattattcaaaaaatctggagcctgaacagatagtcccttttttctgatgtactttgtttctgttgaagtggagtaggagagtgttgtggaaaatagcctctgcacctggtgacctcactcagtcttttggcccgccaacttgccaacccatatggctcctacctgaccatctcttggacatgcactactccccagttcctctcactttcacacagcgcccccacacacccctggttagccatttcaacacctgataacccagtagaatcaagactcttaatgataattagccaatcagatttatgtatcaataataacacaatttacaagatgccagtacaataatttcagagccaaatgataatgataaatgtttaacacaattattctaaccttttcataacatcatgtcagcctccattctggttctccctctccttagacctctctctctgtctcaactccttgttctgcctcccttctcctgtccaatcacaaacctctcactgccctaatgtgattggacagggaaaatcctgcactaggagagtaatgccaggatagcgggtctcttgtgaattggctggagagaacaacctcttggtgacaagtgtcttgtacatcatcttaggcctgaggatgtcagcaattttagattaagaatctgggccctaacgttacgcaagagccaattgccctgatggagactttgttatgaaaacatcacacaagtacacagcacacaagtactttacaaacaatagcatatcctaattgaaagggatgtattggttaaaacatacagtttggaatgacgtgtacagtatcacctgatttttgggttgcagctcaagggttataataacaaatagtaactccagggattttcatttccatagctcatatgtttctaaaataatatctcacatatagagcctccaatgatgccaacagtggaaatataacaacacaataaagttgctcagtatatttgtcatataagttaatattctgaatgttttagagcttggaaattattcctagttattttactgttttctttgttttatcattaatgagtttgtgatgaatttgggttttcctcagtattgttggcttggcacgctctttgtgaccttctacagaataacttggtggcagttcattagttattttagtcaaatgtctttttttttccttcccttcatggaactgggaaggaataggagaaattattgttccattttgtgtacatctttttgaagatgggtatttctcagccctttgtcctaactggaatgtaattgcttttggattcataccaggggcaagtatgatggccaaaggcaatcatttggaccagtttcctgaattcatgtgttgtctgtcattctccctccggaatggtggagtggtggaggagaagcttggccagggtcttgcctgacagaatgctgctctagttgcaggtggctgtgagacctgcatccctgtctagcatgtggcagtcactccttccttgttgagacaatggattataggtggggctgttaagtctggagcttatgttgaagtagtagtagttgtttcctaaaaccccaacatatttgtggtactgttaagagaccacttgtcatagtaattaaagtatacatgagaagccaagacacttcttaaattgtagcctttgatggctttttggtgaagatttactttcaaagatgccacctatcctgtttttggatttttgtttgtttggatgtaccacttttgccactgtcatataattgggggcaaaaatctggactcctagattggctaagagaattctaaaaagtttatgtgtctcagatgccttggtgtgtactgagaattatctgactcagctggctttgctggagttgctgccagcctaaccctctgataccaggtttttcctcattgttgtaaagtatgtgttctacattcagcatcttgaagaagcacacacacttgttgctttgacagcacaggtctacagggaaagcagagcctcttgctctggtactttcttgtagcctcatgacattgccaggtattgtctgctgaagccacaatttttctgttccgaaacatcttagcaccttattcaaagaagaggtccagctgtacaaagaagggtcaggttatgaggtttctcctggggtagagtgaagattctgaacatgctctgtgaatgagttacatgcaaacttggtgcttcaacaaatagagctctctgagacttgatatgttttaatcaagtggaaggtggctcttactctgttctgtgctttcgtcttaagttcctcctaagactctatgaacaaagttctccagaagaactgcattgctttactgcatacctgctttcactatgctttatacacttgatggttactaagctgcacagaactgcataatttcagctgttttttctgtcttaaggagactcttcagttatccaatcaagcctttctgatcccaaaggcatacagagtttttgaaagtcacttgtcaacttggataaaaactgtgtggtggattcaaggtgtttatttgaacagccttgaagtcagttcattaaagccagtttttcctgtctttgttacacttctgttattgcatatgcctttaacggcagaattgtaaggctgcatcacatgccatttaacactcatcagactcagtaactgttggtcttgcatttaccaggtaatggctgctatgttgttcttagcagggtccaccgtgaagacaaactacctggcccatggtctgtctgccttctgtttctctaccagcttctctagttcatccaggcaagtttctgggtgagaccaaagtactttagtgtgtacactgggtctagaaattggccttgagtcatggatgagattggtggtccaggaggctgatagtgcccttgtccagatacacctggaacagggaatttgtttgccattgttgctgctgctgaaattcttccttggccttgactatactggtctaactaactcagcccacacaagtgggattgagaggtgcatggcgtgtctgtgcatgcaccccagggcattgaggggaccttacttgtagcctgctctgaacttctgattctcctgcctttacctgctaatagcttggggtcatagacaggtgctacatctcctgcctaagaagaattgcttaggtttctgcttgttttgttttatttagccagactctggattgaactcagggccttgttctagtcaagtgttctaccactgaactctcaatgtgtgtatatttattgagtcctctgcattttaaagccactttttctaggctgttttcatttttctaaaatgttaactttcccttgtcttacattataacacacttcagtgtgttgtgattatttattcagtttcaaaggtgagccagaattcttatcattacctcggtcatgttttctttccctttcagaacacattatcttttgaatgaagagttttataaaatctcaaactgcagaatcactatttgtctactccttgcaagttaatgctccacccctttcgtgaataaagcatgagtcttgccctgctttcttgagggaagtgcaagaatctttttgcacaggtgttcctatgcatggtccctttggtattttgatgaaggcagatacttaaaaatagcaatagttgagccggctctggtggcgaatgcctttaatcccagcacttgggaggcagaggcaggcagatttctgagttagaggccagcctggtctacaaagtgagttccagagaaaccctgtctcaaaaaaccaaaaaaaaaaaaaaaaagaaaaaaaaaaagcaatagctgtccaggctagggctcctcatgttatcaagaggaccaggaaactatttctcaaagacaaaccagtcagtttgatttatggtgttctgtttttctgactattattacaaagttattaagaaccattaaaacttaatatcatgagttacttgtaacattgttagcaaatatatttaaatagctaatatatatatctacatatagctctatagttattttataccattgcccataatatattccagtggaaactagatggtgatgttagagaatttaagctttttcatagaggatggaaattcagttgacttaaaaatttccacacattaatccgtgtatgtaggcacctgagaagataaggcagtaagttccaggccagttagagctgtataacatgacctcgtatgttgtgggaagaagcctaatacaaaccaaaccacacacatttctctccttttagtaactgtctttcaagtgaggtggcatcccagtctggttttgcagcattataacctgatcaaggtgcttcggtttggcttgttgatggctctaatgtgagcaaaggaactttctgactgctttttaggctggatgctcaattgagtaactgttgtttctggccaaggcaaaccaagttagtgtacccacatactgcagtaaaatcctcctgaagttttggcactggttgacagacatcccattgttttctgataatagaagctcaaagttgaattggctcccgggaagtgcagcattagtaaagtaacaagccagccaattgctggagccagtgccttgctcaagtcaggtcaccttgcaataacatgaagcttacctttaagtgcctggctttgtattagaaactttgtggatctcttttacttcctatagtacacctgttattttccccctacagtgactcctcttcttcactcctccccgtagaggaatggtatttgtcagggatgatgttcctgttaattagactgttttatctgttcagtctgaaagatcattgtgtatattctttcccgcttaccttctgtttttcttcaagcaggcccagttttcaggagtagcccagaagggtttcttcatcagcttgcacatgagacacggagtagtttccaaataggaagcaacaaatatcagagactgcttttttactacatacctaataactacttgcctctgtcatttgtcctgtgtattaggagtaattgctgagataggatgagagtccagattgttggctttgtcagcatctttccagggtaaaacattcaaaaaagatcatccttgttatatttgtatcgcttctttctctgaagaacataagacactctatatacttgatgcaaaacacttgagcatgctttagaaagcagatgatgggggcagctggtttgtccttgagggaatccagcataggcgtgttggtgtgtctgagactttgtatgtgagggttttagatacaccttcgataggttgccttaccctgctgagagctcagtgtttgaacagagctcatggacagcgccattcgtgtcggacccctgggaactgtaaacgtgaatttcccatggaaatacagttttcctcttcaaacatccttgcaggagaggacgtagctaacaaaacttcttttgcctgtgtctttcactcctcactcatttgatggaaatctttccctttcaagaatgaagtgaccttcaatgagaatatcagccttaagatttaaagactttgtttgttgtggtatgaaaccacttgtctatagagcatttaactttcagagtaagtgtatacaaatcaatatatcagtctctgttcattaatgtaaagctatttgtattccaggacaatacagtttcctaatatggcttgctatgctggatgcttaaagaaactagtccaattatttcttttaattggggacactgtgtagagaccttctatacattgatgcctttctgtctcatgctcacagaaagtgaagttttctttttttaccctctctttcccttctgtccctttcttgaaaatcttacaaattaagacaaaagataattacttggagggataaaactggcaggttcccacgacacttaaaattaatgagctgtcgagtacaaaatataccttgtccttggctttgtcgtcttttcccaatcactctttttttcccatttaacacatggcatgactttttggttatgtttggtgttgggtgtattgctgctataaaatagcaggagggttacagcaagattcatttgaaaagcctcttttgtttgcaaatcaaagtttcattcctccttcctaggacatcttattaaaatacttgttagcaggcataactgtgttaatggcactgacctgcccctaaccccaccctctgcacggcttcagctctggttccagggatttgctttccagcaggtttctgggattagtaagtctatttatattagtaagtccaagtctattccactgaaatgacaggactgtgccgctccctttcaggcttaggcagtggaggaccttccttttctaggtcaggaggacactgctgcctgtccacatcttagaactgggttttgaccatgattcatttacaaagtagtagtgtgatacttgttgtataggctttaggcctcagacaacaaaaccagttccctaactctccttacattgtcacatcagtaagagataagcatatctctcctcctccccaacacacagacacacagacacacagacacaggcttgggcaggtgacaagctagccagaagctgcggtagtggcaaatcaggtagaatctgggacaaattgtgactgtgttgaggtttattcacaccccatggaaggcgggggtcgggtggggtggggaggggagggagcatgaggcatgcaaatggtaaatgtgacaggtttaatgaactcaaattgtcatactctgtgtgacagatcttgctcaggccaattgctgtttgagcatggtgatgaagattcctgaggactcgtctgcaggatcatgttatcctcagtctacaaatgagaaatccaagaaccaaatcacatgcccagtaataaatatcagcgccaggacttagactactactatgaaaaggataaaccaggtagtggcggcacacgcctttaatctcagcgcttgggaggcagagtcaggaggatttctgaattcgagaccagcttgggttaaagagtgagttctccaggatagccagggatacacagagaacccctgtctcgaaaaaccaaaataaaagaaccaggagtattcaccgtgaatagtctatcttagtggaagtaaataagatagcaaagttgagggtgttaggagtcatgttctttgctttaggaaataagtgaacagtcgaatgtgccatcttgaccattggtccccttgaagtgtgactcctcctcacagatgatattttcatttgtctcaggatcacacaagtggcagatgtggggttgtgattgatggcctctgacagtggctccttcattacacctagagtaaactcggcattattactgctccatttcccctgcatcttgtagcatcttgtctaacagaggaacaataagacacctttgtttccatatctaaatctgttttgaatatataattgctggtcctggaaagacctttggtgttgctgctcacagttaatccagatgtgagagatgtgaatctctgtcttatgctgtgcaaaagtattaaattatgagaaaaggcttagaagcaaaattagattacttcaattttgaaaacatcacgtgccatggaatgtcagaacacgacttagtccacagaaagcagatccaaaatgaattgacaatcagtaaaaatgttggatactgagcacaaatctgtggatcataatgcatcaactggtaattgatttctctgccagtgaaataagccaattcatgccagattagattatattaaatacaggtaatctcaggcaggcaagttaagttcacttgccccaaagaaggaggccagggaagccagtctccatggcaagggagaggagcgggtgtggggggagacctaaatgagcagcccagcattgcagaatgtgctagccagggactcagggatgctaggagaacctgggggccaggtctgctttgatgtgcaaaataggcaccccagtcttctccaggggcctgaagccaaataggaactataaacataatttttattaaccctttttatagtgtgtgatgagggaaaaagaaaattggacgttgcaatctccagcatttgggggtgggagcgcttcttgaacatgaaggcagagagacttgacatttcaaaagaaaagttagcatcagaaaaatacagccttagtgtgatgctgtacatggtgacttgcttttaagcctgtatctgagtttgaggggaacctctagtctatatatcccgttccagggacaaatggcagaaatgtttgcaacttagaaggtgtaagtcagctcaagggctccttcctgtcagggtgagagcaagcttgataaggcttggtgagctagctacctgtgtgaagaaaggagctctgggctgtggagagaggttttagctgtgtgaagggttcgaaaaggaaaaaagtttgacttctgttcaatcttcttgctgtgtgtgaccttctgctcgcaattggtttacaatgacctctatagttatagcacaaaaggcagctctacttgagggcttgtaccttttgatctcacccagcattctggaggcagaggcaggcatgcctttgtgaattaaaggccagcctggtctgcacggtgagacccaggccatcctgatctatacggtgagaccctggtgagaccctgccataaaacaattaaaaaaaaagacctaccagtgtattggtggggacaaagcaagacaccctcaaggttccaggggctagctgatgtcacttagctgatgtcacttagcttttggattgcaggaagcagattgatgattctgaagatgtcaccggatggttcagttgaaaggatattaggttacgtagttatgagtaaataatgactagaaacttaatcaggaaattttaagcaggatgaccaatcttacgaatctttaaaatcagtgtagtttattcagggagatggttgctggttctgaatttagtaatggatggataggcatggcttgcagctccacctcctgcatgccttaactggccagttgcaaagcagctctgtagtctccaagtgtgtgccttcacatttctctaaggtcttcttgtgatattcaggtggttttggtcttagaatgtgactacattcagatagtccaggacattaacctttattgatactataaagcaaactgtattcaatagcaaatgcactttcagtattgaatttgcgtctttttctgggctagtggctctctatcctgtcttgtctggtgatgctaggagtgagtgtgagcccagcaacccaccagcctcctggcactgagagataactgatgccaaccaagctctgcagtattagatgctgcagcagttcagtttcttcctgacagtacttactctgattacatgggtttttccatgacacagtccccttgtaagctgaggaaacacagtgttactttttctggttcagtttttgtcttttagtatactgttgataatcttggaaggaaattatcttttaaattttttttttttttttttttttttgagacatctcattctaggtcaggatggcctagaactgtctgcttagcccaaagtggtcttcactttcgggttagggttgtcttgcttcctgagtgttagttttaggcttgagccacgatgatccgttgcctacagtaggtagtttttgaatggattttaaaaaaccaagatataggaaatacatagttcctaggatatatttgaagtgttttcaatcgggttcatcatcacatttcatgtccttgtgcatcttggtgctggccatttatttccctggagaatggttgagttacatggtaacttacacagtattcacatcccaagttacatggtatggttcctctgttcaaggtagtgacttccttcttcccttctcttccttttctagttttcaatggctccagtaggtcagcacgggagaaagagcctgctcacaaacacagaagcaaagaggccactccggggaaggagaagcacagcgagcccagggcagacagccggagagaacaggcttcaggggctcagcccacggccgcctcggctgcggcttcctctgccaagggacttgctgccaaccaccaacctcccccttcgcatcggtctgctcaggacttacggaaacaggtaaccctcagtgagggcctttctagtgtcccacagaaggcccagtttattaatcaaggtgaattcaggctgaccgagctggaaaagtagagcatgattggacagagatcacatgaggtgtctctcttaccctgggaggatccagatctggcctccctttctttcctggatagcttgagcttacacagtattcacataccaagtgctgctccccctccaatcattgctcctcttctcttctgagagggcacctcccatccccttcctagctcatcaagtctgtgctggattaggcacatatttcccactgagggcatccaaggcagccaaggatactgagctgaatactacacagcttagttttgtgcatgagataaaatggatggagactaaagatagactagtttctagtgaagcaggcatataaaatattatttccttgtctttgtgtaaaattatacactaatgcacaacacaggtcatcctttcataattttatttttattttatgtgaatttgtgttttgcctgcatgtatacatgttagggtctcaaataccctggaagtagatcctgggaattgaacctgggtcctcttgaagaatgtcagtgctcttaaccactgagccatctcttctgctcctaacacaggccaccttaagactagaaattagatttgtgtttcaaattagttgtgtatccagattatttacttcttgttccagtgattcatgaagtgtctcataatcaaggatacatggtttattttacatttacctaggaacattgctgctcctctccattaatcgtgtctcttcttcggcactccatatctcagcagtaatgagtgtcattatggaagtagcttgggggtgtagagcaagtaccatttggcctggggtgtctttgcccactgttccatggtggttacatactagctgatctatatcagagtctagggtattggagggaggcaagtcgtctattgctgttacaagagattccatgaccaaagcaactcttaaaataaaagcttctaatttgggtgcttctagctatagaggattaatccctcttcatcattacagggatcatggttgcagacagccacaaggcactgacgaagcacagcctgtttctcaggcagtaggcagagagaatggcactgggactggcattggcttttgatattcaaagtctttccccattcacacacctagtccaacagagctacctcttaaaccttcccaacagtctaccaactctggatcaaatattcaaatagatgagcctatagggccattttcaccacagaagccacaatggagtgaactcctagcacctgtgtgctgccaggtttgaatcctgcagatactgaaagaatctttcttacaagtcagtcagagctgataactttgaccttcacatttgaattttactatgaccctgatctccctgagtcttagagacttcaccttcttagctctgttgtcgaatatgaggttatgccacagggacattgagaaatgaaagaataaatgggtgaccatcagatagtgctctggaaataagattactacagcaaactatagcttctgatatacacgatggtattcaagtgtctgaaggatactctgacctttactgtcagacttgattgtaggaaatgtttgggtgtaggctatgatttgaaagggtgctgctgagcagtacaaaactccgtcctgcttgttctcctgctctggggtagacacctttcccacaggaaaagaactctccttgtactaatggtaatggtaatggtagacagtggtagttagtgctcttcaaggccctgggtcctgaggctgagaatacatgaatgcacacttgtgtgtttctctttgtatgccagcactccatctaatctcatctccagcctctggaagtggaagagtatctgttggtattctgtaatgaggctttcatttaaacaccgaaatagatgtcagtggaatcatgcaaatgattggggttatcagaagagagggatcattttcttttgttttgagatatggtcttactgtatagctaaagctaacctgggacatgggacaatcttcctgtcttagcctcctgagtgctagcattgcctgactcctcagaaagcattgtgaaatcctagtttgccaggagagtaaatgcacttcatagttgtatgtggtcggtagtcaggggtatgagttattgggtcacacctaatatgtcttattcttgatggtgaggcatcaagaacactgagaaggaagttggtatgtcttcatgaccagcctccagatgctcttggaaagatagctgacatgcagggtcacaagagtcttcctgtggaagtgtatagaagtgaaatgaccaggtcttctgacaggccaaaggattcagaatgtaaattctggaaaatgaaattgggaagaaagacgctttaccaaatgaaatccaagtgtcttaggtagggcttctattgctggtactagataccatgaccactgccactcttataaggaaaggcatttcattagggctgcttatagtttagaggtttagtcttcatggtggcaagcatgctgtcatgctgtcaggtagatatggtgctgctggataggcagctgagagttctacatagagataggcaggctgagtgagccagcctctgggcgagcttgagcgtctgaaacctccagcataacccgcttcctccagcaaagccacacctgcagtaatgctgctccctgtgagcctgcgaggctcattccagtcagccaccaaactctttgtgcagagtggtggtgtaaagaggtgttgcctacttctccagaggctttatacaccattatacgccatgttgcctgtgttgtaagaacccaggctctccttccctttgacctgcctcctgtctgaagtcattgcagaacatccttcttcaatcgccctggcacatctatctatatgtactctttgtcaagctcccaagtcctttctgttcaccagaatttaataaagcactaaaaattgggatttctgtcattaaaaactagttagtcaaggaagaatccttggagtccttgggtttcatttccttccctttttctttcttttttaaagaatttttctgtgttcctagaatccctaccagagcatagacttagaaagctatctgctgaagattttgttttcaatgttgtgcacccgaggaaggtccctctacaacatgcctgtgtgcttctctagtaaattaaggctcattcttttgcatgtgcagcttaggttgtacagctatggctcaaggtctccttgccatgtgctatttagatgactgaggtagtctgttctcagtcagagtcaagtgccatagtgctctgaggccaatagaacatcattagtgctagtgctatagtcttcattcccatgagctttgttggtactggttaaatgttggctgccaagaaatgagtatatgctggaaaggcagtgtcattatgtgcagttggttggttccacattttaggggactatttcaaattgtcatattttatgtaaaatctttagcaagcttgtggaatggcctggttgctgatttagcttgctgctgtattgaactgagtgcctcatatctacattagaaagcacttaccaacgaaaccatcttctagccttgtgtatttacatctaattcattggtgttacgttgcctccccctcttctaaacttaaagtcattttcccactttattgcagatcccctctgtcatatcaggcatacctatctagtgggctgctgtgtgcaatgtgctggcactgcggcacatagcatttgtctcagcagtcatgaagcagatgcaggtggatctcaaaacttgagactagcctgatctactgagtgatttctaggcaagccatggctcttcagtgaggcccaagtcctacaatttagttctggtgcctccctagaggtaggtactgtctccaaaagttggagaagctccaagaccaagtaaggctgtggactcttaatctatgtcacaccaagcatttatgttttttactggaccatagtagatagtttattggcatttatagaaaacatctaactggcttctgtacggttctcccatgtgttggtgtggagtgggctgtgaaacttcatgttgactttgtacagcagtttttcaaagtgtggtccatagacagcaacaaagcatctcaaaagacctgactggaattccaaaatctccagcctcgttacatctggagggggctttgtagacttgaggtgttgggaggtggcctatttggacagccatgaacttttaatttccagtgttggtttggatgtcagccaatttgaactatttcgttcattctactggaagttcccaatcagcctgggcttaccacccaggactctttgtttgtttgttgatcggttttttttgtttgtttgtttgttttggtttgtttttttttgatttttcgagacagggtttctctgtatagccctggctgtcctggaactcactttgtagaccaggctggcctcgaactcagaaatccacctgcctctgctgggattaaaggcgtgcaccaccacgcctggcaccacccaggactcttgtggcaagggcaggcggatcgtgattcagcctcaagatggcaccttgtagctaccattagtagcctcagcaagactgtttcccatccacaagccaggcccctgactcagcactcttttgcaaagaggtctctggtttctgtaattgtgtatgttttatgggctcttttggcaccattaaaagcctgtttcttcttgatttttaaattcatggtatagatgacacccatgagactaaatgtaacaccaaactcacagctatggtgattggtgtaaaatcacctacccttaactgatgagtctaacacctcattgttcttgtatttggaaatcagtgggcctctgggggttcggtggtaccagaaccacactgttccattctttgtgaatgaggcaactgtttcacagaatttttcctttggttttccatctgtcagatggatggccagtacaggacagctgcctctatttacccagtttaactgaaacccaaatgagggcttgcaaggggcaagaaaataggaaccatttgtgcaaaagggggttaggcgttttgtagcatcacaaaagaagttagtgtgctgggttcttgctttttgtttttgtttttgctgttttagtagcattattgggtttcatgttctgtgggtcggccaggctgttaacatggaacacacaaaggatagcaaacagctgcttttggaataagaaaaaaatatatttcaaaaacttattgcacacctttcttaaatgaacagcatcttgctgttgcaggttcctgggtaactgatgggtcaatagagagggtctttattctggaccctaagcttcctgaaagagccatctagagagatgttaggatgcagactcatcggggccgagcgctaggcaggactacacagtgggctgcacaatgctgtgtgtggtatgaaactcgtcattcagctagcacagattaattcttagtgggctttctgctgcttatcggatgtcctcatgtctcttctgagccagcaactgtagaagtcctttctcactggatttgcctgggtactaattctttctctttcccctgcttctgctgcctccataggtgtctaaggtaaatggagtcactcgaatgtcatctctgggtgcaggtacaaacagtgccaaaaagatccgagaagtcagaccttcaccatccaaaactgtgaagtacactgccacagtgaccaaggggactgtcacatacaccaaagccaagagagaactggtcaaggaaaccaaacccaaccaccacaaacccagttcagctgtcaaccacacaatctcagggaaaactgaaagtagcaatgcaaaaacccgcaaacaggtgctatcccttgggggggcgtccaagtccaccgggcctgctgccagtggcctcaaggccagcagcaggttgaacccaaagtcatgcactaaggaggtgggggggcggcagctgagggaggggctgcggaattccaaaaggagactggaagaggcacagcaagtggacaagccgcagtcaccccccaagaagatgaagggggtggcaggcaatgctgaagcccctggcaaaaaggcctcagcggcttcaggagaaaagtctctgctgaatggacacgtgaagaaggaagtgcccgagcgaagtttggaaaggaatcggccaaagcgggccgcggctggcaagaatatgctgggcaaacaagcacatggcaagacagagggcaccccctgtgaaaatcgttctacctcgcaacccgagtcctcgcacaagccgcatgacccacagggcaagccagagaaggggagcggcaagtctgggtgggcagcgatggacgagatccctgtcctcaggccctccgccaaggagttccacgacccgctcatctacatcgagtcagtacgtgctcaggtggagaagtacgggatgtgtcgcgtgattccccctccagactggcggccagagtgcaagctcaacgatgagatgcgctttgtcacgcagatccagcacatccataagctgggccggcgctggggccccaacgtgcagcggctagcctgcataaagaagcacctcagatctcagggcatcaccatggatgagctccccctcataggtgagttaattcggggattgccgggtgggttcagctgggccgtcatctctaactcgacaatagttgcacttctcaactcatttccctgctcttgtagaacctctctctctttcgtaataagtttggggcttgctcttggtgctagagcccctgagctgctgctgctgctgctgctgctgctgctgctgctgctgctgctgctgctgctgctgctgctgctgctgctgctgctgctgctgctgctgctgctgcatggctttttattgctctagagttgctgtggttgggcagtgtccagggaagggctgaggtcaggctgctacaatgtgccatggcttcaaaaccacaaattaggggtttctaattctgcatgctggcaggagtggtttttgctaaattgtctctgccttgtagtaggccacctgcactttggtcctcatagagtctttcctctgtatgtctgtctggatatctccttataaggacatcagtcaggctgtagtaaggcctacttgggtgaccttattttaacttagtggctactttatagactcttcctcacaataccattccatcctggggttttagggttttgtacttgttaatatcagcttgggtggtcttatatttcaccttacatggattattcctttttttcttttcttttttcttttttttttaaagtttctctctcttaagatttatttattattatatccaaagtacactgtagctgtattcagacacactaggagagggcgtcagatctcattacggatggttgtgagccatcatgtggttgctgggatttgaactcaggaccctcagaagagcagttagtgctctaaactactaagccatctctccagccccttattcctttttcttttttagtttgtcctagcattccagtacagacatttctagtgaaggccaactagcttttacattgaggccagtccttcaaggtggccagcagctcccctccctgtgggtttcaacccttatgaatcagtacaatgtctgtggttgggatgtatggagtagctcagtagtcaacccagggacacagtgacattaacaggtggagagtttataactcctctcccaggaggctgccattaaccatgcctgatgggtctgttgaaacttgttggtttgtcatctcttgccagtgtcagtatgggaggagcaggctttggatataggcccatggacgtgatcaggaagccacacccatttagccccactgctagccctctggtaacccagaggcaagtgagtaagtcctgccttagagagctctgtggtgccactcttctctcccttccagtgcatagtgcttttgtgttggggaacaggtgagatggcaggtacagttgccatagtaacccagagacttgtcccatagtttgttgttttcccctgtaagtcacgagtcagttcatcattactcatctgtatgtgctttgccattacccataggataaaagctacccagggccactgatttggccatgcaggcttcagacctagcgcttccactgggtaggactctgactcctggggagcctctctcccagaaggcacttagtaagtgaagccttgatgggtggtacagccatggaatgagggttgacgtgtgtgtttttagagttctaaggaactttgcaagcactgcatgtcacttaggactgcatacatagttaatactttgattttggaagcactgaaaaagatacactgtagcgggtgtgttctgggccgtgttggctcgcaaggagcgtctcattcatggaggaagactttgaagattcatgacagaaatctacctttatttgccaatgtgattgtaggaccacaaagctgctgctgcctgcccgtgctgggtctgaggtccgtttcctccctccctccctatgctcccagccaagtcagttctggtatttggtagagcaataaatgggatctatgctgctgtctccatcttactgacaggatagtctagggacttaatctgtagacagctggacagaataggtggtataggtcatgcagcgcccagcctggtcctgtactgtgtcaactagtggcatatccctttattaatttaattaataattaactaattttattttattgtcaatttagccctacttttgaagattgaagaaatccttgttttgttgtttgtattgcttggtttttggtttcactgtgttgttggtagctattgctcttttcagtgatgtggcttctccattttccatccaggtggatagagagatatagtctgtatttaaacacatctgagatggatttgtttctttgttggttgtattttggtttgtttgtctggcacaggttaggcaagtattgtaccactgacccactcagcccagctccactgacccacacagcccagctcatatttgagtgttgataaacatttagactcatctttttggagataagtaccctcttgtctttttttcttggatgagacaaaaaagcctttctgagtgaaagctaggctatttggaagagacttggctttgatcacatgtgtctgacctttcacaatattgatgatgcagtaagctatgggggagccctggccatgctctgctgtagtcacctgtacccctctgtgtagtagtgccctggtctatgctgagcacagctttggtaccatttcagtggtcctctccttctgtgcatggctacctctttccttctgatcaattcctcagatactatttctggtcaccttcctaagatgatcataccttagtttgcttgtctcctggtacttagccacgactctaagcagtgctcaaaactgtttgtacatacaagctggctgctggctgctttagagcagcagttttgtagtaaggctttcaggactaatagggcataggaaaacaacttgtgatatccttgttaaccatttcaccccattgctgcccaggaggctgtgagctcgacctggcctgctttttccggctgattaatgagatgggcggcatgcagcaagtgactgacctcaaaaaatggaacaaactagcagacatgctgcgcattcccaaaactgcccaggaccggctggccaagctgcaggaggcctactgccagtacctgctttcctatgactccctgtcccccgaggagcaccgacggctggagaaggaggtgctgatggagaaggagatcctggaaaagcgcaaagggccattagaggggcacacggagagcgaccaccacaagttccactccctgccccgctttgagcccaagaatgggctcgtccacggtgtcacacctaggaatggattccgtagcaagctcaaggaggtgggccgggccccactgaagacgggccggcggcggctgttcgctcaggaaaaagaagtggtcaaagaggaggaagaagacaaaggtgtcctcaatgacttccacaagtgcatctataaggtgagtgggctgtgcggtagggtgtgccctgccctgctggagccggaggaagctgacttgttctgtgggatgagcgctaggacgctgtcttaggactgttctgagctgctgtgaccaaatatcacagaggagactttctgtgttgcttctagaggttgggctctttctcatttacagcattaggtgagtctttggcaacacagaactgtcatgaaatggcgtgctctccatgcctgttggtagttatttaaagccgatactatgatagtatattaaaccccaggaaatatttcttgttgtttttataaacctgatatgttaaataaagatttagttggaaaaagctgacatggttggcccaggtgcccacaacttgtctgtggcactgcgggtggctgcaggggcatgcccatcacccctgtctgttgcatctgtggtagtgtttacattagatccttcttgtacttagggagcttagaaaggtttcaagttgcaggaaagtaaccttgtcaacctcatgccgagccttgccttgctggagagcaaacccacccctgtcttcatgctcacctcttggtgttgctttcccgagcacagtgtactgggataacaaacttaggtgggtgttgtcacctattgagcacacagtgtgtctttgtcactatggggaagccactggacagagacctatgacagaaatttatgtcttaacataacatgtcttaagccaaactcttcttctgttttctttgtttcagggaagatctgtttctctaacaactttttatcgaacagcaagaaacatcatgaacatgtgtttcagcaaggagcccgcaccagcagagattgaggtaagtaagttagccatctccatacaacgtcctgtgacactaggaagggtcttggtgcagtatgatgggacacaaaggcagaggttgttccgtgtgtctgtgcttgggcagccaagcattttactctgggaattccctagtctgctggaagggcctggggggcgtgcctgggctccatcgctggtccagctggcagttttcacgctcagggaactgcctccttcccatcctctctgtgtgttctggaggagaatgtctggaatcccctcaagtcgtggtgtgcttttctcctttcctgttcttcatgtaatgggattggcaggtggccatgtttgtgcttctgccagctctcttcttggagttagtgcagtgttggaagacagtgtgctcttgtgtgcccgggccaattagcagctggtccgtgtgaggtgctgcagaatagagctggtcctgtttgtgtatattccctggccagtgcccagcagagtccttcagaccctacagctgctgacataggaatctagcagtggctggtttgtgaagggagagaagccagttctgattcctggctcagcacagagctaggaagagcagtgttggggaggtgtagcttctccttctgggtgacaggttcccagccagctttttagttgactctgatttagaacttggataactctcttgctgctcatgctctacctagctctgtagcccggagcctgacatccactgccaaccccggggtcagctctgtccaggactggtctgacacccatgtggccgttttggctgcttcttcttcttctttttttttttccgagacagggtttctttgcagccctggttgtcctggaactcactctgtagaccaggctggcctcgaactcagaaatccgcctgcctctgcctcccaagtgctgggattaaaggcgtgcgccaccacgcccagcctatggttgcttcttgacacctcattgacactatggcagacaggccagattgagagggttcagcctgtgtcgcccctcctgtgttgagctcatggttactgctggccacagctcactttaaaggcctctacaagcttctatttaggatttttttttttttccttagaaagactagattttgctgtaaactgtaatctgaataaaggaaattgcaggtttgctgaaattcgtattttagtttgtgccggctgctgtggactcagtccttgtgcctcctctggacattagtgcctgcaggtttcagctctgatccatcagtctgaatcacagggtgttctttctgagtaaagggtccattcaggaatggtactgaatggtacatggcattcctttatggtttgtggccgtttggcccttcagacaggcctctattcctgggatttgggttgcagtctcatcctggatgctcattggttgagtttttcacagtaaggtttggtgggaggagaatggattgaaagtgcagctgaggttggaggcagggccatcttaaaggaacatgacatcattccttcactcttgattgcagtgccttctcaaactatccctttcctaatctaatcagctcagtttgttgccagctgtctgtctgtttgtctctctctctctctgtctctctctctctgtgtgtgtgtgtggtacattttgaggtcagttttggagtaagttctttctttccaaggaaagtttcttttccagggataaaagtgagtttagcaggctcattgaccttccccccccccccccccacacacacacacacacacaccttatttccagttcccaaaggaggatgctgacttgcagcagagcactgattgctttggagaggatggcaaggagcagttgtgctatgtgttctatgtcaacgcgttagtttccaagtgtcagtatggaagtctttctccccttattctcactgctgtttgtttgaatttctttcctaacatagcatttcaccagttttaactgttaatgtttgttgatgcttgtgtgtgggtttgtgcttgcccacagcacatgcgaaggatttaccttcttccttgtttgaggcaaggtctgcactcactgctgcccatgcaaggttaggtggtttgagagcacctggggattctcctgtgcctgcttgcactattgccctaggtgttctgggatcacacatggactctatgtcatcccgttttagttaggttttggaaattcaaactcagatccaaacacttgtgtaacaaagtgtttaagtgtccatttctgggagatcaggtctgttcatgttagtgtataatcatcgtcccaaatcaaaattcagttctctatgctcttcctttatcccagcagtctctggcctgctttgtctcaggcatctcctgtacaaactgctattgattctgtctgtgtagtctcctcatgccctagccagtgtgtcagggtttccagccgtcaaaggctggggtgcgtaaccacatggttactcagcatcacagcatatgtgggtggtttccccgagtgttggacggagctgtcattctggcatcacagtgtatccagagacgctacatacagtcctctgttgatttgaggatgtgtccccagagatgacagttgtattgttgccttacgttctgagggagttgctcatgggagtttcctgatatacagacaccttgtactggatatagtgttccaactgcgtctcagggtccaagtacgacacagacactgactggtttttcctcttgtcaacagcaagagtactggaggttagtggaagagaaggactgtcatgtggcagttcactgcggaaaggtggacactaatacccatggcagcgggttcccggtgggaaaatcagaacccttttcaaggtaattgtacattatcttgtccgtgtttgaggactctccccaccagctctgacagccccttctttccctctgcaggcatggatggaacctcactgtcctcccaaataacacagggtccatcctgcgtcaccttggtgctgtgcctggtaagtatgacctgatctcttctggcttcatcgtgagaacagagccgggtggctcactagtagagaggcctggggccttggggccagagtccatgcagtttgatgaaatctgaaaactgtggacccccgaatagctgaggcatctagttaaaatcagagtatcagaaaaggcttttcaatattaatcctgactcctgaaggctgtttttgctagcaaccacagttaagtgtgctgagaagtgaaaggtgctgcttcttctggcttaggtaaagccactccacggagtgtctgcttgctatgaatactttgggccttgcaagggaagcctgggagactcccttctgtccaaaccaggatcccaccttgttcactgtggacagaggctcttaagccaggcctccctgctcctgggaggagggccagaatagaagactcttatctctatgtagcaagtggggaggggcagacagctttttcttaaagtattaggtctgtgagagcagaattccatatgcctctcctgaggacactcttaatgacatctctttatgttgtaggagtgactattccctggctaaatattggcatggtcttttctacctcatgctggtctcgagaccaaaatcaccttccatatattgactacttacacactggtgctgactgcatttggtgagtactcacccccagcagcaggtacagtagccttgggcacctcaggaagctgatgctgaggagggcagtgataaatagggcctgactctgtaggtagggaagagagacgtgctttcccctagcccgtgactgtgctttgtacctgtgctgcaagtgttggagggtactctctgtgaattgcctgcctaatctgctttctctcctccttccactgttctattttatggaattcccaaagtggattccatagcagcattcataaaaagtaccatgggggacagggctgggcagctttacctaagtggcctttggcaagaactccagacctagtctgcccaattgtcaaaaattgtgtgcccatgaggtgtgtggcacagtgtggtcttctcacagctgagctctctgatttttgtgttgccagcagcagatggggattgactgcatatcatatgatgtcctgtctcatagtctcatagtctccctcccctcccctcccctgccccctcccctcccctcttctttccctttcccttttcctatagtcagatctcattatgaatggcttcaaccatgaggttgctgggaattgaactcaggatctttggaagatcagtcagtgctcttaacctctgagtcatctccccagcccccgaaattttctttattaaatagaatcttcaactgatgtccaatgtgggcagcagtttgctagtgtggttgtttagtttgttcataacctgatgagcaaggagggctcgtgtgttgagtatgatcttcagtatcctgtggactgctaaggtgagaggctgggggtggaggttgacatatgtggaaacagatcgcagtgttcatgggcaaatgacagatggcagctgtgcaatgtgccacacacatgcttgtggagaagcattgtgcaggtgttcctgtggcttgcactgacctgtggcacaggcatgtgaagatgtgagtgtcctattgctgtgatgaaacatttccaaaagcagcctggggaggaaagggtttattttatttggcttatgcttccatatcactgctcatcatcaaagatgattggaacctggaggccagagccgatgcagaggccgtggaggggtgctacttactggcttgctcagcctttcttatagaacccaggacccatgggtggccttacctacaataggttgggcccttccccattaatcagtaattatgaaattttcttgcaggcttgccgacaagtgcatcttatagaggcattttcttgagattcctttctctcagataactttagcttatgtcaggttgacataaaactatccagtgtgtgtgaatcaggttgttttttatagctcgaatgtgtagttggaggtgttgaaacttgagagtgtgtgacctatttgaactcttatccctgggttcatgatggcataaaagaaagcagagccagggatatcatcaataaactttatggcacatggtttttcaactggtctcttcctgaccagctccaggtcctccctggttgtcttagtagcggggacctaggtactatgttttcccatctcgaacagcatcaaatcctgtgcctatgcctgagaacttggccactctttgcagtgccagagaactcacccaggctgagggagtgtgtacttgtgtgtgtttctgatttatagagggcttcactctctggctttggtttgaagacttttggctcaccctgtggagcagatctgcatagaaagcaagcagtgtgtgtaaggctatgcctgtggtttggctctgtgctgggcagaagcagccaacagcaacagagcaggcactgggccagcactccagcctggctgccccacagaggtctcatcaaatgtctcttgtctttccaccaccccaggtattgcattcctgctgaggaggagaacaagctggaggacgtagtccacactctgctgcagggcaatggtaccccagggctgcagatgctggagagcaatgtaatggtaggtctattattgttagaaagtgattctgttgtcagctcctgacaatgctggcttgggcctggatgtgctacaaaaggtcttttgggcctaaggaggaggaagctgtgtgtgcaccatgggttctgccttgccgaaaattgactattaggctggcattgacttgtgttttcatgattgccttgtttgatattttctgaaggataatcataatctggtttgttaggcagtccctccgtcagaattcctgtacagctgaacttcccccataacctggatggtgtccatggggtccatggtgcagaggggttgcccagcagagcagcaagggccatgcatctctcagttggcactctctccccagatctccccagaggtgctgtgcaagaaggggatcaaggtccacaggactgtacagcagagtgggcagtttgtcgtctgcttcccgggatcctttgtgtccaaagtatgttgtggctacaacgtctcagagacagtgcactttgctaccacccagtggacaagcatgggcttcgagactgccaaggtaagcagagcaggcgtccttaggtactggatgtgatactgactcaaccgtaggtctctgaggtgctgtcattcggtgctggagagcctccatgcctggaactttttataggaaagtttttgaggtttatattaagcttttgacttctatactggccatgccacagttgtggggaccactcaaatatagttgtgcttctgcctcatgctggcagtgaggtgccagaacttttcttggaatcgggtactcagtactattattctccaggtaagcacaatggttgaacatctaacagcattaatctaggtccaatggccactttagaaactcacacagcttctctgccactgtgaccctcagctgttacttaatcatggaaacagaccctttgtaaaggtggttcttctttcaggagatgaagcgccgccatatagctaagccattctccatggagaagttgctctaccagattgcacaagcagaagcaaaaaaggaaaatggtcccaccctcagtaccatctcagcccttctggatgagctcaggtagtgtagacccaggtctcaggacctcaggggaagcaggcccaggtggaagaagcaggtggcagttccctgaactgcaggccacctgcagctcattaaggactgaaactttttcctttggtcctctgctattcctccatcttcctgtctgataatgggaagctcttggtgagctgataatgaaaagtgctcccaagctctttggggtcagtgctgaacttgccttttggtaataatagtatagaaaaggaaggttgctgggcctctctccccatggctgaccctgtagtctagtctaaaggggtgatgacatgtcctttttagtgggagcaggtattcattgtgggcatttgaccttctgatgacacccgccacttccctgcacagggatacagagctgcggcagcgcaggctgttgttcgaggctggccttcactcttctgcacgctatggcagccacgacggcaacagcacagtggcggatgggaagaaaaagcctcgaaagtggctacagctggaaacttcagaaaggaggtgccagatctgccagcacttgtgctacctgtccatggtgagtgtatgtgtgagagcccagtgtgacccaccacggcctcaacaccaggcctacttcagggcttccttcagaccccagcctcctctcactatggtagcaggagtgggagtcacttggccacagtgggcagttctatctagtactggtgcactcccctaaatcccttgctttttataccacttagtaccacacctacattctgttacaccttcatactgggaaacaccctcatgttcccagcctgtatcctcctctgtgattctaaattctatcaggctggcaataaagattaacctcgaggttttattaatagtaataaatgtgttttgcttataaccactgaatttgtgattagttcttagaatctttcaaaggcaacctgttcttctgaaatttttgtttgcatggaggcttctgaaataaaagccctagacttaaaggcctgccaaatatttgcacccaagtgttgagaccattgttcctatttctttttgtaacatacaggtggcaggacttgaggggtatataaaggagacaagtacacaggcccttcttctaggccctctgtggtcagtggctttccctgtttcgtcaggtagcagggcgtaaccgtagttgcttaatctgctctaatcacccggccacaagttccttgctatctgttctggattcttgaaagatagaccgacacagagagatgggggggagggggacaacttatatttaatatgccttaatcagctcaattgctgggccactcctaaacatctatgctcatgcctcctaaattatgtactaaaatctatattccatctttgcttccctagaccccgtgaggggccctctgagcccactcttccccacctctcacatgattggtatgctctcctcttccttctgcagttctcaagcctgcatcttattccttctgcaatttggctttcttctctcggttcccttgcccaggaatcctcaagttccatctttattcaccagtcagaaccaacttggggcagggaccctctttcaaattagggaactcaaataacacaatgcaagttaaggccaaatacacaacagcagggcacttgtttggtaggcagcagtacttgatggctatcttggagattggaagacatgtctagttcacaggggtttacatgttctctggaagctgacagggtcgcaataccctgcacgtcctctggggtgctattatcaggagtattttggtcagtaacttcccaagcccggacctgaggcagtgccagtatatttagttccatctctggaggagagccaaggtgggagccgttcctttcttacttccttccccttccctgccctagcagaagaccctgttgcagggtttcttacccctgtggactgttgtgagccaccgagtcaggtttgggtagatgtgtggacagacccccttgaactcagcatgaaccctgtctctacaggtggtacaggagaatgagaatgtcgtgttctgcctggagtgtgcactgcgccatgtggagaagcagaagtcttgccgtgggctgaagctgatgtaccgctacgatgaggtgagttctgacttagaacagagttgaagttagcttagtgcctagccatgcttgcaggatggagactgaatggaaccactgtcactctaagtggatgctgtccattgtgtctcggttggagagctggtagcttgagttgttctcagtgtgtctggcccccatctgtccttacatccttggcactcagtctacagatctgccttggcttgttttccaacctctttccatgcatctcttgttctcacggactctgcccaattctatgcttcctccattcagcaaggttactccctacacaggagatacctgactccagacatggctctccagagctattcacactgccaactgcctcgatactgtgtgttggaaagaagatttctgccttcaggactacttgtgcccagagctttttcttgtggctccagagcctcctgtgtgggtcatcaggcatcactctgcttggctagtggctacaccatcagccatggaaactctgctcttctgcttctcgacttttcctagccagacaacttcttgccctctcatgagccaattgtcaccttttccttacttagccttgtcctacctgctaaatgatgtctgcttctcatggtagtgccatctatcccaggatctgcactgtcccagtcactaaggaaatggagtactgtgattggcctgagtcctagccctagaagagagagggtggttgcaatggcagcctcatgagatctgagcatcccccaacccttgtctgtatagccaggaacatgcagaaggcgctgcctcaaggactttcttggctgtggacagtatgcagtgtggcagggaagggatcatttgagcccaggacttgagtcccatgtctgccttacaggctgtggtattgtgcactctgtagtgacctctgagtcagtgctggagtggtggtggccgtgctctctgcatgatgtggacacttgccactgaccatggcctctgttcgtagttgaatgctttagactgagggtctaactcccgggtgggcagttctggaatatggcttcctgtgctgtccacctgctgggtatcatgtctatgtgggatccatactatgtcttcaggtccatacacttttcatgctcttgaattttgtattcagttctacacatcacattcacattactttctaaatcagtggctctcagccttcctgatgttgcagctctcgtctcaggttgtggtgacgctgaactatttgttgctacgtattaactgtacttttgtcatgaattgtatgtacgtagtatctagtaagataagcaggatatctgagacgcctgtgaaagggttgcctaacccctgcaaaggggctgtggcccacagattgagagcagctgtttcaaatgaacctcagtccaaagagatcatctccatgtggaataccatttagcatcccagttggtaccctagcatgttcagtgatgtagggtatacacttccttgcccctcccccaattcatgatctcagtcctgtagatgcttttggactctgcagtccttgtcactcctcttgggttcaaggaacatcttaaactgccaccactggccatcctggtctgaccagtgctgcacatatggcaacctggttcccttcttcaggcaccatcttttggacagtgcccaccattactgtgtgttccccagctctgtagctggctgggcaggcagcatgccatccatgtggtcccaagcactgcgttttagtcctaacttggccaacagaatctttcccttggaaagtagagcgtaggtctatttgcgtcctttttgttcaatggcagtaacatagcttctttggttcctactttgtcacatgaacagtaaatgtcacaatgtgcttaattaaaattaaatctcagcaatgagtaggaattaccatctggcatcctgtcccatgtgcttcttccaaagaccccagccaggacccagagttggcagcagtggtcagggccagggagtgtaaatctgtgcacatgattaggacttctaaaagtgcattctacaaactgagcactggggtaggaagccacatcttactgggaccaaagtcctgaaagaacaggagcacatctggaagcagcctctccctctgccagaggcttgctgttgtaaagggtcagcactagccctcaattgtgttcagctgggtggactgagaaaggtaggatagacacaagctcttagttcagtccttttcattccttgtgcagcccaatgacagacacacaaggggttccaggcctgttcctcccacacccctatgcactgtgaagctcccaggaagagcagggctcccagacctgaagatagacaggcaaggctttcacaaaggagcttgttttaaggaggcaggggactatgtcacatccttcagctgtttgtaggctttttagaggcagaacttgactgtgtgaacctggagtcttgtgtccaggctgcctccattcctcactgctggtgttcttgcctatgctctcttgtttttgagacatccttcctttgtgtccctggctgctcccaaatatgttctgctagaacctctgcagaactgtgattctacgtgtgtgccaccacacccagctatggataccttttagtagagagttgcacggtcctcttgggtgaaataaagggatatagctgacccatttccccctctaatgcagaggtcacacacaatgagtcatgtgagctgctgatgtcacatgctggagaactttagcatagcttcaatctgtaatgtctcatatttggatgctgttgttaaatttctggatttttcttgtcatgttggctctcaaagagggcctgctgcctcagcttctaccctacctccaactatctgaagcagtttcaggagacagtcttcctccgagtgtggaggcatctgtttctcttttgcaggacaggcatttgagttctttatggagagttatatacatgtgaatgcaagcatactaggggccaaaagtgtcagatcccccagcggtggtgttagttttagtggctgctgggagcccacaaggcagagaggtatgcacggtgctcagcagtctcggcagccacaggactttccttaggtatctccctgtcctgttcacaagtcctctgcatctctgaatcctaaagctatttagaaagcctgctaatgtccagtgacacacactgataagtcataggatttggtgcctctgctgcactaacttaatgttgtctgtctgtcctggcaggagcagatcatcagtttggtcaaccagatatgtggcaaagtgtctggcaaacacggtggcatcgagaactgtctcaacaaacccacaccaaaaagaggtccccgcaagagagcgaccgtggatgtgccgccatctcggctcccatcctcatgaagatgccgaacccatggtcacttatatattttttgtaattactatattctagtttggagtacttgctgtaggatacaagctgtctttgcactagctctaaagaagaatttcttctggttttagagaactgattttgttttagcattaaactgttcaagtttttgtacgtagatatctagatactgcagtcaggtttggaagctgccgtacactcactgtctaaaacccttgaggggctgtattaatttgtatcgccccatggctgtgaaatgcctttttttttgtttgtttgtttttgttctgttttgtttggtaactgttgaggaataaaggctttttaacccatttttgaagatggtgaagtttggagaacaaattttaaaaccatcagtcagatgagatttttctagattggaaaagggatagaagatacacacacacacacacacacacacacacacagaaaaaagaaaacttgaaatggctttactttggctgtcttttcttctgtcatgtgcgaagggagtttgtaacttttggaaccggagagccctgtttctttggctgggcggttatggcagctgaaggcaaactgtgaggtttgagtgacgaggttctcataccagcacatcactatgcatccgttcgagggagagagagacaaagacaaagactgcctgccttggagggtcactgagggagacctgtgcctgatttcattaggaaatccattctgttatttttttttggtgctgttggctactttatcaaaaaaacaaaaaacaaaaaaacaaaaaacccttcaatagcatccttgaggaaaaggaacagcagttgactgtaagtgcttccctgtcatccatgtgcaatttcccgacattccacctccatctctgcttgtgtccctcacatcagcattaatctttgtttccctcacacttagagccactaagtctgcagttctttttgaatgtgaaacacatctgtgctcctcttgtctattttttctcttcatgttttaacaaaaaagaaaaaaagaaaaaaaatcccatcccttttgtacatactcctgtaaattgttttaaatacttgagccttttcttggagggggagggaaggggtgagaagatggagaaaagccttacgtttccgtttcttcatcggctgattggatgcttacagggttctcttgtgacatgtataagtgctgcttacatcactcaacagcaacagaacgtggtagtggagtagctgttgcccttctccggctgtgtgtacagtatgtgtggaataaaaaagggaaactgttttcacaagctgttgtttgtttcataattggatcagtccatagctacccacattgcactgagcttgccagtggtgactgccaggaacgcctaggatccactttggtggctgttgttgcagaagactaaactgctttggactatttaacgattgcctgacagtcgagtgtttccaatgtggtcgtccagtttctatggccttgctgtggactttcccctctttgtcggtaacctttcgcctatggcttacagttcgacatttaatttattagcgctgctctgcacccctcctgccgggaggctctgtgtggttattgccagttctttgtttacttttcaggtttgtactacaaggtttaataataaaaagttttttggacattttgtctgtcttgtgggaagggattgggctttctttggtcagtggggcaggggctacacatcctctcttaggccagggagcggagctacagaggcatgtccgtggcactgctcaccactctgggctgcaactaggctagctcatgccctggggaccttggggaagcaagtttctttcccaggttgtcacctgatgctaggtaaaattaagttcttcagatcccaatttgaccactattggttatgctaacagactctgcctcccagtatggtagggcacggtgcccacatagcctggcctaggtcctatttccttcaaggccctctccagcagacctccacacctgtgtttctttaggaactcttggtcaatcagctctaagcacctgtcaaggcaggggcctctatacgacccatatactcaccagctgcacagtgtttattccataagctttattgtgagcgcttctctaatggttcttacatcccattagcaagtgtgtaaaattgaaaacctctaagcacctggctttgcaggaggattctgcgcacagctgacaagtcacttaaatgtcctgagttgagtcacactggtcactgtcatcactgacacctggggtggactttctgtcagtgtgtaatgtgaccaaggccgtgtccacctgtacctcctcctcatcagactggatgaggggggcatcagcagtgtccaggtcagtgcaggcagagggtgaggcaggtggctgggatgctgattctgagggacttggaatctgaagactcatttcattctgattggggttggattccatctctgttgaagaaagtagaaaaagcctctgattgcatttgggaactgccattgaggacaactgcccgagatcctgtccctcagcctagttgtagggtccacaagttacctgaccacctattctattctgtggtaagatgaagaagtctttaaagccatgtaaggttcagttctaaacacatggtaaaagttagccaccaatccttgataccctagctccttcagtttctattcactcgtgctaagatgacttactcggcctttagcattcctccaattttataaggattttcaaggaatcaagatttttacacacagtcagtcactgactaaatcatggctctgcaaagggctgagagggtaaggtctgagaaatcggaccctcactactgtgggcctatatatatatatatatatatatatagtggaggccgagggttgcccttccctcatgtatgtgaaagaaactgaaaagctagctgtgcagtggtgacaaacaaaacaacctcattaggaaagctgatcagggttaggaagcaactgctcagtgaacaggaaatgacagtgccgtgtgagccacacaggagagctaacacttccccagtcctctgggacctgaccagctcactggaagcagtggaggaggaagaagaagctgggctaagagatgtgactttagtgttgtcattactcttacccacaccaggggacatcacaatgttgtcctctccgccggagttcaggaagacatcgagagcctcctggtctgagatgtccatcaggtccatctgctccagcacgtccacattcacttccatggatgacatgctgcccataggctctgataaaagagatggactttttgctcttcatggtaatggtgagtttcgttgggctaattacactgtttgctcctagttcatgctttcaccaaatgacattccagtcttgaggtatcctaacttatcttttcatgtaggtggtatttggaacagggtgctcctatagcatgcaggggtaggtaggagctgtcttcatgggtcagaaggaagtcaggaaattccatcccgtgtcaatgtaaccaaaattgcaattaattctacagtggtagcatgagaaggactcagggccacagggcttgagtgcccaaggcccagtgcctcttagtcctaggtagtcacctcccaaccagcagccaagaaagtaatgctaggagtgagaacgggcctgggatggatacattctgaaccttggacttcacagatgaggagatagctgcagagcaaggggcagcacaaacaaaaacaaacacagcacagatggaaggtaagtcagtgtgggtgaggctcctaagatggaccaggtaaacgagttccccactgaaagttaagctttgcacaaactgaagatgggagtgagcccagcagaaaataagtagatggtacagtcagccagtcagttcctcaacattaggtatgagcacacacagcctcccacacatgaggatggagttgggttagctctacatatccaagttcacgaagagtgaataatttcgctgatggttctgacagtgtcattctgagccagtcaggataagcttaggcaagatggacttgaatatattggatgtcaccaaagctttcacacctttccagtgtgaaacccatagggacaactgcactaatgtcacagctactgtgggtggggttgggagtggcactcccccttaggctctcgtgccccagtggggctcttgagagtgtggctgggtgctgtggtgccagcagtcttctggattcgagcccagcctttgacctcagcctggaaaagagtaatgttgagcttgtaggacaggccaaactattcaccacatggaaatgagctatacctgcctagcctagtgactcacatctttatcccagcacaggggaggctgagactacagcatgacttcaggctatgtatctgtatcacaatcgctccagttttgtgattctcctgcctcagcctttagagcaccagatttattcacagctgttgattattcattatggttttagaaagctgtcctaaccgaagtagaaaaactttcacctaacttatgtcaagtaagtattaacaacatcaaaagttgtcaaattcaactaaaatggaatcccaacaggaaattctcagcgttggatgtcttactaccgaataaagaaaaatgagtctatatttctcatagaaaaaaatgaccccattggtgcctttgatcttagcactgagaaggtagagactctgagtttttcatattggcctggctgcagtgagttccatgctgtacagggctaggtagtgaggtcttacctcagaaaaaaagacgcccaaaaaagttcagttctcctgccatgcctcaggtgttgcaaagtacaggcatatactgccgtgcctggctacaaaactgatttttgccaaagcaaagatgagccgtggctccctggagcccagaaacaaacactagagcagagcggccagtggtcctgctcagtgtctaggatatgtccgtccgccatccgcccagggtaacctgagagtgatgtttcccaacgctgattgcagaaattggtcagttgtgagtcttagaaacatattacaattccaatcaaactaagtttactgaagaactaggaacaaggacaaaggaggtaatggggcggggactattgtccaccattctctgcatcggaagactgatgctgtcctgtgtggggtagggagctcagcggtgccactgcctgtgagatccagtggaacacctttaacccacttaaaagtcttgtccccagacattgccagatgtcccatagagtctagctagtacttaatgaaacacttaaaaaagtcacagtggaatgtcctcaactgtagttaaaggtttagaacacacaaaggtgtgtaaggtggccagagcaagtcaccttgagaaatactgttttatcagagaactgtgaaagtcaacatgtagactcagtgaaagacttgcttactgtcaaaggctaatggtttccttccacagcctgatggtgaggccctattcctgaaaagagcactaatgtcactgcatcagcaattaagctggcgcccaaccctactgacagcctctgtggtgctgggagtacttcgcaggtgtggtgggctgaatgagaatgactcccactggcttctttatttgagtatttgctttccagttggtgaaattgaggattaggtggtgtggcattgttggaggcgtgtcagtcactaggatgcacgccattctttagttctgtgagtgtgagtctgtgcgtgcgtgcgtgcgtgcgtgcgtgcacctgaggatccagatgcttcatgaagtcccacgcctgcctgaacgattgcatgcgctgtcacggtcatcatggaatccaaccttctgaaactgtaagcctcttatccgagcaacagaaaactatctaagacaacatgctagaagaggaggaaataaagtcatccgtgtcacccagctacaaacccagtgacatacgggtgcgatagtggcccaaaagttatgggagtgaccacccacttttgaaaaatcagctttgaggttcatagcttatcttgagactgctaaaggggtcccagatctgagactagataggtcacaaacctagaaggaaaatgatcactatgattatgctagaggaacagaacaataaactactgctactgacattgccacacacagtcttactcaactctatcagagaaactactgcttgcttcttgatgggtgttaacacagacccacaaaaaacaaccctacaacataagacagaacattcggtcctcagtagggtgtcttcacatcccttcttgagatttagacatttatatggaagaagagactgaaagattgtaagagctagaggtggcggttgactccaaggaaacaaccccttccagtcacaactggactaagacacatgaactcagattgctacagaaatggacaaggtctgctcacgttcatgccagacaaaatccagcacagagaagaggaagtgggaacaaagttctctctctaaccaggaagctctttgtaactgacagatgctggggaaggggaaatcagttttctgggatgatgttgggtacacactccagggcatgcctgatgggggcacagacttcatgttgtgtggctgttttatttaggaactttttgggctttttgttgttgttgttgttttctccccagagaaaagggagggagggagggagggagggagggaggggannnnnnnnnnnnnnnnnnnnggagggagggagaaacatgaagttggttggtggtgtggtctgaatgagactggaacccagaggatcctatatttctatgtttagttggtaatctgctttaaggattagcaagtgtggcactgttgaaggtatatctttgttggaagaggtgtgtcactgaaaatgtctcttttaaaaataccctgaatacttctttaatgaaagggaaaaccaataataatccataaggaactcccctagctaggagctttgtctcagagccttctgggacactgagctcaatcatggcagtattttctcctgtggacgtcaacactcacctcattctttccgtgcacttgaacaccagaaaggttagtctagtgggtacaggcagccctagccccatgggccttaatctgtcagcagagatccttataaacttgaaacctaacttggagccagaagctaggcagcaggcagagctgggcatctctcaggagatctgtccaaacccagagagtgttgcctagacataaaaatcaaagatgttccctgagagatgatgttgggtgcaggggatgaggactgaaaccgggaccttccatggcccactgggccttagtgcactgtgagctgcaggcctgcagtgccctgctccagggcctgcttttgctccctgccgcatcatgcatggctctggagctcacagctgaatttgcattctctcctgacacatttttggatacaaagttccatggctttaattaaaagtaaaacttgtaaaatgaagaaaagttcctattgctatttctaatctcatggaattgcctccccacgagagacattctttaatgttgactgatactctaaattaaggatcacttcgctccacccctagagatgaagatccttcctgaagcagggtattttgtctgtctgggcaggaagtctgcagcagctctccacagccaaggtacccgattactgtttaaaagtcccttccattctagctaaggcaaaacttgttctaaagcgcttgcttgaaagatacatgtattggcaacatctgcctggtttcttttttagttataaaacatattcaaatatgttctggaagcttgaagagaattattcttgagatgttcaaaaccacagtgattatcccactggacaatgctttgtacaacaaggacctatttattgtgtgccttctccttgcctagtgctaggctctatagcctcagactgcaacagtacctagtcctagctggcctctaatacatggcaggcaggcagagaagagtgcctttggacctatgagctttgggtaatcatcccatgaggctatgtgtcatgtttccctgagaatatagaaatatctaaggaaccctttcttttcatctttgcctcctctggctttataacatacatccaagatatgctggaccaaactgaacagggcagagttaaatttctcagcaacaaagagttctttacaatgttttcctttgtaagagttgctgtggtcatcctgtctttacatagcaataaaactccaactaagacaaaagttagtacccgggacctagggtattgctctgatagtcctacccatggttttgtttagtataatttgcactttgggcctctgtgttaggaaagcaatggaatgctttagggatgcttagtgggccatactagtaagagcatgaaaggcagtgttgttgagggtgaatgaactgttggggcctggctcaagaagctccagtggagaagagggttagtttgttacctatagattattcagtggagaagagggttagtttgttacctatagattattcagtggagaagagggttagcatgttacctatagattattcagtggagaagagggttagtttgttacctatagattattcagtggagaagagggttagcatgttacctatagattatttagtggagaagagggttagtttgttacctatagattattcagtggagaagagggttagcatgttacctatagattattcttgggatattttggtgaagaatgtctccttcttacctatgttcaaaaaatctacctgaggcaaaattgaagagttttttaattaattgcattttcagacaagattccaaaagagcctagtttggactgtgttctgtggttattaatgccatgcttacaaaggtctataatgaaaaaggacccgagggtgggggctggagagatggctcagaggactgactgactgcttttctggaggtcctgagttcaaatcccagcaaccacgtggtggctgacaaccatctgtaatgacatctgatgccctcttctgttgtgtctgaagagagcaagaacaagaaggaaaaagaaaaaagaaaaggtgcactaggaaggaaggaggtaaagccagtgttcaaggatataaacaaattaaagaaaagccagggggctggtgagatggctcagtgggtaagagcacccgactgttcttccgaaggtccagagttcaaatcccagcaaccacatggtggctcacagccatctgtaacaagatctgactccctcttctggagtgtctgaagacagctacagtgtacttacatataataaataaataaatctttaaaaaaaaaaagaaaaaaaaaaagaaaagccagatgacaaatggaataaaggagtagtgccctcagggcaggacccacccagctaagcgtccatacagtgaaaagaaattaaagaacactttgggtccaggtatggtaaccccagcactctggaggcctacagctctctgagttccaggacagccaagctcaggcagtgaaggaaaccatagaaaacagaaagctagtcaagttgtaattgaatgagggagccaggttccagcccaagcaaggggcagaacttgacagccacatggttctggctttagaatcaaggatggatttccccttcatgtccaaggaaagccgctgaggccaggaatgtgtcaggggtgtccctgaatagagtaccagagaggccactgcatgaaaggggttgtgagatttccagccatgactaaggaaaacaggtgaggctaggcatgtggcaggaagattttgcaaggccactgtgtgaagctgtgaggataaagcctggatacccaagatgttagggatgccagagcccaaggatacctaatggaaccagcccaagaaaaagaactgtgtttggaaaaggatttgacatcagacatggaaatgcagggtttagagtctggctagcggtcttgctttgatccagtatttccttacaggcttcattcttccatttggaatatgtataacctat

SEQ ID NO: 408 - DNA, 4071 bp, Mus musculus
tcccccgggccgggcgtcctggggcactggtacccagctgcccggctgcaggcgaatctggttttgggggaagaggaagaaaagtcggattacaagatcaaccaccaccaacaacaataaaaaccaccaggatatttttttgcaaatttctgacggctttaaattcatgaagcaattgtccccttttgcaatcagcatttggatctcagaatgagcaaggaaagacccaagaggaatatcattcagaagaaatacgatgacagcgatgggatcccgtggtcagaagagagagttgtacgaaaagtcctgtatttgtccctaaaggaattcaagaatgcacagaaaaggcagcatggggaaggccttgccgggagcctgaaggcggtaaatgggcttcttggtaatgcccaggctaaggcactaggaccagcctcagagcagtcagagaacgagaaggatgatgcctcccaagtgtcctctactagcaacgatgttagttcttcagattttgaagaagggccgtcgaggaaaaggcccaggctgcaagcacaaaggaagtttgctcaatctcagccgaatagtcccagcacaactccagtgaagatagtggagcctttgctacccccgccagctactcaaatttctgacctctctaaaaggaagcctaagacagaagactttcttacctttctctgccttcgaggttctcctgcgctgcccaacagtatggtatattttggaagctctcaggatgaggaggatgtcgaagaggaagatgatgagacggaagatgtcaaagcaaccaccaacaatgcttcatcttcgtgccagtcaacccccaggaaaggaaaaacccataagcatgtacacaacgggcacgttttcaatggctccagtaggtcagcacgggagaaagagcctgctcacaaacacagaagcaaagaggccactccggggaaggagaagcacagcgagcccagggcagacagccggagagaacaggcttcaggggctcagcccacggccgcctcggctgcggcttcctctgccaagggacttgctgccaaccaccaacctcccccttcgcatcggtctgctcaggacttacggaaacaggtgtctaaggtaaatggagtcactcgaatgtcatctctgggtgcaggtacaaacagtgccaaaaagatccgagaagtcagaccttcaccatccaaaactgtgaagtacactgccacagtgaccaaggggactgtcacatacaccaaagccaagagagaactggtcaaggaaaccaaacccaaccaccacaaacccagttcagctgtcaaccacacaatctcagggaaaactgaaagtagcaatgcaaaaacccgcaaacaggtgctatcccttgggggggcgtccaagtccaccgggcctgctgccagtggcctcaaggccagcagcaggttgaacccaaagtcatgcactaaggaggtgggggggcggcagctgagggaggggctgcggaattccaaaaggagactggaagaggcacagcaagtggacaagccgcagtcaccccccaagaagatgaagggggtggcaggcaatgctgaagcccctggcaaaaaggcctcagcggcttcaggagaaaagtctctgctgaatggacacgtgaagaaggaagtgcccgagcgaagtttggaaaggaatcggccaaagcgggccgcggctggcaagaatatgctgggcaaacaagcacatggcaagacagagggcaccccctgtgaaaatcgttctacctcgcaacccgagtcctcgcacaagccgcatgacccacagggcaagccagagaaggggagcggcaagtctgggtgggcagcgatggacgagatccctgtcctcaggccctccgccaaggagttccacgacccgctcatctacatcgagtcagtacgtgctcaggtggagaagtacgggatgtgtcgcgtgattccccctccagactggcggccagagtgcaagctcaacgatgagatgcgctttgtcacgcagatccagcacatccataagctgggccggcgctggggccccaacgtgcagcggctagcctgcataaagaagcacctcagatctcagggcatcaccatggatgagctccccctcataggaggctgtgagctcgacctggcctgctttttccggctgattaatgagatgggcggcatgcagcaagtgactgacctcaaaaaatggaacaaactagcagacatgctgcgcattcccaaaactgcccaggaccggctggccaagctgcaggaggcctactgccagtacctgctttcctatgactccctgtcccccgaggagcaccgacggctggagaaggaggtgctgatggagaaggagatcctggaaaagcgcaaagggccattagaggggcacacggagagcgaccaccacaagttccactccctgccccgctttgagcccaagaatgggctcgtccacggtgtcacacctaggaatggattccgtagcaagctcaaggaggtgggccgggccccactgaagacgggccggcggcggctgttcgctcaggaaaaagaagtggtcaaagaggaggaagaagacaaaggtgtcctcaatgacttccacaagtgcatctataagggaagatctgtttctctaacaactttttatcgaacagcaagaaacatcatgaacatgtgtttcagcaaggagcccgcaccagcagagattgagcaagagtactggaggttagtggaagagaaggactgtcatgtggcagttcactgcggaaaggtggacactaatacccatggcagcgggttcccggtgggaaaatcagaacccttttcaaggcatggatggaacctcactgtcctcccaaataacacagggtccatcctgcgtcaccttggtgctgtgcctggagtgactattccctggctaaatattggcatggtcttttctacctcatgctggtctcgagaccaaaatcaccttccatatattgactacttacacactggtgctgactgcatttggtattgcattcctgctgaggaggagaacaagctggaggacgtagtccacactctgctgcagggcaatggtaccccagggctgcagatgctggagagcaatgtaatgatctccccagaggtgctgtgcaagaaggggatcaaggtccacaggactgtacagcagagtgggcagtttgtcgtctgcttcccgggatcctttgtgtccaaagtatgttgtggctacaacgtctcagagacagtgcactttgctaccacccagtggacaagcatgggcttcgagactgccaaggagatgaagcgccgccatatagctaagccattctccatggagaagttgctctaccagattgcacaagcagaagcaaaaaaggaaaatggtcccaccctcagtaccatctcagcccttctggatgagctcagggatacagagctgcggcagcgcaggctgttgttcgaggctggccttcactcttctgcacgctatggcagccacgacggcaacagcacagtggcggatgggaagaaaaagcctcgaaagtggctacagctggaaacttcagaaaggaggtgccagatctgccagcacttgtgctacctgtccatggtggtacaggagaatgagaatgtcgtgttctgcctggagtgtgcactgcgccatgtggagaagcagaagtcttgccgtgggctgaagctgatgtaccgctacgatgaggagcagatcatcagtttggtcaaccagatatgtggcaaagtgtctggcaaacacggtggcatcgagaactgtctcaacaaacccacaccaaaaagaggtccccgcaagagagcgaccgtggatgtgccgccatctcggctcccatcctcatgaagatgccgaacccatggtcacttatatattttttgtaattactatattctagtttggagtacttgctgtaggatacaagctgtctttgcactagctctaaagaagaatttcttctggttttagagaactgattttgttttagcattaaactgttca

SEQ ID NO: 409 - protein, 1246 aa, Mus musculus
IHEAIVPFCNQHLDLRMSKERPKRNIIQKKYDDSDGIPWSEERVVRKVLYLSLKEFKNAQKRQHGEGLAGSLKAVNGLLGNAQAKALGPASEQSENEKDDASQVSSTSNDVSSSDFEEGPSRKRPRLQAQRKFAQSQPNSPSTTPVKIVEPLLPPPATQISDLSKRKPKTEDFLTFLCLRGSPALPNSMVYFGSSQDEEDVEEEDDETEDVKATTNNASSSCQSTPRKGKTHKHVHNGHVFNGSSRSAREKEPAHKHRSKEATPGKEKHSEPRADSRREQASGAQPTAASAAASSAKGLAANHQPPPSHRSAQDLRKQVSKVNGVTRMSSLGAGTNSAKKIREVRPSPSKTVKYTATVTKGTVTYTKAKRELVKETKPNHHKPSSAVNHTISGKTESSNAKTRKQVLSLGGASKSTGPAASGLKASSRLNPKSCTKEVGGRQLREGLRNSKRRLEEAQQVDKPQSPPKKMKGVAGNAEAPGKKASAASGEKSLLNGHVKKEVPERSLERNRPKRAAAGKNMLGKQAHGKTEGTPCENRSTSQPESSHKPHDPQGKPEKGSGKSGWAAMDEIPVLRPSAKEFHDPLIYIESVRAQVEKYGMCRVIPPPDWRPECKLNDEMRFVTQIQHIHKLGRRWGPNVQRLACIKKHLRSQGITMDELPLIGGCELDLACFFRLINEMGGMQQVTDLKKWNKLADMLRIPKTAQDRLAKLQEAYCQYLLSYDSLSPEEHRRLEKEVLMEKEIKRKGPLEGHTESDHHKFHSLPRFEPKNGLVHGVTPRNGFRSKLKEVGRAPLKTGRRRLFAQEKEVVKEEEEDKGVLNDFHKCIYKGRSVSLTTFYRTARNIMNMCFSKEPAPAEIEQEYWRLVEEKDCHVAVHCGKVDTNTHGSGFPVGKSEPFSRHGWNLTVLPNNTGSILRHLGAVPGVTIPWLNIGMVFSTSCWSRDQNHLPYIDYLHTGADCIWYCIPAEEENKLEDVVHTLLQGNGTPGLQMLESNVMISPEVLCKKGIKVHRTVQQSGQFVVCFPGSFVSKVCCGYNVSETVHFATTQWTSMGFETAKEMKRRHIAKPFSMEKLLYQIAQAEAKKENGPTLSTISALLDELRDTELRQRRLLFEAGLHSSARYGSHDGNSTVADGKKKPRKWLQLETSRCQICQHLCYLSMVVQENENVVFCLECALRHVEKQKSCRGLKLMYRYDEEQIISLVNQICGKVSGKHGGIENCLNKPTPKRGPRKRATVDVPPSRLPSS

SEQ ID NO: 410 - DNA, 295772 bp, Homo sapiens
ggctggtcttgaactcctgacctcaggtgatctaccttcctcggcttcccaaagtgttatgattacaggcataagccactgctcccggactaattttttttttttttttttgagagactgggtcttgctctgttgcccgggctagtttcaaactcctggcctcaagcgatcctcccgcctaggtctaccggagtgttgagattataggtgtaagccactttgccaggaccctcttggatttttatggaagcttcatgaatccagcattccttcccctagggtatatatggtggaccctttaagacccagaatccgaaagatgaggggtgggggaagccctggcgaggtggctcatgccagtaatcctagcatttcgggaggccaaggccggaggattgcttgaactcaggagtttcaggccacagggagctatgattacacaactacactccagcctgggcaactgagtgagaccttgtctcaaaaaagtaaaaagaaaaaagaaaagcagattagtgtcttgcactggggcaggtgaaagaagggcaggagaagccgggcacggtggttcacacctgtaatcccagcacttcgggaggctgaggcgggcggatcacctgaggtcgagagttcgagagttcgagaccaggctgaccaaaatggagaaaccccgtctctactaaaaatacaaaattagccgggcatggtagcacatggctgtaatccagctacttgggaagctgaggcaggagaatcggttgaacccaggaggcggaggttgtggtgagccaagatttggagccattgcgctctagcctgggcaacaagagtgaaactccatctcaaaaaaaaaaaaaaaaaataggcaggagaaagtcagagagcaactgtttcctgaggcctgtccctgagacctagcaagcccaacattataacaagagattataacaaaggctatgggaataggcctggcgaggtggctgagacctgtaatcctagcactttgggaggccaaggccagtgaatcccttgagctcgagctcaggagttcaagaccaggctggccaacatgtagaaaccttatctctacaaaaaatacaaaaagtagctgggtgtgatggcgcacacctctagtcccagctacttgggaggctgaggtaggaggatcacttgagccttggggggtggagactaatacacacataaaataatatcacacacataaaataatatcacagtcataatctattagatttggaagagtgttagagtccatctaggtcaatccccttttttcacaaatgaagaaaatgaggcatagtgacatcacaaaaagctgagatgaaacctcaagtgtctagatttccagtataatcttcccagtagccatattgtattaaataaccacattgattttatagttttcctctttgtatttgtttagaatcataaatgcctaaagttttctaggtaacatacactgtttgagaaccctcaatttcgtaatcgtgtacacatggacacataaaaacactgtctttttttttttttttctttttttgagacggagtttcgctcttgttgcccaggctggagcgcaacggcacgatctcggctcaccaaaacctctgcctcccgggttcaagctgtcctcctgcctcagcttcccaagtagctgggattacaggcatgcgccaacacgtccggctaattttgtatttttaagtagagacggggtttctccatgttggtcaggttggtctcgaactcctgacctcagatgatctgcctgcttcggcctcccaaagtgctaggattataagcataagccaccgaggctggccaaaacactttttttttttgagacggagtctcactctgttgcccaggctggagtgcagtggtgtgatctcagctcactgcaacctcagtctcctgggttcaagagattctcctgcctcagcctcctgagtagctgggattacaggcacatgccgccacatccagctactttttgtatttttagtagagacggggtttcaccacgttggccaggatggtctcaatctcctaacctcgtgatccacccgcctcggcctcccaaagtattgggattacaggcatgagccatcgtgcctggccaaaatattttttttttaaaatgaatgtttgacaattgagagaaagaccaaaagcaggaaattaataatccactaagtttcagtcacaatgtaactgccaatgtttgaatcttttctgtttcactctatgtgtctgtgtgtaggatcggaaagggagatggcactgggtttctgtaaggtgtgagtgaatcttgggttttggaaacactgagatttcagaaaacagaatataaattgtagatgtcccaatttggcaagagataagctctgtttttgtttagaaaattctatagattcatagataagaaactatgggcaaaagtgtttgatacgtagatcaaccagtatttaggcagggatcatgtctgtgaaaaccttgaagtgtgcaaggtggggtaaatgagagagtagctctagactgagctggactggtctatcatccaatgaatctctaggattctgatggtgaaaaggttattttctcctttcctgctcacttctgtggccctgacagagggaagaactagtagcttctgtggtagactatatatatatatatatatatattttttttttttttttttcttttttgctccctggagtgtttgtctccctcccctttggataacaaaatctgctctacccgccatgtccatggtgggaaaggagttttcttttttgttttttgaaacagtctcgttctgttgcccaggctggagtgcagtggcgggatctcggctccatgcaacctctgtctcctgggctaagcgatcctcccacctcagcctcctcagtaactgggattacaggcacgtgccaccatgccaggctaatttttgtatttttagtagagaggggttttgccctgttgaccaggctggtgtcgaactcctgggctcaagtgatccgcccgcctcggcctcccaaagtgttgggattacaggcatgagccactgtgcctggccgcaaaggagttttctttggcgctatcatctctgctggttggagaggatgacagaagaaggaaatgctgagatgaatggagagaaaaagagaatgaaggaatgaaggaaggacgatgacatcctttgtagccctgaaactcggactctgggtttccagataggtgagccaagcccctcttcctttttttccataagccattttcatctgggctccattcacctgcaactgaaggcatcctgattcatacagctcctccccctttccctgcctactcacaggatccctgtaatccctatacctcagtttcctcatactgatcccctgtggattagttgatcactgataaagttgatttttcccaccaaacacagagtgcagtattattataaacagtaacgtctattcttaggaactgcaggtttcccgtcttggctgctttaccagagtttctgaatcagggccagctctctttcaataacacaagacaatctaagcagaatagtaatgatagtccaaaatttttacacaatccaaagtaccagcgactttcagtgacttgtataaacaaggtccacagacgaccagtagggttgaaagcatcattttattgtatttggtttgtgctgtggcattttattgaggcttgacaaataagactgtaatttggggacaggaagcactgaataacaaaaagaactaatgtctccttgacatcactcactcttaagagggctgtttacatctgagtttacctcctagtgtgttttaaaatactcttgcaaatctcagttggctcgaaatagctgttctatgttctttcaatggaagcccccaccttctgagtacactggttcatagttatttataaacctgatgtcactcaaatattatttttacatccctctccttactccctcacatatgaagatagacctatataaaattagaaacttcacataaggtattcagtcacttaggtaggaattattgtcagtcagcaatcatttatgaagcataaattcatcatattgggtgaagcatgtctgtaaaactgttccgtggtaaccagctctttcttcttctttttttttccttggtgttctgaggcaatttaggaaaagcaatgagggctgggggctggacttaaaaggtctgtttttttaaatttttttatttttcgagacagagtctcgctctgttgcccaggttggatggagtgcatgatctcggctcactgcaacctccacctcccaggttcaagcgattctcctgcctgagcctcctgagtagctgggattacaggcgtgcaccactatacccagctaattttttgtatttttagtagagacggggtctcaccgtcttggccaggctggtctcgaactcctgactgcatgatctgcccgcctctgcctcccaaagtgctgggattacaggtgtgagccaccacacccggcccagctctttctttctttcttttttgagacagagttttgctcttgttgcccaggctggagtgcaatggcaggatctcggctcaccgcaacctccacctcccggattcaagcgattctcgtgcctcagcctccagagtagctgggattacaggcatgtgccaccacgcccagctaattttgtatttttagtagagacagggtttctccatgttggtcaagctggtctggaactcccaaccttaggtgatccacccacctcggcctcccaaattgctgggattacaggcgtgaaccaccgtgcctggccaggtccagctctttcttaaaaaaagatttctgtgatcaaattagtttgtaaaactacatgcccctttggggatttctaaaaaccctacagtaaagtaatcgagttatctttattataaggtagcagtctgcaaatttatttcatcgaagaattattttcttttcagtcccacctagtaacatttcatggaatcatatgtcttgaatcccattttggaaaaccagggaggtggcctgcactgggtatgtggagccgagagtcctgagtttgacccttggctcatccactcaactggttgtatgactttgagcaaatcacaacctcttaatatttcattttcacatttgaagagtgaggacagtaatacctgtcttgatctaagttgttttatggtttaaatgaaattattatgacagtgtgctttaaacactattaaagttatacaaatgaaagctatcattagatagctcggataaatatgaggtctttttggaaattaataacatacaagtgtaaagaaacttaacctagcaacttttactgaatgattgtggatttgagtttacttaggggccagcactgagggggaaaagcagcataatacaaaggtaaaggtaggactagagaatgttgggtgtagaaatgtctttgggaaataactgaatttaaccctctaatttttaattttatgtttgtagagatggtgtctggctatgttacccaggctggtcttgagctcttgggctcaagcaatccttccgctttggctttccaaagtgctaggattagaggtgtgaaccaccacacccagcctaacctgctcattttataaatgacagacccaaggcctatatgaggcaggtgaatggcatatggtcactcagagacttaatattagaaacatctgattccctcattgccaatggctgcctcaatatgagacaaatcatggccccatccaattttcaattaagagatacaagatacttacatgacataatcagaaaaaaatacaacagagaacaatttttttttgtttgtttttgacagggtctttctctgtcacccaggttggagtgtaatggtgcaatgtcagctcactgcaacctcagcctcccgctcaagccatcctcccacctaagcctcccaagtaactgggactacaggtgcacactaccatgcctgggccaccacgtccagctaattttttttttttttttggtagagatagggtttcaccatgttacccaggctggtctcaaactccagagctcaagtgatccttttgcctcggccttccaaagtgctgggattacagatgtgagtcaccacattcggcctcagaataaaattttaaagctcaaaaattattgccaaaataggaagggcaatgagaatccaggaatgagtaggccaagcagcgaggctggattggaaatgggcctgaatttggggccttgaagaacgtataacactacattggatttagataatgcaagaggaaaactagcagagttccagaatggaatggaagatgatggtaggagactaaatgttgggcaatagtctaaatagttgggcattatagttttggtgaaatattcaacagtaagcatttactggacatctttcaaatttgatgaagtttttggagctttggagggtatgagaagtagacaacatcatctctttagggaatttcctttttacttggagagaagaactagaaacattaaaagtggagaatgtaaacaaataggatgcaatgcaaaggggtgaaatatgcacttctttaagtatgtatgtgaacccctacacctacttcaaaactccttaacacctagtcatctcagcaatgtgttctttttagcttcttttctacattgctgatatagtactttttggaggtatcacaatccattgtaaactctgccttttttttttttttttttttactgagctgtgagcttcctgtgtcctcagggatgaggacagtgctggcatagagtctaatacaatcaatgtacctagacatgttctcatccctgcccctccaattgaagaggtcaaggctttgagatgtgaaaatcatcataagaaaagctgcatttgacttacagaaaatgaaaaagaggaggaaggagcaagaaaagccttggatggtcttgccaagatggtaggggaaggaagttcattaggagtaggttactttcacaacaggaaaatctttcaaccactaagaaggccaaccttttttctctttcagggaaaacaacactaatattattcaaatcttttggaaatgagcaaattccttcctttcccctctgccctgaggcctcaactttacacaatagtttttcacaccaggtgacctggagctggtagcctggcaggggagttcgcaagcccaggactgagaagtccaggccccagggctagttaggggaacagaaaagaaactcacctttgttcattaatatttgcctagggaatgaggtatctgcgttaaacttacagaaagctggttaaaatcttaacaacgtggagacgtggagattcccagtatgccagtcctaatgatcagaaagtttttagaaaacaccttgggtggccctactgtagtctgccccattggatccttcccaggaaatggcaccagcgtacaagttttgcagtattcagggcacaaaagatcatttatttttccaattgtgaagtgaacattagataaaattatttcatttcagattttttgaaaaggtaaaaataataaggaaaataccctctcgaaaaggctttttatttcgtttactgaaagcttccaataacgtgcctagttttaaactaggttactgttatttatcacataatcatccccacaggtttgatcaccactaatttgcagatgcggaaactgacaagctcagagaggctctcggttgccttttgggaagtggccaaggcgcgatttgaatccaggtctcttacctccagtttctgagacctttctagacaccaaggttatctcttcaaatactgctgcaagtaaacagctgtgtgagtatctagacttttgaagttagcagactctagggaataggtagaataaaatatatgggtatgtgttcgcgggagcgcttctgccacgttttattccgaggctagcctgagagatcatggaaaacattgcttctccaaaaccacagcgaaaaacaaggaaattaacaaggcagaatcgcgatgcgagacttgacaaagttgttaataaggcgaaggcccaaagcgctatgccagggcctgctacttcatttgtttcagcgattaaaccagcacgacagggggctggaggcaggtaaaaagcaggctcttgcgtggcccggacagttgatattcctggcactcggtgttcgagatgtttccttacaattgcgtgtctgtgcggctcggtctccatattccactcatttttgtctcaacattttgtggtattttatcacaaaatacgcccggcaaagcaaagatcccgttcagtctctttaaacacggctatcttttctcaggaggcagccgccggggcttcactcctgggccaccagcgacgtcctccaagcgggtcgagcggaggcgcgttcgcgacccaggggcagcgtgccgagcccgggcgtgggggggcgtggcctttccactcggcgacccccggccaccgcccaccccgcgcgtgggggcgtgcgcgactgcggggcgcggagaggggtgacctcggactaccctaggcgcccgcagcacgctctgtacacagacgcgaggcgctgtcctgaggtgacaccggctgcacggcacaagcagcaggcgccgccgatcaactagttcgcaccgaggattcctcttggtgcgtggcccagttttccttaggacgggaaccaaaccccaacctgacaccgcccccctcaccgccacgctccgaggccttccccggggaagcctcgcgtccctcccccgcggctccgggccgcacgcgcgcgattcctcgattccacaggcggttcgcgccgcgggtgggggcggggcgcgcggggagggggctggcggccgccaggggaggggggccggggcccggggggcggaggagggccggcgtggggagttcctcgctcgcggaccacacgctccgcgggccaatcccgagccagcctctagcagtgtcgcacgcgggacacgtccaagcgtttgttggcacggccagtgagggggagggggcgaggaggagggaggggagttgagtgacaggctttgcggggcaggctgggaattgtagttcccagcttccgtggccatagccattttgtagtcgggggactacaacttccagaagatcaaggggaccattctaaggtgccccgggaataggcggctctccccggggccgggcgtcctggggcactcctacccagcagcccggctgcaggtcgacgcgaaggcagtggcgggggctggcgtggggcggccgtggggtgagcggcaggcaggggaaagggggtgaggtggagcgacggagcgtgccatgcattgagctagggagcctctctcaattccacgcctgggctcggcgtgggagcgacgcccgagggcttgcctgggaggggttcgtcgaggtcgctcgggtgtctggttggccaggctgcgggggtgccctggactgggccaggggcggtcggcaccaggctaagcgggcgcctggcggctgagcggtgggagttttcggctggcgcccggcggggaattatccgaggagccctaacttgtataaaagcagagtccatttaaagttgggctggatagcctctctctcattggttagggggcttggaaaaaagagactcggcgagccctcgctgtggtgctgccgccgccgccgccgccgccgctggagttgactcttctgctcgcactgctgctgcagcacaaacgtgacttccaacattttttatttatctttcccttttcttttccaagatgtaactacggatcagacactaaggaccttcacgtttcgctgatgtagtttttggaggaaaaaggggggggagtgaagggcgtcggtttttttttgtgtgtgtgtgtatgtgtttcgggggaaattttccattatgagtgttttactaaagtgaatttttttttgtttgcttcgttcgtctttggctctttttttttccttcccaatttcggatttatttcaaggcgaatctggctttgggggaagaggaagaaaagtcggattacaagatcaaccaccaccaacaacaataaaaaccaccaggatatttttttgcaaatttctgacggctttaaattcatgaagcaattgtccccttttgcaatcagcatttggatctcagaatgagcaaggaaagacccaagaggaatatcattcagaagaaatacgtaagtgctcctaacaacacatcctttgacttgcagttttaagcaatggctgtgaatgtcaagtttatagataattctgcctctgaagggttttaaacacagcgtccgataaggctgtttcttttttttctgaaagagggcttttcaagcaaagtggtgtctgcctagtttggttgaaaaaacagactggtgtagagatacctcaagtgaataaattgacctcgaatgacacaaccataatctacttttagatgaaaggcaagggattttggtggagcttgaggtggggggtggctgcggtaatgtaactaaactgcattctcaagcggatttggccccgtattgcactttgcatgcaaatgagcctgtgttattattattaatgttatttggaaaaatcgtgtaacgcatgtgtgttggaagccctttaagttgcgatcgagggtccgattatggcgatcttctctttgcactggcacatcaaatttaatgtctgtggtcgttttggcttatctggtttgcaacataaaccagttgggaatcatgttacagcgaatgcatttgttgggattgactttaataatgaggctggttttgtttaaaaaattcatggtttccagttgtaggggaaaaggacacacactatggctaatgtttttaagtgtgtacgtgaatgcatatgtaagtaactacaaataatttctccctgttaactgggcttctgaaattgggtgattattcctagatttaaatggcttggaatagttaaatttgttttgtgcatagtacagctacgttttgattggcatggggagtgtttttgttttgtgtgtggtggcttttttttttttttaagtttgaggggagggaggaaagggggaccgagggattaaccaaatatgcactcgagtgatctgtgattagctgcatgctttaaattaaataactcttttttttttttcaaaaaaggccaaatgaacataccttaggaataatgcaacgtaagaggaaagtttatttaagttgggtagacaaattggtgttaatattttccctttttgatcattgtggtgtgtgtaatgagagatgaccttcggggcactggttttgtaaaaaaatatatttaatggaaaagctgaatgcctcttcaagagagctgatccttatctagacacgtcaacttcaactatgaaagaaatgcaaggttaaataatcaagcccaacttagaaagctgttccataaagaatttaagaattaaaatacatccgcattgcagagggctgggtagaatgcaaaggactagtttaaactcgggctgtagaaactgcactgaggcaaccttgtcttggagcgtggacgccttcccggggcacgtccgtttcggatgcagccacaaagcaaatggggtagaacttggacgagaaccgcaccccgcctcccattccggacctcgttgaggtggagagcagcgtggggtgggttttctttcttattgcgggcgttcagcggatcgtgtctccgagtccgggcgtccggctgcaagcccgtggctggcggcggctgcgggaggcacggcacgagttaatgcaccgggagcagagccggtgttcccgacgtcctcgagccggctgcgaaagggacggcccgcgggggtcgcggcaggctgggccggggctgggcgggcgggcgcgcgcgcgcggcctatagggggcatactccgggctctaggcgggcgcgcgaggcgggcaccggtctacccgggccggcttgcaggcgggcaggagggcgggtggggcgcgggggtggcgcggcctgcggggcgcggggaggggagagcgcgcggggagggggtgggagcgggggcgggggcgtgggcgtgccggggagggggcgcgcggcgcacagctgcagcgggcgccccccaccgcgcacacggccgagcatggcggcggcggcccggccggcttcccgcggccctgcctgcgggctccgacgcagtctcgagagcaacaggttaagccggcgagacgtcagcgcgccccctctccgccccccggttcttcccccgccgcgcgccggcgccccagtcccttcttccctccctccgccccccgcggcgctcggttccccgacgctcccggccgcactctgttgtcattgtgacgtcacaaagggacgggctcgggtggaaccttcccctcctcctccgtgacgtcaaaagtcgggcgggaggctccaggcgcggcggggcggcggggggaggagggagctgggcgggggcgggggctgccgcagagccgggctgcggcgtgggaggaggaagaggaggaagatgcgctcggcctctgccttccgctccggagcgtcgcgcttcccaccaggtgagggccggggagccgtaggtccccaaaggagtgccactggaccctgttctgatgccacttgggaagcggggagcggggaggaggcgcctcctttctgcaggaatgttttcacttcctctgttccaggtctcctgatggtgttgcattactagcgtggtgcatgtgtcccctctccagtgcttatgtaaagaaatgaaagtattcagggaaagctgtgctttgttggaggaccgcgttgtggatttggccaccttgtcacttgaagtcgtgttaggggtgcttcagcaggatgtggccggatgcctttcatgatgatgctgcacagcagcaactgttgctctttctggaagctttgtggtactacggtgggggggctttcctttgctgtgccggctctgtacctactgactgttattttggggggctggaccaaaggaagacttgtcattgataaatgtactgagaagagcacaggactcctttaagtctcaaggtgctctgggcttagttcttctgagcagggaaaccagaggctggcgttctgttttctcttttgtaaaatggaaaaatacctgccattgccacttaactaagtcactgaaaagatcatgtgcatggaagatgtaaaacagtatgcctctttataagtaaggtggcattattacttgagctggtggaaggcagcacgtttcccacaattggtctcaaaagcccgggatgcctgctgagttgccatttagtttattaccttagcaaagcagagttgggggtgcgattgtcgatagtaggctttgggagaaatgattgttatatttcgtaataaatgatgtccttgagaaactcataagttgcagtgtaatcctgtcttaattgtgttgagcacgactcccactgcaataccttaaataactgaaaacatttgcctttgaaagccccaatcgacttggacaataaaaacagttgcatgttttgctctagagatattttctgccgtttccatcattccactgcctggttattcctagggagaataacagataggatactggggcttcaccactatttgatcaggtatcagtttgaaatagagaatctctgccttatgaagatagtaattcctgtagttagcatgaaaacaaattgccagtttgattttctaggacagctcaagcagaatttgtaccactaggctgtaagttttaagtatctaattttctgatttgaaagtgtatgatttaaaaattggaaaaagtttttgttataagcttcaaaaggatttactataattacaactacgtaaaattacaaagaaaaaagtaggaagaacacaaaatatacagtggttggatttatgaggttttttgttttaaaacttattcatcacaaattgttcagtcacgttattttacagttggtggggtggtggggaaatttgcacgttattttattgctgtattttttctttcctgggatgtttacgtggcttttcagttacttgtttctagtagtggaaaatcttgctctgtgttacttaggtgcagggcagtggcagtttagctcctatcactgtacagggacagtatggaaggaagacacaatgaagtccaaagtgtcactaaaatttgaaagaaaaattatgtcgacaagtaatccaacttggtttattatccaggttatattattttacagtaggctaatacctaacttgtgtgtccctgtagccactggcccaaatagacaactagaattatttggtactcggtaatgcctgtttcctcatagtgggttaaaccagtccctgttgctgggctgaaggctattgacgcacttccaagtgccttggaaataactccagtgttaatatataccgtactccaaatgttaaactttcctccttcagaacaagacaatcttttggagtatataattggtgtctgttaccttcaaaatggaacttttttttttttttcagagaagacacgagaatgtcatattaaaagcgtagttcgttaaaacacttggtgaaggctaacctagagagcatttgtttttttgtttccttttttttttgagacagggtcttgctcagccacccaggctggaacgcagtggttcctcactgcaaccactgtcttccgggttcaatcgattctcctgtctcagcctcccgagtaggtgggattacaggcaccccctatcatgtccggctaatttttgtattttagtagagatggagtttcatttcaccatattggcctagctggtcttgaactcctgacctcaggtgatctgcccgccttggcctcccaaagtgctgggattacaggcgtgagccactgcacccagccagctgaacatttttaagctagtggtttgcccttgctcatgatggtgtgaggactcacactcctgacattgtctgaattctggctgcattgctctgatcatcctgatgttactggtccacgtctcccccaggattacagtagtagcagctctactaaccaccttttgtctacccatcctgcttgccctgttggctgcagtatgtcctgactgatatcccaggatacaggtcctggccacctctgggatgtacctctgtcccctttggctttcacccagaagtcttgccaagtgtcagttgtttgttcccaaatctggttattccagttgggcttattattgtaattacagttaagtattatgtcaaccttgaaacagtgtgaaaaagagcgtggtggctcatgcctgtaatcccagcactttgggaggctgaggtgggcggatcatgaggtcaggagttcaagcccagcctgaccaacatggtgaaaccccgtctctactaaaaatacaaaaattacccgggcatggtggcgcatgcctgtaatcccagctactcgggaggctgaggcagcagaattacttgaacccaggaggcggaggttgcggtgagccgcttgaacctgggaggcggaggttgcagtgagccgcttgaacctgggaggcggaggttgcagtgagctgagatcctgccactgcgttccagcctgggcaaaagagtgagactccattcaaaaaaaaatgtgggccagacatttttaagatgtttgggaaaatctgaaaggactgtccacacacattgctttgcaagtgattcccttttaagaaccaaacttcagttatgcccagacttccccaacaatcaaaacagcataatgtagaacaacagaacgttcagagacttaagctcagaaagaagacccatggcctcatatcaaaaaaaccgtaattaaaagtagatttgtctgtcagttaatacaaaatgttagggaataccttttttttttaaaaattgtttgttatctaacaaacttgttcccattaactaaccaacttctggttcttgtcatctctgataagagtgcttccaactgtgtttagccttaatccccgcatgctaaactggactccctgtctgcttcatgccatgtaacatgtaaagtgtggatcagtttaaagtagtcctactgaggtgattgtattacttttggagttaaaataattgtgccatttactgagtggcagggagcagaaagattagtaattttgcacctaattcatggagttcagaagcttctatcttgtaatctggcaactttaattatatattgttttacttatgagatattgtggaaggtctgttccattttaaatccttaagccttacctgttaataaaaatgaaaccaaatgaatctgttttttcatgtgctcaattatctttcgttttttttccgtcctccagataactgtactctttatatcctgtgactccctaagacaagcctcaattgcttttccaggcccccagtctttgtttttctgattccttttgtccataaaccttttccatacttgcctcacccttgcaggcatcttttattctaggaggtgagaactccgtggtatctgtctacatttttgtagaagaagagtgagcgagattttattctcattatccttctaggttttaatctttcttgggacttcagacaatcctataaccttctgccagcttcaggtttttttaataaggatttttttttttgagacagaggagtctctctctctcacccaggctggagtgcagtggcgtggtctctgttcactgcagcctccagctcctgggttcaagctattctcccgcctcagcctcccgagtagctgggactaaccagcgtgtgccaccacacccggctcatttttgtatttttagtaaagacggggtttcactatgttggccaggctggtattgaactcctgacctcatgatctgcccacctcagcctcccaaagtgttggaattacaggcgtgagccaccgtgcctggccaaataaggatttttaaaatgcagttctgattcagaataaaattatcgaaagtggagctgacctgtcattttgctcttggtggaagactcatgtttccaggacttcctgttcctgtcacttcttgcaggtggcttttgtctttcttgctctcttaggctgtaggaaagagcccacgcagattgttccagagggcaaagtatagatcattcctgcgtgagcagcgactggcagctcgactaccactctgggtttctggttttttttttacacttgtaccacagtttgtcttgccacagattttactattttaagggtgctgcccacctctactggggttcttttttccatttgaagaaatgtcccagaaaagcatggattatagaaaacacctccagatgacgacacaacacccacttctcttaacgggattgtgaagagaggactcagtcaattctgaaataaccgcctacattgtgagtttgtctgagaaaaggggtttttgagtccattttatagatgagacaagtaaggtgaaaaaccagtcagatggttagttttctgaatttgctccccccttttgagttcagaggacatagaagtaacatgaacgatcagtggagccccaaaaaggggagaagaaaaggttgtaaaagggactgttggcagcctttggagaggctttttgcttgggaaagttggaagggagggcagttttgtcagaagtgtccgtcttccctgcatgtttgtatttgttgttttttgaagaaccagttggtggagctacccccttatacccagctggctgtctctttgagtcatcattggaagactgacatcccgtgtcccttgggactggatggtttgtgctcttctagttttacaaatgcccccaccacattcttgggtgtatctgaggcccagtgtgggctgcagttctccagacttgcaggaaccagtttgatttcccagggctgttgactttttcttgtacttgtatcattgcccctgactttgaggcttaggggaccatggagcactggggaaatcatatgccctcagtcctcactaggggctgggccatccattaaacaaaggctgtccagatgtgttaatgaggcggtgtgagtaatgggaacattatacatgattacttacataatcatgggacagatgcgggtgttagagaaagaggaaccctactggtagaagtttttgagagctattcttgagagctggtgctgcctaaaaggtctcaattggattttaagttctaattttgtaagtctgtcaagctccaccacccatgaagaggaaggccagtgaacactgaaatattatcaacagcagtgtttatttaccatgctcctagaaggttaacaaaatacatagccacagggccgggcgcggtggctcatgcccgtaatcccagcactttcgaaggccgaggtgagcggatcacttcaggtcaggagttctagactagcctggccaacatggtgaaactccgtctctactaaaaatgcaaaaaagttagccaggcgtggtggtgggcacctgtaatcccagctacttggaaggccgaggcaggagaattacttgaggaggatggaggttgcagtgaggtgagtgagactctgtctccaaaaaaaacaaaacaaaaaacaaaaaaaaaacaccacaaaaacacacaaaaacaaccactgtgtaaccacagttttgcccctccatactcccagtaagagtcttccgtcatacacattggtaaactaggaattctttttttttttttttttttttgagacgagtctcactttgttgccaggctggagtacagtggcgctatctcattttcctgcctcatcctctcgagtagctgggactacaggcacacacgaccatgcccagctaatttttgtatttttagtagagacggggtttcaccctgttggccaggatggtctctatctcttgaccttgtgatcagcccgcctcagcctcccaaagtgctgggattacaggcgtgagccactgcgcctggcccaattaggaattcttaacagtaactttttttcgggggaggtgaggaggaggagtgaaaaggataggttgtgtgactcttgtctacctggagacctggtttactgggacaggagaatgtgggagatcttctgacacccagtttattgatctcttaaaatcttggtggttctgtctccattatttcccagccaccattttggtgagagcttggtctgaagtggtagtgtattatctgttggttctctctcggtttcagccagctgttagagtgtttggtgcctgtgggggcagaaacaggtgccaggaggaaatgagaagggattagggctgagcatgtgtttcttgcatttagtccttctataggtttgcagaagggggctgagtgaatgcttattctgttaagcagcagacttttgtgctttgtgtatatgccttattactgctactaaatggacctaagtaatgaaatgcctcagatttggacaggcttgtgaatatatggggtacctctgcagtaatggacaaggttgggaatgtgagcctacttcaagtttggccttgtgttaaactggctgtgtgactccaggcaggctatacaacctcgctgagctatttcctcatctggacaacttatttcatgcacttcacaggcttgttgctgggagaggcaggggaatttttgatgtgaaagcactttgtaaactgcatactgctgcacaaatgctcaaggtattattacccagttggaaatcaccaacctggagacatcaggcctgccggcggccttcctagctgactcagatataaatgaatcaaatgaattctgcactttgattcttaataaagcaagctgatagcaagtagcagatgcacattgggaaacagaacaaggctttacggattagaaggtgatgtaatcaccttctacctctgtcctatattagccaacacttgactcctaaatacacctggatggtgaattggaaagagggatagattgagaattaagactggagtggcactgaatctgtgcacgaagatgtttaaagaagacatagtccttgaaattaaaaatctgattatgatgtgaacacaattctttagtggctctctggtcctcaggatcgaatctaaaccaactttgttcccagcccttcttgatgtactctgggcttatcctgccacccatccacttcacacatccggggcttcagctgagcccagcattttattcctctacttgcttggtgaatggattgcctgaggagcccaccgtgtttgtctgaagcctgtcaccctgttcaccccgtctggcagagccaggctctttctccctgttggctggtctcctcgcactttatttttaggtgctggagttatttgcttacatgtctctcaccctattaaccccacaagagtaggggctgaatttatgtcattgtaggtcaatgttaatgtctaatacatagtatacattctaggaatatttgagttcaagtttggtggagtatttcgagtactacttagtagtgggagggaatcggtatgaatctagtgcaaaaagatagacttaactgatcacaattttggacgctataattttatagttgagaattcctgaggtttctagtactgttgtaaagtgacctgcttgtggtcgcatattttatcagacacagctggggcatgaaatccaggtcccgatacagtagaaggccctctctgttactgcctttggaaatacttttcttttcagggggattttcagttattcatggtaactgcagtaattgattcattttcatggaaaaataaaatccacgtgtaatccccatacctaattaagccaatagcattttactgttgtgcagatggccttttttgcttaataagaagtgattcaaatcagacaagtactcaaaagatagaaatcattgaaatcacatactggacattcctctacttgcacatacagttttatatatatgggccatactctttaagtgctgtatttttgttacctcctgtttgcatttataacttgtcatggtaatcaaagacagtgatttttaatggcttcaaggccgttggttgatagttaccactattttcttgactcatctcttcgggatgggtttttcacagatttggggctgttgtacaaaatgatgcatgcagcctgctttgcacgtgtctgtttgcactcaactctaaattcttactgtgaaattactgacttagaagtgcccgtatttacgttttgatctttcctagtacattgctttcttggagagaggctatactaatttacagtcccacaggtagtacacgttaggccagcgggttggttggtttgttggcttttaaaaaacaatacaggcatttgtaacaagtagtaaagatgtcagttgagttttatttaagtttctattttcttcctgtgtcctctctcagggcatttagaactaaatgagataagatatgtgaaagcactttgtaaaacaaaattgctctaagaacacaatgtgttattagtcagaacagctccagaagggaagggaaagggagagccttgggtaattgtacaatgatgttcttattcttatatgtatgaaatgctttttgttgtgaggacatagagatacttaagtaataaagatgacccacaatcacattgttttcatatgtgatctcagccttgtttgtgaggtgggctttgtatatttacgaagatccctttgggctgtggcttggaagactgttcagttaaatacagctggcattttttggttgcttaccatgttctgacactgtgttgggagtttgaaaatacgacattgcccttgtctgaggggcatttacagtttagttggcagcagggatgtgaaacaatgggaggagagcactggctttggagtcagtctgaagttgaggatctctgctctgtcatcttgggtagatcacttcacctctccaggtctcagtttcttcatctttgaaagggggagaattgtgccttcattattggcctctcaaggtcattttgtgggaggctgaatcaaatgttaaagtgtgaagtgctttatgaactgtgactatagccggacgtggtggctcacacctgtaatcccagcactttgggaggccaaggcgggcggatcacaaggtcaggagtttgaggccagcctgactaacatggtgaaaacctgtctctactgaaaatacaaaaattagccaggtgtggtggcaagcgcctgtaatcccagctacttgggaggctgaggcaggagaattgcttgaacccaggaggcagaggttgcagtgagccgagattgcgccactgcactccagcctgggcaacagagtaagatcctgtctcaaaacaaaacaaaacagcagaacaccaactgtgactatttagaccatgttattataagtcttacagattcttgtggctgtaattctccaagtgcaagattgaagaggaaactgtttctgggtcatctgtgctgattatagtatatcccagttgttcgaggaagaggatagaaattcagataataagggtgcttagcacctttccttctcaccaaggcttggtttttcttcctaacttatggaaaaatgcagtgtgagtctctttacacccagacatatttttggatggatgggatttttatcttccctctgccttccctggtttgtgaggatgagggtagtgttcacagtgtgactaagaagcagcatgacttttttgcatacttttgaatgaactactttgcctgccttttattctccaggcaagatgtacccttagagatgaggtggaacctaacacttggttttacctaaattgcctccttttccattcttacactgcccagagcactaaagctctgtttgttctattttcagcttgtaataatgtcttgatgttggaggatgaaagagctgatgtgaatagaaggcatttaataaggagtcatggtctggagtcccagtcaaattggtagcacatggttttcatctgccttgaagggcttggttgcatggtcttgccttcccagagctgtgacagcaccaggctggaccctatacacaatgccacatctccttctcaaactgatgatttggagtggcaaatgccactggctttgagagatgccaaaagaatggtggacttggcttcttaatcttttgaagatcataaaatgtttgctagggctcgctcatctgcacttaggacaggggttagatgggtatgttggggagatgaggttattttagtggggtttggttaacgttcagttttaaccactgttcagccttctcactgggactcctagctggttacatttttttgatgggggttacttttatatatttatgtatttatgcccctcattctaaaaaaggattttaaagccacgatgagctgtcattccaggagcaaataatttttacttagatctgactcaagttcactttccaaatgcaaaaaagggacagtcagattaaactgtggacagcagagtagttgttcattcatctcaatgcagcagtgtttgggcctggcagtgtttttgcttttggtttgaggtcttgacctaaaactttaagtaaaggcaagttttgcttaatagtattggtattgacactctgacagatcttttaatctgaaagaattttaaagatgcatgaaagtaatccccagtgatgattacatcttcgagtggcagagatcagatttttatttaaataccaatgcagtttatcacttttttccacagtgcagggggccagggagggtctggatttgggagggtctggatttaatagtgaacttctgaacttgacttactttgaggggagcgattggtgggtgttactgcatgattcagtgttctgtgtctttaaaaatgttttgaaatactcattctgtattgtaatcctcaaaactactgttaggattccaaaccattgtggtttaaacttagctggaatctaaaaggtggctgacagagggaaaggaaacctcctttaaataaagaacatatttggcttgcctaagtgtcccagagtctgggctctgggcatatctaagccatgggccaagtctcatagttgaagaggtcgggaaatacttgtctcaaatataaacaccagctcaatataaacaccatcaattagttctgcagaaactcctggtacaaataagaacttgcaaagcttcatgttcaatggagttcttgtctggatgagataaggagtgcaatactgcacgctcttctgtacttgtgataaatcaaaactctaatgatgctattaaaatgggttttcttttggccctggtaagctggaaagcattgggaggtggggaggatagatttcacttggaaatacctgaagctaaaaagtggtggctttttcttctttcttctaaatgtactccttgctctaattaagcgatgtgatcactgtcccaacactgacataccccaggatgaaacacactttctattcaagtagcctttttttcccttgccttcttccatgagacttgctgaaattgtcatgttatttctttccagaatttattggagcattaggcaaaagcctcttgggagtataaataatgatgattataaagaacagtcagtttaccaaggaaggccattatctttgacttgcaaagcttttacagccaaacattgtttgcttacagttctttaatacaaatgaagaccttaatggtaagaagagtcctattactactccctttgtacatggaggtcatcccaataaagaaaggacgatgtcactttgctcaggcattaacagcttgtttttcaggacaggcattatatacggtctatgaaggccttggatggtgttttttcttcttcttctttttttttttttttttttttgagacggagtcttgctctgtggcctgggctggagtgcagtggcgctatcttggctcactgcaacaacctctacctcccaggttcaagcgcttctcttgcctcagcctcccaagtggctgggactacaggcgtgcgccacgacacccacctaaattttgtgttttttgtagagacagggtttcaccatgttagttcgccaggatggtctccatctcttgacgttgtgatctgcccgccttggcctcccaaagtgctgggattacaggcgtgagccaccccgcccggcctggtgttttctcttctaaggaatgtggtttctgccatcagcagcaagtaatcctccttgctgagtgttaaaagatttctaaagttgataaggaatactgaatttacttttgtactccctactacgtcctactgtatattgtataccttatatacaaattcagggaattttttttttttttttgagatggagccttgctctgtcacccaggctgtagtgcagtggcgcaatcttggctcaccacgacctccacctccctggttcaagcaattctgcctcagcctcccaagtagctgggactacaggcgcgcgccaccatgcccggctaattttttgtatttttagtagaggcggggtttcaccgtgcaggtcaggctggtttcaaactcctgaccttgtgatccgcctgcctcaacctccgaaagtgctgggattataggcgtgagccaccgcgcccggcccaggggatggttttgactttgtctgagtaggcactgacatggaaaaggtatgtataaatgaagaatctcatgccttttttttttttttgcctgttaattttcttattttaaaatttttatagaggtggggtttcgctgtgtttcctcggtgggtcttaaactcctggcctcaagtgatcttcaccccagttcttccagcctcttacacctacgaatcattttctgtctttgtgcttttgcttattctggatattccatgtgaatggaatcatataatatgtggactttgtgtcttgtgtcttttaaaattatgtttctaaaattcatgctggagtgtgtatcagtacttcattcctttttgtggctgaataacattccattgtatggatgtatcatgctttgtgtatccagtcatcagctgatggacatttgagttgtttctatggtttggctatttttttttttttttttttgagatggagtctcactctagcccaggctggagtgcagtggcgcaatcttggctcactgcaacctccacttccgggtccctgttcaagcaattctcttgcctcagccttccgagtagctgggattacaggtgtgcgccaccacgcccggctaatttttgtattcttagtagagacggggtttcaccacgatggccaggctagtcttgaactcatgatccacccgcctcggccacccaaagtgctgggatttataggcgtgagccaccgtgcccggcccgtttggctattttgaacaatgctgcggtgaacgtttgtgtggaggtttttgtgtggatttgtttgcatttctcttggaataccttgttagaaaagcgtgcttatacgtattactactaaatttattttctgtcattaagctgtgtttcagttcatgcctctgaagtgatgtgctctgttcagcagagtcctatgctgtgccctccccttctggggctctagcttgccctttggagggtgtgtgtttgtgtgtgtgtgtgtgtgtgtgtgtgtgtgtgtgtgtgtgtgtggtaggggtcctcattttccttactgcctgtcactctccatgtcactgtgggtggccaagagtggtctcatttcctctacccctttgcaaaccgtaaacactggtcacacgtgcttgtgctggaatcatatgctccagtggcttgatggtgggacttcagatttcctgcattaccttaggttttgactttcttgtggttacctctgtcagcattctttggcagaggactatggggagtagaatgacctagaaattatccctgattttcttctccttccaagcctgctgaaccaaaaatggtttttatttttctttgaaaaactacccttcgtaatgaactccattaagaaataggagttcttcaaaggaggagggatgttactgtattcttttgatttctctgaatttactagatttattttccccaagttggtgtgaaattgttgagattggtccttaactagagtcagacaatttttttttttttttttttgagacagagtctcactttgtcgcccaggctggagtgcagtggcgcgatctccactcattgcaacctccgccttccggattcaagtgattctcctgcctcagcctccagagtagccaggattacaggcacccgccaccacgcctggctaatttttgtatttttagtagatacagggtttcaccttgttggccaggctggtctcaaactcctgacctcaggtgatctgcctgcctcggcctcccaaaatgctgggattacaggcgtgagccaccgtgcccggctggcaatttttattttttagatacagggtgtcgctgtgttacccaaactggagtgccgtgacgtgaacgcagctcactgcagccttaaccttcctgggctcaagcgatcctcccacctcaccctcccaagtagctgggactagagctgcgcttcaccatgcctggctaatttcaggcaatttttaattgttagaaaaactgtaaggcaacataagagaagtggatggtggggactgcaaatgtcatgtggcctagtggtattgagaagcattttgtgaagcagagagtgcgtgttccgattctgtaggagcacatgtcttggtgtgggtgtctttgccttcctagaacttcctgatgataagaagcctgtaaacaccagtgtgtccgtcagtatttggaatcttgtttattacatagtcctcaggttcattgtcaaaaaattctttactgatggtattaatcagtatttggaatcttatttatttcatagtgctcaaggtcattgtcaaaaaattctttactaatggtattaatcatgcttctcacactccagtttttctggtatggttttctgttccaaattgactcctgtgctcaggtcattagtttggcttactaacaggagccctgacagctatattcaatatttttctctgcagtggccaagtagccaagaatttactagtttagacacccacctcagtttagaaggtaggtgtgagtgtgtgtgtgtgtgtgtgtgtgtgtgtgagagagagagagatagagagagagagagaatatctaagaaggagttaatattttaaactttgcattgtttaactggaaatctgtgttctgccgggccgcttttatgtggtgtacctataacctatacacatacttgtgcctttcaaaggctaacgccacatccctcctactaaaattgcttattagagctaattttaagaattgagttagaactgccctataatgtaatgcagaatatttcccaataatgcctaggttaacaatgatagtcttgctgtattgtgcaaaaaaggcttctgttcagacccagctgggtttcaggcttaattcattgctctatggtgggatcaccacagctgctgtggggcctttacaaatgcaaaaaagctgtcagtgtttgtttcatcagctgcataagtgatgaggccaagttgaggaatccattccagtgcgcagtgtgcaggctgtagctattattgtttacagaattagtgtgttggagctttaaaatagttggcacatcgtctgccctttaaaagcacaagactaaggaatgagaccagttggttgtccttgtaatgttggccggatccagcccagcccttgtcttttaacagctactgctccgggctgtgctgtgggacttgactactctttggaggaagtgggggtgcttgctgagttcttgtctctgtagttctgcatcccaaacttaggtttgcattaaaaaaaaaaaaacaaaaaaaaaccacgcagtcatttagagttccataagtgtaattgagatttaaagccttaatcatcctcccagccccaaataggtataggactgtcagctgggatttcaaatatctgtgcagtaacattccagatttggctctgtgagatttattttgtgaagtgatactgctttgggacttgccctcatctctccccatgggtacagaagttaaggctacttcttggctggcagccaagaagccaggaaagccccattggacaggtcactttccaggcaattaaggagtattctgcagggctctccgtgaatgctgtcttaacagtgtaaggtgaccctcttccccagggacctgatgagcccgggcagcatgttcacttgcttttggactgggcaagcaggaatctgggaccagcatcatggtcattcacaggatagtgtgggattgtcccagcccctccctcatttacattcagaccccttctccactcaggggtctctgcctcatggaaactggagggcatgggcggtggctggtctgttacggttttgaaagtggagctcatcaggtctcctagccaacgggggtgaataattgtgcttccttcctcccagctggaaaaggtcccaaagtgctctctcatattcataaaagagatggcacgaggcttagtgtctccaaattaaaggtcaatactgatcagctttctctcaaagaactgtcacatatgctctcctggagacatttgtgtcttcccattttaccttaggaagtctctggagcccaggaagacaagtgtgtccgatgaatctcctgtggtgttggtactgattaagcagagtttggggatccttgtatggcccctcttttaaagagctttttagcacggtctctgccaagtatattttaactattagttacaatgatcttccaacagagagcaaacaacataagtaatagtttagagttttacttcttaacgtcttcccaaattccttctctttctctttcttacctgcaccctggaatagtagtaatgaaaaggaaaatagcaaaccgtgagctccatatcctctcccgctgggggaaggactaatttgcagggcctcataaggaaacagcagtttcatggtcattgttgtcagcctagcagcgcttggttgcacttccgttgctcaacgtgtttctcctggctagggtgtttgtagtatattttgagttttaggaatctttcatcaaagtttcttctgcttttttgtcattttaaggcaaaacattttcttttggtagcttgaaagttctacactctcaatgtttaaacattttttgggggcagggtgagaaacagctttgtggacgcatatctgattgtgtgtgtttgttatttcatgtcagagtcatctcatgaccccaggagacctcgccagtggcctgcctcctagaaaatgcactgctgtaataacaatcagggcgccagctgaccactggttgtccctcagccacttattagctgcatgtccaggaggatcaccaggccgtggtttaaattctcagtgttctccattgtaatgtggggtgcacgtgcgtccctgagtggagattaggtgctctaataggcacaactgtgcccctttcattgtaggcattctcttccacctgtatattagtattgcttctagctgcgtgatcgagggtttgggttaatgctgacatattgcaacttactggatggcaaacagttaagttgtcttctttggctgtggggagagatggtgaattcaacactctgaaactctgaacacagtgtccaaagagaccctgggcttcctggagtgttattctcttactctcctaaactattctcccactcccatgaaaaagaaaatcttaaagcggcttatcagtatctgacataagacagagtgaggcctttccttttatctacatagagatagctcaaagatctgcttgaggggcagcaaaaggcatgtcagcaaccaccaggaaaggatcctgaagcctaaccaactggttataaacagcagtaggtgcccaggagggaaccgataccttctgcaagagcatcagttgtgaaatggcctaggtacaaggatgttcttagaatcaggtttcaaattatagtaacatgtagacagactctgaatgctctgggaatggagtaagctggttctagtgaattttctggttgactgtttcaagccatggcattaactccttatgaaggatattttttggctgtcctgtcttcagaagtccggtgtgacgcgcgaactcaatggttgcgttcccgaggaccttatggagtgcttcctgtctgtctgccagtgctttgttactgtgcacctctgtagatatgcagtagggggtttttgggtggtgtgcatgctgatccccagagggtttatattttacctgcactcctgaggatgtgtttgtgttgcttggggccctgagaaaaaactgcattcagcggaggatttagtaagaagaaagttggttccatgaagtgtacatcagcagcccccgaggatgctgtggggttgcaactcctaaggcttaactgcggcggggatcggttaatagtatggacaaccccacaccccagaacaggggataggtgatggacgacagtgggacaccatacctaatgtgcatgcctgcttcctagaaattgtgatagtgtggtgactctttccttctctgaaaagaccaaaccccatcacttaatatggaaatttaaaaccaaacctccaaacccttctgacagcatttttgaccaaattggcttttcgtaagggtagagctagattttccgaagagctttaaaaacacagcctagaagcttatctttgtgaacttttgctgttgtcaacagtggatatcttgctgctgctaatagaaaacaaaaaagttcatttgccaaaatgcttgtcatttcctcctgaggagtgcagcttaacgccaggacttcatttagtcagagggaaatggttgctacctccctgttaagcttctttccattatccagttatggcagaatgagtgttggggcggcctggggagatgggggtaaaataaaggaacagctaagaagtggttctgcagaatgtgtacttatatccgaaagcctggatggaaaggacggtggctttggaaggggtgtaaaatgggagggggtggcaatcgctgaagcatgacaagcctccgaaggcctctgggacttgaacacaaaaaagggagctttttgcagctctttcacatgcacacgtctccctctgccccatccatcctcccctgctgttttgtaaatctcccagttggaaatttttaacatgggagagcttcttcctgtgcttcagttggcagaatgctcacacgcagctgcaaagaatttgcttttccttttcacagcatctctcatttaaaagcattagtgagactacagaacaaaataaaaacttcaggatttttcagaagtggaagccaagtttaattaaagtcaaggaagttcggggctctaactcttttgttaaacctcttaaagtcaggcgtgtgcgtgtgcccatggcaggcaaggtaggaaatgccagtgcctgtttctcgttaggaaatttaaaggcctacttgtctggtgtgtgcttggggaatgtcctagaatttatcaaaagatgtgctgaaccatcatgtctttggtggcctcaaaatgcttgccagtggtgaggtagttgcccctttcttgagggaggaggaaaaccgttaaatagctttctgtctcctcccaggcctctgtaaaacctcctaatctgagtgccctgttccctgtgctccacccttagtccctagaccaggccactgggctgtgagcattcttgttggggggggcggaaagaagtttctgactcgataactgcctcctaaagttggatttttaatctttcaatagtatttgaaccttcagcattttttacattttattttaagagacagggtctgttgcccaggctggcgtgtggtggtgtgatcacagcttattactgcatccttgaactcttgggctcaagagatcctcctgccttccctgccccaccccctagtagctgggaccacaggtgcatgacaccacacttggctaatttttaatttttttttgtagagatggctattttaaaattttttttttttttttttggtagagatggggtctagcattgtttcccaggttgggtatgaactcctagcctcaatcatcccacctcagcctcccaaagtgatgggattacaggtgtgagccaccttgcctggcccagtttctttgtctagcagcctttacaaacatttgcaaagaatatccaggcagtgtttatgtatgtctgcagtgtttttactggctatatagaccacagagtccagaagtgacttggatgggatccccaggaaggatacttagaatttacttgacagactgaagattggtaaacatggtctcaagttgagttttgctgggaaattggttagcttcgctgcaaccttgtcatttctttcctgagtaattatatgcagacattggtagaggttttttgttttttcataaagaatattaacacaagggttgtatacaaagggaacatactcatttcttagtctttctgtagatcctagcacttgtaactgatgaaatgatttgcctcagggtcgatccttccttccttccttcagtccgtccatctgtccgtccgtccttccgtctttgatggactttcactcatgttgcccaggctggagagcaatggtgtgatcttggctcactgcagcctccacctcctgggttcacgcgattctcctgcctcagcctccggagtagctgggattacaggcatttgccaccacacctggctaatttggtatttttagtagagacagggtttctccatgttggtcaggctggtcccgaactcctgacctcaggtgatccacccgccttggcctcccaaagtgctgggattacaggcacgagccactgcacctggcctgctcagggtttttcttggtcttcatgtatttgatcctattggttaggtagctgcaatcccttgccctcattttacaggcatagaatgggtactttatttaggaagggttatgattgcgagtcatgtcaggttaccagaacttgaaactctacctttggacttagcagtgactgtgttattaaggtgttggcatttcctttaggttcttgctctgccttgaaaaagctgaccagaggccatgcatggtggtttcacctgtaatcccagcactttgggaggtcaaggtggggagatcacttgagcctaggagtttgaaactagcctgggccacatggtgaaaccctgtctctactaaaaatagaaaaaattatggtggtgcacacctgtaatcccaggtacttgggaggctgaggcaggagaatggtatgaacccaggaggcagagcttgcagtgagcggagatcttgccactgcactccagcctgggcaacagagcaaggctccgtctcaaaaaaaaaaaggagagaaaagaaaaaactgtgggaccttgggcaaatcccacactttgctttcccacagttgttttccttagctgcaagtattgtgtgatgggaacacagagttcccctccagaatgctatgatttttgtctttcagaagtttgtagcctttcattttatttcattttagttctacaaatatttattgtctactttgtatacttgtccgattggagattgttttctcaggtggtagggagggacatgtgtagggggcatgcaggattgggaccaagggaggttcaggagggcttgaggccagtgggttctaatcacacaaggatcttgttaaaatgcagctcctcattcagcaggactgaagtggggcctaggattctgcattctaacaaactctcagggcctacacttcgtgtagcaagactttgggactgattttgttcttggtgcagtggttcgcttcttttttcttttttaaatctcacatctctgtcccaacctgagcatcgaagggtagggttcccaataagatctctgctaccaacagaagtttgaaaactattgttatagaagatccaggcctgatgtggtggcccatgcctgtaatctcatcactttgggaggccaaggcatgaggcttgcttgagcccaggagttcgagaccagcctgggcaacaatagtgagacctcatctcacctttttctgaaccagcagggactgaagagacactctcctacagtataaagatgtttaaaaacagtgatgcgggccaagcacagtggctcatgcctgtaatcccagcactttgggaggctgaggctggcagatcacttgaggccaggagttaaagacaatcctggccaacatggtgaaaccccatctatactaaaaatataaaaagtagctgggcgtggtggtgtgtgcctgtaatcccagctactcgggaggctgaggcaggagaatcgcctgaaactgggaagcagaggttgcagtgagctgagatcatgccactgcactccagcctgggcggcagagcgagactgtcgcctgtagtcccacctactcaggagaggttgaggcatgagaatcgcttgaacccaggaagtggaggttgcagcgagccaggatcgtgccattgcactccagcctgggcaacagagttagactctgtctcaaaaaaacgaaaaaacagcagaaaaacaaaaaaacaaaaacagtgatgcaattgtaaggcttgagcattgcttgaaaatgcatcttttggccccgtggccctctatgttgtcctttctgaagaccattcttcagttttcattctggaaggaagacagctagctataatgcgttgcctgcatagtgttatcatgtacttcccaaagcttccatgtcttgctttagtagacaaagagcagtgtcaggaatttctgcgtagagctcttactgttttgctggtttctatcctgaactcaccttgaaagcttatatagtttttaaaaaagagaagttgttactggataatagctaccattgattgaatgtatacctaccctaaatgctttacacagacagcattttacgtattcacttcttaccacaactctgtgacttagccatttcccccaaattgcagctgtggaaacaaagcaggtaaaggggccagggttggacccccctaccactacttgaccccaaatcaggatgtttcactttggagcctgtgtttgatttcactatcctggaaggtggtattacctcaggtttatgcagccatagtcctgggtttgaagcctgcctctgtcacaatctctgtgcctcagttttcttatctgtaaaatggatgtgataattatagtacctgggccactcaattttgcgtggcactggctatacattttatttgttgttatgattttgtttattattcttgccatagtcactaagtttattttcttctccctgctcccattggctctttaaaaatcattctctaaaatgttaaattagcaatcttaatgatttttcttcctggagttaggttaagaggttatatttgtgttttcttatcaacctacaaaataaagcctagtaagttgccatctatagagaaagcagttaggggattcagcatatggcatttactagattttgttgggtcctcattttttacgtgctaagtttcctcatgtgggtggggaggatgccttatgcctggaaacatcgcagttgcatgtagtggtctcccctacccttattttaaaatacttgagttttatttgtgagctattgaatacacttagcggggctctctgtaaacataccctgaatttaatagccaaatgatgtacacatgggatgtgcacatataatctcttttccaattgtccctgctatattttcttccttgacaaactataaaaccaagggaatgattttcaactaatggttgtgttctttaaaaaactgtttttcagccagatgtggtggctcacgcctgtaatcccaggactttgggaggccaaggtgggtggatcacctgaggtcaggagttcaagaccagcctgaccaacatggagaaaccccatctctactaaaaatacaaaattagctgggcatggtggcgcatgcctgtaatcccagctacttggaaggctgaggcagaagaatcgcttgaacctgggacttgtgggttgcggagagccaagattgtgccattgcactccagcctgtgcaacaagagcgaaactctgtctcaaaaaacaaacaaacaagcaaacaaaacagctgtttctcagggtagttttcttgaagcacgatttttcgaaatgttgtaaattagtaggaccctggctttgagtcaggatcctagatggaatgaaatgacacctaaagattggtgtcattcttggggatactcactgaagaacatactgctccattttcttttcccttctgcatttctctgaaaaattttgtctatatcttttttttttttttttaagatggagtctcgccctgtcacccaggctggagtgcagtggcacgatctcagctcactgtggcctctgcctcccgggttcaagtgattctcctgcctcagcctccggagtagatgggactataggcgcccgccaccacgcctgcctaattttctgtatttttagtacagacggggtttcaccgttttggccaggctggtcttgaactcctcacctcaggtgatcctcctgccttggcctcccaaagtgctgggattacaggtgtgagccactgtgcctggcctgcttctctatctttgaaaaaggagtttttggggggcattaaggaaatttgtcccttttcattttagatagttttgggggatgtctttaatgtttttttgtggttctttagaggtaggcatatgaagacactggtgcatttttatctgctagagaaatgggattgtttttaatttttacagagaaaaactaaacatttatatgcattatttagtattttgttctgaagaaacatgctctatttgtaaaagaggaaatgtgtgggaaaagggcaatttggcatgctgttgcatttgcagatccaaatttattttccttcattcagataatttaacacaggcaaataagtgatgtttccagagtggcttcttatatagcagcccaggaggtgagtgggagatttcagacctcgactttttgtgtgtgaaggggtgacttagccagggcaatattgtgttggcctctttttgattctgggtttttttgttggtggtgatcctgggcaccttcagtctttggttcagcctgggaaggagactttagaggtatccactccccctttcccagttttctcctgattcttccttctagtccttgtgcatattagtgggattcttaaaaagccactgacaatctgatggtctaaagctccacctgcagttagaaagaagctggtcagccttctggaatgttctttctccactggaggctagtgagcacctccagactaaaggaggttttggttgcgcttttagctttgaggaggtcactgaacttcaagagcccttctggtttcccattttgtgtgataggattaaaaacctctgttttgttgggttacctccatctctgtgacttggggtgacaacctcggaccagtggagaaggtgtgtgggcagcaggaagagctgtttgatctctccttgcaaaatgtttctgggctcaggttcaagagtggagaaaccctcttgaacatggaacagttggctcttggggtcagtagcaaagacaggaatgagctggaaaactttgtcctgacctaaaaggaggttacatagacagggttttggatctttggtgtttccttttttacaaaggccatgtgcacagctgtacttccagaattggaaaatttcctacatacacagcttcttcattagatactgataccggttaattcacagtcacctgtaattggaaacagctgctgtttcccagctgactaggtgttcaagtcagatgctttgaattagctggacttggattattcacattttaattaaagtccatttaccgccccccccgcccccccccccgtcttttgcctcttcaatgaccaggtttttacagtaatacatttgaaattacatgagtatcccagtagaaaggcataatgtaagttcaaggacttgcagttgattatggcgttacattattaaatagtgaatttaacagcattgcaattcccttttctcacccactgaaccttgcctctctagtggggaaaatttcattccatttaggaaagttgagacttttgtcccctttccttctcttgggacagagttgtattaacctaattgcttgtgtcactgctacagggaaggtactgcgtgaagtgggacaagcaattttctggtactttttgtctaatggggtttgcaaattaagccatgactagtggggatattttctcagaagggggaaaaaagttaacaattgctatggtgtggctgttgtccagtgcttctgtattgatgtagaatgttcactgagcagcttgtaggagaaaaagactgccttaatttttgggcaaaaagttagaagggaaattgctttgcatttttctctccataatgttaatgaggaaaagaggcaatgctggaggaaaggagataaatggatgtttcctcccttccctatttaagctgcctaagttgactaaagttcgacttgataaatgtcctagttaatttaattttgtgttagtgcctctcctcccctcgagtgtccagtccattttcagctgacttgcagaaaaaccaggttaatgcaaatccatcagattctgcatgcctgttaaaatgcttaagcattctacatggcgtgggagacatgatgcttgcctaaaagggtccctggagagataaagtatattcctgccagtgcatttagggagttatacatatataactgtctcatatgatttggcattgtcacatactgagcactgggagagccaaaggaggtctggggttggtaggctgtttggaggtaaaagtttactactggaatagtccttccagctcagccgcttccatttccacattgcctcagaagttgcctaaaggatgtgcatcttgttggcagccccatgactttctagaagccctgttgtgtctgtttagtgctttctacattaggtcggagatcttttttcattaggtcagagatactggactcctttttgttatggaaataacagtctcttggggttctctggaatgagccagggggtcctgttggcctggtccttggaggagaggtccaggctgttgctttcagtatccatgccacctagaatttccagtgactgttgagtcattacattgctatggtagtttcttaggaataggccggtacaatttgattgtgtttttggaccttcccccaagttacaaggccaccagcactcagactgtgggtataccatatggaccagggaacacattggacaaggcgaaagcttgttaccatgaagttcgttagaagatgagactccattcaaattttcagttcttcatgaatgagttcttagtaaaagtgctttgttgatttttttccatggtagtaactaccatgttttgagtgccttgttaagtaacataagtacataatattctcacacacttttgcaaagcagaatctattattttatttttacagatgagcagatagggctttggagagagaagtggcctgaagtagcacgcagtgtgggtggctggagtatatgcaggggctggagttacagcccagttttcttaattgctttgattttatttacctattttttatagaaacagggtcttgctatgttgcccaggctggtttggaactcctgggctctagcagtccttctgcttcaacctcccaaagtgctgggattacaggcatgagccaccgtgctcttggccttaattgttctgattttaataatggcatgatacccctgtaccccaagttatacagatgagagattttggctctggtatctctgtctctatcctgggtaaggtttctcagggttgtaggccagtctctttgtcaggaagagagctagtagttaaactgaaacaaaggtccgacagtctttattttgcattttaaggtacctgttgaaaatgactaaacgtaaaatgggacttttgttaattcagtagctgttactgaagcattagattgattcacctgtttaaaagtagttatgaaagacaacagagaacagctttctatttgtcgtaacttactaatagatagccaagtctgcaaaaaaaaaaaaaaaacagtcaaggattccatgtagttgcaaaaggcaagttcaagagaaagttggcaaagaaagatggatagatggagagaaagcaaaagaaatccttttttttggagagagaacacactgttggagtatgctgtaaacagtgtaagggaaaaaccccataaaaaaggtgaactctggttgggcgcagtggttcatgcctgtaatcccagcactttgggaggccgaggtgggtggatcatttcagatcaggagtttgagatcagcctggccaacatggtgaaaccctgtctctactaaaaatacaaaaattagcatgcctgtaatcccaggctgaagcaggagaatcccaggctgaagcttgaacccaggaggtggaggttgcggtgagctgagattgtgccactgcactccagtctgggcaacagagtgagaccctgtctcaaaagttaaagaaagaaaggtgagctgggcgccgtggctctgccagcaaaatttcaatcgaaacactgcaatgagccaggcactgtacctcatgcctgtaatcccagcactttgggaggctgaggcgggtggatcacgaggtcaggagattgagaccatgctggctaacacggtgaaaccccgtctctactaaaaatacaaaaaattagctgggcgtgatggctcatgcctgtaatcccagctactcgggaagctgaggcaggagaatggcgtgaacccgggaggcggagcttgcagtgagccgagatcgcgccactgcactccagcctgggcaacagagcaagactccgtctcaaaaaataaaaaataaaaaaagaaaggtgagctctgtaatagtgtagctggctggtgaaaatagtgtagctggctggtacagctcagcagaggaagggtctggggggacatgctcccccatccctgccagtctcatatctgccatacctgctgcgagaggaattgattggaggactggtttgggtggaaattgtccagccgggctgggcatggtggcccacacgtgtaatcccagcactttgagaggctgaggcgggcagatcacttgaggtcaggcgttcgagattagcctggccaacaaggcgaaaccctgtctctactaaaaatacaaaaattagctgggtgtggtggcatacacctgtaatctcagcttgaggttgaggcatgagaatctcaagctcaggttgaggcatgagaatcacttgaacctgggaggtggaggttgcagtgagccaagatcgcaccactgcacttcagcctgggaggcagaatgaaactgtgtctccaaaaaaaaaaaaagataaattgtccagctattgtataacaaaattcatatatacatatattcatatatatggacaataaattgccttttgttttcaccactaaatacagtgtggttgtgacccttagttttgtgtattctgactcacagctaggatttaaattggtcgaaggttgtgtgtattttcaacattagtgaaatactgttttctgaaatggttggagcacgtcactcctatctgcaatgtctgtgtcccaggtgatatgtatgcccactagtttgattttgttggcggtgggtaagttttgtgagcctgacttttcatatgtgtatggatttacatgtttagccccatggcacggcttactgcttagttccagtgattccctggcctctggggtcgtggaagtatgtgcccaggtgtattactctttatctcccttcttgctaatttataaaagcctttacttccataagtacttgcctgattaacaccacttgcattaaaatcttactgtcacttcccttagctttcccagcacaactttcttgtacttcattcatgtacaccattattaatttgtacttgtgttaatttgtcagagttgatgaggcactaccctctaatctccctactgttgtcatagttttctttctttgaaaaacagttactttcctgctcaggttctcattagcccctatcgtctatgggataaaatctaaactcttaagcattacctaagacccttcattaaatcagtctcctggcacttaggaggcaatcagtaagtattggttgttatcctaattttgcattccatattaacttgcagatcatctggatgaatttgattaaatccccttccctcactgactttatatttcgggaaatttcatgtctagggaagttgaaggaatagcatgaacatctggggcacttaccacctagactgaaaaattaacacctggtcgtatgtatgtatattacccattgtctactttcttctgtcaaatccgtgactttggaaattttgaaatagtgctcttggttatccattaaaaaagggtaaaataaacatgctgttgctcctgctgcagcacttcagtagtaataaaaaaaaacttcagtgacttgggtttttttctgccaaagtaaatgttggctctctttcagatgtagtaatgttgcttctctaaattcgttcgagttaaactaaagcagggccaagttgagaaattagtttctcggttttttcccttccaatttagaaaaaaattaagttttggatattcttgttcctgtaattttcttccgtgttccttcctcctcctgcattaaaaaagatcataaagattcagctaagatgtcagtgaaaggaacaaagatccagccttttacattctttatgtggagttattgttggtagtaatcttaaaatagggtgtttgaatccatgttgaggcagttaattcagtagtacagtttcttgttaaccacaaaatgctaagtaaaggtaaagccttatccccacaccctgctttttttttttttttttgagatggagtctcgctctgttgcccaggctggagtgcagcgatgtgatctaggctcactgcagcctctgcctcctgagttcaagcagttctcctgcctcaacctcccgaatagctgggattacaagaatgagccaccacccctggctaatttttgtattttcattacagatggggtttcaccatgttggccaggctggtcttgaattcctgacctcaggttatcctcctgccttgacctcccaaagtgctggaattacaggcatgagccaccgtgcctggccagccccttaacatgtgatttttgcctttttgtgatttttgtcttatgctgcaaaatacgcttgcgttattactagctaggaaatccaagcaggtatcacaccgtgccgtcatatgagtgataactgggagttttcatgcattagctggtatttgacaggtttgcaggtatgttagaaagtttcagtgtgtcagtgtttggtgtgtataagcgtgggagagcccaatacgcatgtgagatgcagcttccagtcagtgcgcatataccacttggagggcatgctggttgcaacccttttattctaataaggaactggtttggctaggtgaactacgaagtcattttggatttgacccacactggctgtgtctcactctttactgcagtttaattcatgtgatgctattaagataataactttgtccaagagcaaaagaacgtgaatacattgtggtatgtgtgaattcacaaacaacattcaagatcagtttcagaaatgttcagagcaaaatctgaagtccccttatctcctattgtactgccttcctcaaaagtaagccatcagtggtttgcacatccttctagcctttctgtgtatttacctgcatacatgcatgtttatgtaaacatacagatgggttccccgcgtggggggccccccacttcacttggggcctatttatataaatggaatgtaaggttatggcctgtgatttagctttttctcacgtaacaatatctcaaagatctttccatgccattctatttcatgctgcaagtagctgataggactagtgtactgtagtttatttagccacttccttctgatgactttcttcctagaagagtccttggcatttaggaggcactcagtagacctttaggttgttcatgctgttttgtttgctttaaaacatttctgtccatacacctttcaaacatatggtaatattagcatatgattgaattggaagtgcagggtccagggtatgtgctctgtgtgtgtgtgtgtgtgtgtgtgtgtgtgtgtgtgtgtgtgtttgagacagagtcttgctcagttgccaaggctggagtgcagtggcatgatctcagcgaactgtaacctttgcctcccgagttcagaccattcttgtgtggtagctgggactacaggtgtgcagtgcaccatcatgcttgaccaatttctgtattttaagtagagaccaggtttcaccatgttgcccaggctggtcttgaactcctggtctcaggtgatccgcccaccttggcatcccaaagtgctgagattacaggcgtgagccacagcgcctgtcatgtgctgttttagagtaggaagaaattttttccttccgaaaaccttcagccaatctacacacccactaacagcatatgagagtctttattttcctcccttcttgccaacacttagcattatacagcttctttggtttttgctaataaatatcactcatcattgtcttaatttgcatttctctgttctcagcctttttcgttggtctgtcagctgtccatattttttttcttcataacttttatccactattatattgggttgttggtttctttctctctctcttttgttctctctctttctctctctgtctttgtctttctctctttctcttttgtctctccccctctcctctctttcttcctcttctcttctcttttctttcctcagtttcgctcttgttgcccaggctgaagtgcaatggcgagatctcagctcaccgcaacctccacctcctgggttcctattctcctgcctcagcctcccaagtagctgagattacaggcatgcgccaccatgctcagctaattttgtatttttagtagagacagggtttctccatgttggtcaggctggttttgaactcccgacctcaagtgatcggtccacctcggcctcccaaagtgctgggattacaggcgtgagccaccccgcccggtctgattgttggtctttttcttatgactttttgtcagagcacttcatgttcctgaaatctatctatctatctatttttttattttttttattttttttgagacggagtctcactctgttgcccaggctggagtgtagtggcgcgatcttggctcactgtaagctctgcctcccgggttcttgccattctcctgcctcagcctcccgagtagctgggactacaggcgcccgccaccacgcccggctaattttttgtatttttattagagacggggtttcaccgtgttagccaggacggtctcgatctgccgaccttgtgatctgcccaccttggcctcccaaagtgctgggattacaggtgtgagccactgcgcccggccgttctggtatttattgaatatgtcgcaaatattgtctcctactctgtcctttgtcctttaagtatttttttttttttttttgagatggagtctcactctgtggctcaggctggagcacaatagcgtgatcgcggcttactgcaagctccacctcctgggttcatgccattctcctgcctcagcctcccgagtagctgggactacaggcatgcaccagctacgcccggctaattttcttgtatttttattagagacgggatttcaccgtgttagccaggacggtctcgatctgccgaccttgtgctccgcccgcctgggcctcccaaagtgctgggattacaggcgtgagccaccgtgcccggccattctgatatttattaaatatgttgcaaatattttcttctagtctgtccattgtcctttaagtattttttttttttttttttgagatggagtgtcactctgttgcccaggctggagtgcagtagcgcgatcacggctcactgcaagctccacctcctgggttcatgccattctcctgcctcagcttcctgagtagctgggactacaggcgcctgccaccatgcccggctaattttttttgaatttttagtagagatggggtttcaccatgttagccaggatggtctccatctcctgacctcataatctgccagcctcagcctctcaaagtgctgggattacaggcgtgagccactgcatccagcctcctttaagtatgtttatagtgttttttctttcatagaagttttaaatttttctgtagttcagtttggttttcttttatgggttttatgtctttgcttaggaatgcttctgtgacgccaagaatacgaaaatgttctgagaaattatctttctttttattacctcccattgagctaaacaccaccctccagcttgcactctcccatcaccctacccactaaattgatatggaatttacttctctggaatcctcaaaaatgatttcttctttcagccacatattatggatgtcttagggtttattcctgttgaagtcccaaatggtgtaatttttcaagtcttggcatacattgattgttatgtccatcagtattctgtgttaaataatgttttcatacatcccatggatatataggaaacagctctgggctatactccagagttcccagactcaggatccacttaaataaaaatctaggtaaattcccttttagttttataatccttttttttttttttttgagacgaagtcttgctcttgtttcccaggctggagtgtaatggcgcgattccgggttccagcgattctcctgcctcagcctcccaagtagctgggattacaggcgcctgccaacacgcttggctaatttttgtatttttagtagagacggggttttaccatattggcgaggctggtcttgaactcctgacttcaggtgatccacccacctcagcctcccaaagtgctgggattacaggtgtgagccactgtgcctggctgttttataatccttcataagaaaggacaaaataaggttgaaaaagagttaacatccattatgctattgtgtttacttttgaaaggcagcaaacataaagctaggagcttgcccttcaacaaacagctttagttgggtctggtagagtcaccctaagaactggctctgcgcccctcacctggattgcagtcactgcttgctctcatctgttgtacatatttagcattcatgaaatttcttttaaatgatgtaactgctttgaaaacatttcagaacaattgcattgaattgaacttttgcattaatgtgagtctttctgggtttttttttttttttttgaaaggaagtcttgctcttgttctccagactggagtgcaatggcacgatcttggctcactgcaacctccgcctctggggttcaagcgattctcttgcctcagcctcctgagtagctgggattacaggcacctgccaccacgcccagctaatttttgtattttttgtttgtttgttttagtagagactgggttttaccatgttggccaggctggtctccaactgctaacctcaggtgatccgcctgcctcggcctcctaaagtgctgggattacaggcgtgagccaccgcgcccagccgtcagtgtactttaagtatattttcattatgcaattaattacaatatgggaagtcagttaactaggttattactttgtgaagtaaagttaaacatctggtcatagaatgacttaaaaatgacaaataaggaaaaaaatacatatatatatatataacatgaggtaaagttaaacccagatagagggtatcattgctttcatgcgtggactttgaaattgctttttattcctgagaccttttctagttctctaacatgttccccaataaacgaggttagaggataacaattctagaaaagaaggcagcatctcgtaagtcattccacattgcatacagtaagtgtgatttctagccatgcatccttttaaaaaaattcatcttgcaataaaagaatttggagagcctttggaatcttgtataaaggaattttgctggcataaaacatgcattatgtatcacacttgtattttaaagcccacttgatgaaagagcagcaggttgacagtggttgactcaacaacctgcaatttctgatgtataactatgagcagtgggattattctttgtaacttggttatatgaagtttgaagtttttcctttcagtgcagtgtttcctttttcttgtttgtttgtttcctgagtctcactctgtctcccaggctggagtgcagtagcgccatctacaagccaattgcttgactctcctttgggtgagtggctaagtaagttaacaagtacaaacaacagaaatgctttctttgaaaatgtgagacttcaataatagaatgtgagttagaatagcaatctaattttataattggaagaattctttttttttttttttgagatgaagtctcactttgtcacccgagttggagtgcagtggtgtgatctcggctcactgcaacctctgcttcccggattcaaatgattctctgcctcagccgcccgagtagctgggattacaggtgcccaccaccacacccggctaatttttgtatttttactagagacggggtttcaccatgttgaccgggctgttcttgaactcctgacctcatgatccacccgccttggcctcccaaagtgctgggattacaggcatgaggtacagtgcccggctcattgcagtgtttcgattgaaattttgctggcagagcgcggtggctcacgcctgtattcccagcactttgggaggccgagacgggcggatcacgaggtcagcagatcgagagcatcctggctaacgcggtgaaaccccgtctctaataaaaatacaaaaaaaattagctgggtgtggtggcaggtgcctgtagtcccagctacttgggaggctgaggcaggagaatggcgtgaacccgggaggcagagcttgcagtgagccgagaccatgccactgcactccagcctgggcgacagagcgagactccatctcaaaaaaaaaaaaagcgcctcttaatagaaggtaataggaataacagccatccatattacaactgctgcctctttcccattgtcagaaaaataataaatacaaaattagctggctgtggtggcaggcgcctgtaatcccagctactccggaggctgaggcaggataatcttgaacctgaggcttgaacctgggaggcggaggttgcggtcagcccagatggcgtcattgaactccagcctgggcaacaagagtgaaactctcatctcaaaaaaaagaaaacacaaacaaacaaacaaacaaaaaaacccctcttgatcctttctttccttgttctctaatcataggttctttttcctaaaagtgcttttgcaatcgggtgaaatgtgtgaccccttcttaaaatatttccaaatacttttttaagtaaaatacccaggattacagaggggacccatgacattgaaatatagccatcaaaatgataaagaacaaatttgtgatatggtaatatgtttctttgtcctttgttgaataacaagtcctcatagtgggtctaattattgtaattttaaaataatgatgttatttcaagataatctgcaaccactgtaaatcagtataagagtatttgcaattttttgtgttgataccaaactcacacagaattacatttttggtgtgtggcgtatattcaaaatataagggaatgttacatttcagcaagagattggtgaaagtgaatatgggactgtttccctattcaagttcacagacttcagaacctctgagaatctcttttccttcttcctgcagttgctgcctttgtctggagctatcccactgttgtcaggggagtcttaccttggccttagcttcggtgtcatttcctcgaggagacatgtctaggttaggagcccatgttaaacatgcccatagctgcaccctctactcatttcagcactttgaatcatggacatttatgaaaagcattgtataatacccacttccccatttgtgagctctgtgagctttcggggtgtggtgactgtttctgccccatttaccgttgatctgccagtacctagcacagtgtcacaggcagcctttgaatacttgtatcttggatgacacaaatagcagttgaggcagatggaacaaagcttgtgagaaaagctcaggaggtgtgacagtcccaaagagtgaccaccacggcaaaggggaaggcacattggtggtatggtggcatattaggccattcttggattgctctaaggaatacctcagattgggtaatttataaagaaaagaggtttaattggctcttagtttgcaggctgtacacaaaacatggctgcttagcttctggggaagcctctgggagtttttgctcatggcagaaggtgggaggggtgggagcaggcacctcacatggtcaggaggtgggggttgggggagaaaaggggagatgccacacaatttttaaacacccagatatcacaagaactctcattcacgattgctaggacagcaccaagccatgagggatccacccctatgacccagacacttcctgccaggccctgtcccccaacactggacattacatttcaacatgaaatttgagtggggacaaatatctgaactatatcaagcgagtgcccaacgttattacttgtttgtctgaatctttgcagtggaatataagatccacaagggtgggattttatatgttagctgtttatagtttatatgaagatagtctgattgtttctcagtggctcacacatagtaagtggccagtatgtttcacatgtattatatcagtgtgtactttattcaggcctcagcttgatcctttgcaaaaatgagggagttccctcctaagacccctttgagcttctattgaagtctttttcttctctctacagttaaaggagatcttattgtagggcataactaggccctgtggggttacaatggtgaatcttacttggattttgcctcctggcgaggtgaagaagggtctacccttaaagcagctagtaagctctggtacccaagccggagatgagtcagcttctctcgttagtgagcagtggatagtggagctcagactgagggactgggggcaaggagcaggggtggttgtccaagccacggagggaggagaagtgtcaccactggggacagcacagacaaatgaatgatcttgattggggttggtgaaaccccgttaacagttaatccaacgaggtggcacttgagctggggcttgaagaagtgaatatgatttcctccagcagaagggtaagtccaagggaagcatcgagggacacaagaataatgaagagtcagcaccataaggcagggcgagagcaaaataaataaataaaaaagaataatgaaaaatagttaagaatggtgcatgcagaacactgtcagcagtagtctggtgtccttcttttgtgggtaactgtctaaaaagaaaatcttttattttgttacataaagccaattcttctattttttaaatcgtttgttactattatattaaaatagagacaggtcttgctgtgttgcccaggctggtctcaaactcctgggctcaagcaatcctcccgcttcggcctcttaaagtgctgggattacaggcatgagccactgcccagccccttcttactctttaaattgtaaaaaaaaaaaaccatgttttaaggccgggcgcagtgagtcacatctgtaatcccagcactttgggaggatgaggtgggtcacttgaggtcaggagtttgagaccagctttgtcaacaaggtaaaaccctgtctctactaaaaatacacacgggcgtggtggtgtattcctgtaatcccagctgttcaggaggctgaggcaggagaatcacttgaacccaggaggcggaggttgcagtaagctgagatggtgccactgcactccagcctgggtgagagagtgagactctgtctcaaaaaaacaaaaataaaaaacatgatataattgggacaagaagcactgtgtattgcacttggcaaaattgtggaatgtacaagtcactaaaccacttgtcttcatggaaagaaggagggagaagattttaaatttttctcagacaaattagtgagcttctattgctgtataattgacagtcaaatgcacccatttcaagcatacagttttgttaattatacatatctatgtaatcaccacccaattgaaatagagaatattttcattactccaaatgtgtttcctcatcccctcccagccactgttttgatatctgtcactatagcttgtccattattttcagcataatggtctcagattattcatgttgttgtatttatcagttcatttcatttcattgccaaataatacttcatcgtatggacataccacaatttattgatgtgctggctgataaactttagattgtttcccatttttggctgttattgctgtgaacattagtgttcaagactctttgtagtcatgttttcctttcttgtgggtaaatacttaggtgtgtaattgctgggccataaagtagtctgtgttgaggattataagaaactgccacacttctccaatgtccttgaaccattttgcaagtgttccagttgttccacatccttgacagcttggtattgtcagcctgactgctttctgtacacagtttgtagggttagtatttggccagaatcaatctcatgtgatgaagggttgctgaatagtttttggatgtttttttcccccccaagacagtgccttgcgctgtcacccaggctggagtgcagtggcacaatcttggctcactgcaagctccacctcccgggttcatgccattctcctgcctcagcctcctgagtagctgggactacaggcgcccaccgccacgcccagttaattttttttgtatttttagtagagatgaggtttcaccatgttagccaggatggtctcgatctgctgacctcgtgatccgcctgcctcggcctcccagagtgctgggattacaggcgtgaggcactgagcctggcctagtttttggatgtttaaaaatattttgaaaattcacgaggccaggtgctgtgtgtaagcccagccctttgggaggctgaggcagtgcgagatcatttgaactcaggagtttgagaccagcctggacaacatagcaaaactgtgtctccaccaaaaattaaaaaaaattaatcagccgtggcggtgcatgcttgtagtctcagttactcaggacgttgcggtgggagattgcttgagcccaggagttcaaggctgttgtgagccgtgattgcaccatttcattccagcctgggtaatagagcgagaccctgtctcaaaaaaataaaaattcacatgagaagaagtgtatagttaatgaaaaccatcttggtgaatgtgtttatcatctcctcttagtttaaaaatgctcctttactcatcttcctgaagttatggacctaacaaaaaaatccctcacttttcacacatggtatagcttgctattacagtgaagtgaagttgttaggggcacaatctgttttcccctcctgttctcagtgacctaactaatctggtttctcagcctgcgtcaggcttgaaggagcgcttaaatgaagaaggggagtttcttggatgagaggaggagccttggccctgcagtgaagggatgctgcagggatcctgctaggccagaatcgctgcattcaggagcagtgtgtgggatgcgcagccagacccttccagcccagtagtggtgggacaccgtctcttgcacggtgcctacatgcatattctaaaatgttgttttctctagaagtaacacagaaaccacagaaatggagaaaagaagttaatcccttgttccactaccccacacaaatgttgtaaatattttgctgtaatttttttatagttgttctttccttccattcaaatatttttgtactcctactgtatatacaatttttgtttttctatttttttactggacagtgtcatagcattttcttatgttattacatatgttccataataacaaattttttgaaacctctctcattgccatcttttctgaaacaaatgcccttcgatttaggtttcataatggatgttgtaggtctgtgtgattaggctttttttttgagtcttgctctgtcgcccaagctggaatgcagtggcgccatctcggctcactgcaagcttcgcctcccgggttcacgccattctcctgcctcagcctcccgagtagctgggaccacagacgcccgccacctcgcccggctaatttttttttttgtatttttagtagagacggggtttcactgtgttagccaggatggtttcgatctcctgacctcgtgatccgcccgcctcagcctcccaaagagctgggattacaggcgtgagacaccgcgcccagctgaagctttttatttgatttctgtgtcctttttttccataatagcaattttaacaggtatgtaattttctatacagtgaatgtacaactgcagttttctttaactattacacaatgtttaaagatttgtgttttcttaggatggattatcaaatatggaatctctgggtcaatggaaatagacatcttaaagtcttctgttgtattttgacaaatgatttgccagaaatgtaacactcctgagtcccggtgaggctcagagagcaccccagggcccactgtaacatttaaatattaaaaatggaaccagagctaattttagtttaagaaagtttaagttgtaatattatgtatttgtttatgttttgagacgagtctcactcttgtcacccaggctggaatgcagtagcacaatcttggctcactgcaacctttgcttcccggggttaagtgatcgtccacttcagcatcctgagtggctggaaccattggtgtgcgccaccattcccagctaattttattttattttttgtagacacgagatcttcctatgttgtctaatctggtattgaactcttggcctcaggcgatcctcctgcctccaccttccaaattgctgagattacaagaggcatgagccaccatgcccagcctaagttgtaatatttttttagtttgaactaaaggcaggacacctttagaaagacttatgtgtaaatgcaactataaaaagttttacagggcaccagtgcctgcttgggaagttgatctttgtctgtctcttctctgtgtgagtaaagcattgtttgatccagtgcttgactttgccatgttcctgtgtgacgcttatgccaagttgcagtagtcaggacctctacttccaataataggcagcacctgccacttacagtatggtcagtgaactgagggatttgcacaggcccttattagcctggcgtggtggtgggcacctgtaatcccagctattggggaggctgtggcaggagaatagcttgaatccaggaagtggagcttgcggtgagctgagatggtgccactgccctccagcctgggtgatagagcaagattccatctcaacaaaaacccaaaaaacctgctagctctttgaagggacagatgaaggaattagtgggcagaatttttgaacggatgttgtaaatgtttgtgataaggccttgttaaatgtatttctatttatttagtaaacactgagttcttagaatttttcagaaggttgttcctagccagggagacaggtatacaaactgatcattggtattaggcagtgtcatacaggcagacttgacctctcttgacctcctaagaatggtccttgagactggatgcttccttaccagaagatgaagagtcctcacagcctgtgccggatttctcactttctgtgggaatgtgtctccctgtttcagaatcaatttgtgctcttttgttgttctgcttaagtgggtatgtcatagcatctggccaactcctctgctatatttgtcctctgaacacaaaagggttgcatgcaggccagtggcctggcattggctgccaggagggacctgctggtcacagggcaccaatgcctgctccggaagttgatctttctctatctcttttctgtgtgagtaaagcattgtttgatccagtgtttgacattgccattttcctttgtgactcctatgccaagttgcagtagtcaggacttctacttccaataataggcaacagctgccccttatagtatggtcagtgaagtgagggacttgcacagacccttttgaaagcttccaggaaaaggaaggccaaccactttaggttaggtgcaccccagagggaagggagtgccctttttttctttttttgagatggagtcttgctctgttgccaggctggctggagtgcaatggtgtgatcttggctcactgcagcctccacctcccgggttcaagcgattcttctgcctcagcctcccgagcagctgggactataggtgcgtgccagcacacccggctaattttttgtatttttagtagagatagggtttcaccgtgttagccaggatggtctcgatctcctggcctcgtgatccgcccaccttggcctcccaaagtgctgggattcaggcatgagccattgcagtgccttttaaaggatgagaagaaattaggtaacaggtcacaaggttagagaagcagagtgaaaacctgcttaccctagcaagtgaggaggagtgaaagtgcagggcccagtgcagtgttgtgtgtgcgtgtgcatcacatacagatttgctggagtggggaggttgatgcaggacatggaagggagatgaggctggagaggtagaacttgctctgtcgggagtcaagaaccaatgaattgtagaaccaatacattgtacacttaaagctggggtggcgcgtatccctgatgtcgtgtgactttagtgtgagggcctcaacccaagttttgcatatagtgagtgatacaagggaaggactttgtctcctggaagatatctgggaacttgggacagagcaggcatcctggagcagaagctgttttaggaagagagtgtaatgaattgagataactttttcttttttggtggattaataatttcttgaaaaaggaaacctataaatccaaattcaagaatttagataacctgagagcgattagaaactgcctagcaaggtctttgcctggtatagaaccatcttattacttcatgcagaccatttgtgtgaccagatgtgtcatttcttttttttttctttcttttttttttttttttttgagacggagtcttgctctgtcgcccaggctggagtgcagtgacgccatcttggctcactgcaagctccgcttcctgggttcacgccattctcctgcctcagcctcccaagtagctgggactacaggcgcccgccaacacgcccggctaattttttgtatttttagtagagacgggatttcaccgtgttagccaggatggtcttgatctcctgacctcgtgatccgcctgcctcagcctctgaaagtgctgggattacagacgtgagccactgctcctgtcatttctaatagtaattagaagttaatttatataggtaataagatttgtggagtaaagcattttagggccatttcaacggaaaacagtggttcagcattggcataggtgctctgtgatgtaatggaaagaatactgcatttattgttggaagtcttgattggaaggagattgctgtatgatgaagaccggtttcagaaatacatgtttcaatactgaataggccctttgccacttagggttatttatttatttatttatttttgagacggagtctcgctctgtcacctaagctgcagtagagtggcacaacctcggtttactgcaacctctgcctcctgagttcaagtgattcttctgcctcagccttctaagtagctgggactacaggtgtgcgccaccatgcacagctaagttttgtattttagtagagatggggcatcaccatattggccaggctggtctcgaactcctgacctcatgatccaccctccttggcctcccaatgtgcggggattacaggcctgagccactgtgcctggcagggttttatacttaaaaaccattttatacctcacgcagagaaagaccaaggactacacctgtccagccatttcgtaaggctagactctcgtgcacaaaagtatttcggtaattttttcaacctcctttattttgtgatcttgcttcttctcaacccagaaaagatgtttccctttaaaaatagtcaaaatcaaacaccagtgccttggtcagtaacattttttacttctttgaagtaaatgctattgtttttttattcttggcataattcctagcctaagttgctgcacttgggcatttgtagcgtgcattctaatagaatcattttgggagtatttgaacgttgtgctagagaagactgcagcagcaaatcaatataacacgatattctctgcatctctcagagctcctggtggcatttatcttccttcatacttttttatttgttcttacttagtttgtggttatgttttacgagtggttttttaatgaaaagttgcaaaacctagtacaaagattttcccaaatgttaaccatagcatatttgtgtgacagtattctctctcccttatccctccccatcatcctccccgcaacacatagtttttataattctgaaccatttgagaatatgttgcaaatataatatccccttatcaccaaatacttcagtgtctatttcctaaaattaaggatattttgttcccaagccatagttaacaatgaggacactaatactgggaggccttaaagctgctacccgtgtccctgtaacatgtccccatcgtcctctgagctcttacttcctgacagacacattaaggtgttgtaggctcatcttgggtgttcccagccccctgtcttgatcactttatggtttttgatgctgttgtaaaggttttgtttcttaaatttcattttccattttggtttccactgcagtattcatagcacctcagggctggccctgtggccttatcttggcttcctgcttacatcctgtgactgtctccatcctcagagtgtcccctcctagtttgagtaactgcagtgaatctgagaagtcctgcagtctttccagtctgtccttgtcatctaaaacatctccataggtgtcgtgacaaccagatgtttgtaggtatttctttttagttgtcattcattgactgcttatctggttattattattttttaaattataatttttttgagaaggagtctcactctgttgcccaggctggagtgcagtggtgtgatcttggctcactgcaactaccacctcctgggttcgagcagttctctgcctcagcctcccgagtagctgggattataggcgccgccaccacgcctggctagtttttgtattttttagtagagacggggttttatcgtcttggccaggctggtcttgaactcctgacctcatgatctacccgcctcggcctgggattacaagcatgagccaccgcccggcctggttgtgtttttataagtcagggtcctttcccagacctccacatacagcactcttttttttttttttaaactaaaagtgtttttttgtatggatgggatctcgctgtgttacccaggctagtcttgaactcctggcctcaagcagtcctcctgcctcagcctcccaaagcactgggatttacaggcatgagccaccgtgcttggccagcaactagcttgttaaggatgtttggcccctactcagtggggttggtaagctcacctcatcctttcctttacaggatctgtggcaaatcctagccccctttgaatccttttcagacttcgtttcccacaacactcctgtcagagttagcaggagagtggaaacaagtactagattatttagtagaccctagattttctctacaaatgtaaaatgttatttttactgttgaaaatcagcatatgtgtagtacagaaaatttaggaagtggaaaaagaaaaaaaaaagactgggaaactacaacattcttaatgccctcttatatttattcaatgaaatctatgcacaagtagatctaagacaattgagtcaggtttaaaatgtagtatgttttcctttcctcttcttaggagctctttagcagaaacatagtagccaagacattttagggagcttacccaactttttcttgatatgtagcaatagaaaatggtgtaatcagaatgcagtcaaaattgcatttgaattgtagtttaagtcatttctttttatttgattaatttgctttattaagtatcttctggattccgctctcctatgcttgcaaaatagtaaaagagaacaaattagaaagagaagaaaatattttcgcgagaaatgactgctagttttcattagcagttgttagtgcaatgacagttctgataaggttcccaagagcactcattgctacagtgagaactcagaattccatgggtatcttttcgggctcggtggttcacgcctgtaatcccagcactttgggaggcagaggcggatggattatctgaggtcaggagaccagcctggccaacatggtgaaaccccgcctctaggaaaaatacaaaaattagctgggtgtggtggtgcatgcctctagtcccagctacccgggaggctgaggcaggagaattgcttgaacccaggaggcagaggttgcagtgagctgagatcatgccactgcattccagcctgggcaacagagtgagactccatctcaaaaaaaaaaaaaaagaaaaaatttccttgagtttcttatgttttgttaactttctgttatttgtacggttgaaacctcagaggattaggataattgccttttccagtttccctgagctgctgaaaataaactttcatatttttactctccatactcagtatagtttacatctttaaaagtgaacatttatacatgtattacttacaaaaacactcccttctctcagtaaagacccaaatcaatccactagcaaactagaacaagagaagttagtgctgggtatccttaaatgtgttctgagaatgattttatttgcgggggtggggggcgggtggagcagagaggatgctttggtggtgaaataattttggggtgcttgggttctaagaggatcatggtgtacacgaacacatctgaaggaaagaaacctggctatctgtacccgacatttgtcaaacttcactgacccgtgagccttaattttgaatacaaccccttggacatagggttctctggagcctcctttgagaaggaccaaagtcttgtaaagaacgttgagtgtagtttttgtccctgctgccaccacctaatttgtaaggatgagggcatcagtaggtagcttgtaatcttcattgggttctcaaattttaggtgtgtgtacaacagaggtgtgtttggtagaggaagggatgactgggatcatgagttaaggtcttgcatactgaggtggtggggcagtttcagagggaaccaaaacatttgttgagtcccagcttttcatcaggactcctgtgctttgtgtcagaaatagatgccatccctttttctgtaggaaggaatttatagtttggagaaggtagagttggatttggaacctcagttggcctgcgttgagaactgctggtttcctgctcagttaggccagttagggggaaataagaagactgccaaaacctgtggcttgtgtctcagttccctttctccagccactgcaccagagtttgggcgccacacagatggttctcagtggcagttcgcagagcggtcctcatttggccggaagctactcaggcagcctctgtttcctcacttcagcggggtgggcttgggtgtgggtgaaagagataagatatttagcagtgagtcatttttttctggtagtttgacctggttgctttgaggatgattgcttcatcctttctcgtactttacccactgtcccttaggaaaatgggggtcctgtccggccagtgttgttggtatctcaggccctgtggatgtgggattctgcatatctcttgaactgcctgtttcctcccaacctccaaaaggttataatgtccccattcttctatgagtgaccaacatggaatgccatgtatgctcaaaatatgatttctcattggcccagtgtttgtaagaagaaacctctgatttagggtgtgcttctttatctcctgcatttggggttgggataggcagaaatctgttggaaaaattttccgcagtgaaggttggatgggtgttctgtcctgtttttaattctttgaccacaggaccttttctcttgtaaacacttaaaaacctctaaggctaatgagcaaagcctggtgtgatgtatattttaaggaaaggtgtataacaatacatgtgtacaaggagggaagcggagaagggcctgggagtagaagggatcattcccctgcaattggataagtgacatttaagctgcattccatgtaagcttttgggcctggaaaccttcccctcccatcttcctgagatactgtgcttgttgtgagctcattcagagtaataaactgtacccgtaattcatgagcttgcaaggccttctttaaccgcttgcagccaggagactaatgacaacatttaaaattatagattgctcattttggagtctatctgtttcgagttatgaatgaaatttcttagccacttactggacagtagaacctgtttgcaaagacccagtgtcctcatgttgtgtgtgtgtgtgtgtgtgtgtgtgtgtgtgtgtgtgtgtgtgtgtgagagagagagagagagagacagagaggaggggtggagaaagggagcaagcagtcccccctttatgtatgattcttagaggtgttacaggatgcagtaaccatgaggactctggtgttgcacagaagttgaattcttacttggaaagtttaggtctgggacggaagggtgacagaaaaaggttaaggttacccacactctatcagtggtagttatcaatgagtgactgttggtagacagcaagcaaatgatactggggtaagaaggttctggatatgaaagaactaggtaagattgcaaatgtagtctctctataaaccagatactcaaaagcaaatgtttaaagcagcgtataagtaactgggttgtccataactatttcagaaatggctacaattactcaaatcccaggtctttaaaaattccaaaggaacagcaagggccacataaagaggaaaatctgcaaaatggtagggtggtacctgagttagcaaatgggaacttgagctcttctttactataaaatttttttcttttttcacagagtgccgagagtattagcagacctttaatgcatttggaagtgacaccatattaatcatgtggatttcactttctgtcatgagttctatacattttggcttgaaatcagtcatcagtgtgatattcagaggtttactacatctcattcatacctttattttttttctagccctctcacccgggtttcatctgagtgactagaagtggcgtttatttattgactgtggaggttaacttacactgatggatgattgcagtccattttccactaagcgagtattacatgaaatgagtattgttgaccacattttattttctcttgtggaattaactcaatagtctgtaagtccttaaaagtagtttttgtggggtaagtctcttccttttcccatagtgatttgataggaagactgagtgaaaaacaatagttgtcttgtatatttgaaacgtaaggaaaattatgtggatactcaagcattaaattcaaatcagtaaatggggctgccctctttggtatgttggtaaacatgttttattattagcttgagaaggaaatgcctggtatagtgactaagactgtaatagggaaagagaactacttttctggagcagtaaaagttttgactaatatagatgatcagtgtttgtgaattttacgttggtatgtgtttttggtcattggtaacttaacagaaaagtatatgtcaagagaaagaatagtttatagctctttggacataggagggaaacgtgataccttttcatctttctgaatgaaagatgatgattcctgatctcaagtcttcattttacaggtattttaccattattaccaacatgttacttgaagagtaatgaagaggccgggtgcagtggctcatgcctgtaatcccagcactttgggaggccgaggtgggcagatcacctaaggtcaggagttcgagaccagcctggccaacgtgctgaaaccccatctctactaaaaatacaaaaattagttgggcgtggtggcgtgcgcctgtaatcccagcgactcaggaggctgagacaggagaatcgcctgaacctgggaagcggagttgcagtgagctgagattgcgccactgcactccatcctgggcaacagagcgagactctgtcttgggaaaaaaaaaagagtaaggaagagaaagctttccattgttgacttagtagttcaaagcctaatggtgtttttgccttgataatcaggaagatttattcctatgctttatattgattgtggtcactgtactttcttttacatgttttcttactttgctagatttgttaatttttacggtgacccacttttagttaagtgagaatttctttctaaatcaggctgtccattgcctaggatagccaaccttaaggcaaaggataacatataacctcattttgtatctgtttattgtgatcacaggttatttggtggttatttattttttatttattttttgagatggagtcttgctatgtcgcccaggctggagtgcaatggcgtgatcttggctcactgcaacctccgcctcctgggttcaagcgattcttctgccgcagcctcccaagcagctgggattataggcacctgccaccatgcccagctaatttttgtattttttagtagagactgggtttcaggttggtttcgaactcctgacctcaggtgatccacccacctcggcctcccaaagtgctgggattataggcatcagcgactgcacctggcccaggtggttatttttcaaagtgagcaatggttattaagttaaatgacacaggattttgagtaaattcgaagttatgccaggaattataatcctaattgataatttataaaggtagcctacagaattttaggtcttactgtgacaaactagtagcaactggttcctcgaccagctttctggtggaatgtgtgatgatgatgtaaggcattcatcctataggtagcgcacctcgaacttgaacattcataggcatcacctggggatcttgttgaaatgttgcacattctggggttcattctgtttcaggcagggcctgagggtgtgcctttcagataagctcccaagtatgctactgctttgccttgagtagcaaggctatgggcagtaatcctgcacgggcagtgtggctggccagaggcttattgcctctcatgcaaagccacttaactcctggccttccctctttggtgggtgctttttaagccttagggcttctttaaagtccaacatttttgttcataggctttctatacatttattggaagcactgtttaatatgcttctcacctctttgcccagccaaataatacccaatgtgagaagagttgctcctcctttgttattatttcaacaatgtgattaaacaatttgggaatgctttgaatactgacctccgctcccaaggacaaaacccaaactcaatcactattaaacaaaacaagcttgttgaacaaggaaatagaagttttcaacaatttgacagtggtatttcaggtgcagaggttactgtttgtattattagtgtaaggtgccttctttttagttcacctgggcgaatcctggctgcaagtttaataatcggtaatcttgaaaccagcattaaacccagggcataatttagtggttgggagcactgggttgagacctcaacaacagtgataattcgtttaagctgtgtgactctaggcacgttgcttatgttctctgggcctctgtttcttcagctgagagataatcacagtctcaaccttggtctgggttgctgtggggattaaaggaggtaataaatgtcaactgctgtaaacagtcctagagtaagtgcaggtgatagtggctactcccgctaataaccagccttgataaccagctgagggcgcagggctcaggagcctcaggatcagctgcccatctcgctgcgcagcctcagttgtcccagcctccttttgctccttttcctccctcctggagctggtggtagagaatggacataatttgctgatccccccccccccccccgcccacccactgtaacttggttagttaaacctgcactttttggtaaaatctggagaggtgataatttattcactttttttagaggactctaaagccagaggattctaagcctccaggccacctctcccagtccgtccaagttgcagacaccagagagcagccagctcatggttacagtccttctctgaagcagccagacaatcatcggaaggcccttcacagactcccatatctagatgagtgatgctttacttttgacctttgtagcatggcctttccccctctaaccctttaatcatctctttaaaaaaatcaatcaacaaatatttattgaacgtttccttgtaggctttaaaatccacccataggctgctctgtgactcttaaggatttctgccctgcatccagagagaatgcagtagctctggccaatttacttagtatctgctttcttagattatgagcattttctgtttttcctgggagtccatgggtgtgtccagtgctggcagggggcaccatcaggttgcaaggttgaggtggtgcatcttatctgcttggtgaggtgcagggaggggtggagcagctgttttcagcatgtgtttcgctctctttattggccctttcagctgactgctttttacaaccagttatgatggaacatttaagacttgttttggggtcaccacaaccaagttttctcttctcactgattggcaggaggggtgcccactgggagccagcacaagtctgggattttttggttggacagggtttcttgcctgcagtttccagctggtaaatgagcctgggcttgaggaagttgtcaaaggccttccatcttttaaatcttggccatgtagctggtattgttgaagaaaacgtgaagaaggattttaagaaatggccattgaagattgatgttggccggtcatcctgcacactgtccctcctttatgtagcgtaatgcaggatttcttattcagagagcaactccgctgtgggcctaccccaggagaaaagggtgcagggagggtgctggctctggctaattctgtcactccactttggagaggggaaaagcctcctgagcagctgaatgcctttggttgtttccagttttcgccacgctaaatttcattccccatcctcctcctcttgccctacaacatagcttagcttagagttaaaattggtttcattctttagtgctgtttctttctcttcttgtttgcatttgtggatgagtttagattcaaactagaatgtggttctgatgtgtgagtaaaagcacctcattttcccctaaccacagcctcatcactgggtacttggcagaagcagacaccattgttgactgaaaataaatggagttcaaggggtcttcagggttcttggccttgattcctccccacccccatctctttggagcacccctccaatatctaattgttaacattctgtgtgtgagagatgtattatgtattaactgtttaaataaagtcctgtgaattccttggacagtgtattatgaatttacaagggagttcactatatctttaggtatttgtgttatatgcattatcttacccattaatacattattctgaacttttgtaaggaaatagttttctactattcatctgtggttttggttacagtttttaaaatgcagagacaaatttcagttccatttctggtggcccacttgtgggaccaaatctatctttctaaacgtcagatttttagaagctctaccagcaatcctcgaggcttacagttttcccgggtttctgttggcaagtaacttcagcttttcgtactttgagatcacaagtggcagacgctcttaagtgcgtcacagttaggttgttaagatttgagggggacaatctcctttggtgtcgagttcatcatccacagcagtaggaacaacaaaaactcaagaattccttccccctgcagtgagccagccagcctcttttctcattaacaacatagtcatatttcttttttttttttttttttttttgagacggagttttgctcttgttgcccagggtggagtgcaatggcacaatctcagctcactgcaacctctgcctcctgggttcaagcgattctcctgcctcagcctcccgagtagctgggattacaaacgcctgccacacgcccagctaatttttgtatttttagttagtagagacagggtctcaccatgttggccaggatggtcttgaactcctgacctcaggtgatccgcccgcctcggcctcccaaagtactgggattacaggcgtgagtcaccgtgcctggcccaacacagtcacatttcataaggatcatactgtttatttagtccacattctggggaaaggggaaaaataccatcttccttaaacttaatttttaggtacttaaaaattttttttgacttttgttaaaacctaggagtaaaacacaaggggcaagtggagtgaaggaaaatggaaggtggggaaataggcagcttattttttttcctgaccttacccattgtactttgaagttaatatatatattttatattaattatattattatatataatcaattatattaatgtatattatatatatatttttaacattaaaaaatttagactgggcgtggtggctcatgcctgtaatcccagcactttgggaggccgaggtaggcggatcacaaggttaggagtttgaaaccaacctggccaacacagtgaaacctgtctctactaaaggtacacaaaaaatgagctgggcgtggtggcaggcgcctgtagtcccagctactcaggaggctgaggcgggagaatcgcctgaaccccggaggtggaggttgcagtgagccgagacagttccactgcactccagtctgggctacagagtgagactgtgtctcaaagaagaagaaaacattttttcctgttgcccagactggagtgcagtggcgctcactgcagcctctgcacccccggattcaggtgattctcctgcctcagcctccctaggagctgggatcacaggcatacggcaccattttcggctaagttttgtatttttagtagagatggggttttgccatgttgcccaggctggtctcagacgacatcaggtgatcttcctgcctgtgactcccaaagttctgggattacaggcgtgatcccagttttgttttgtttttagtacattgcaattaatgtttacattcaaactttaaaattccttggatctttgttttcgggatggggttgtggttcttctcccccaccagaaaaatgtgatttagctgcctcatttttggtatttttcttctctgatgacttacctctattgaaaactttgtagtctgtggggagaaattttgtatgtttctgtacttcagctactaggttctccctttacttatgtgattagtttaatttaagatttattactaggagctcatgagaaatatgttcattgcccaaatttgctaggatagcagagcctagtttcatctaatttgcagagttcattctcatgcataattcatcggtccaagaaatacagactcccagccagcgtagcttaaaacttaatgattttctcaggagccagtcaggtgtcaactaaaacaagcacttgataagctatagaccctgacatggttttgttctgctcaaaactttcgagtttccattctaatcttgatgcacagaatggttggtaacggttcttcctccttaaatttttctggttttctgaaagggtgcagggaataccctcaccccttagcagcttctagtcctcttccttaatcctttacctgttttctcattattatactagtgaattttgtttaattcctttgtgctggtttggaacaagtgccatgttaaatatcatttctatgatggagtgcattctaggttttaaactgcaggtttataaatgaacttttagaaggtgggcgatttgaaagtgattctgtgtggaaatagaagccagaggggccagattcaaaggccatctggatctggagcctcatttattgtcaccaagaactggatgtttgtgctgtttgtcatttccctcaactcagcctctctaaggataatggcttttcacagaagcctaaatgtaatgctttcttcattcccttacttccctttaaaatcttgcatataaacattgatagaaatccagaaagagagagtcctgttttctcccctgtggttaaatagtgacggttgatctactgaataccttccttccttaaaaacaacgagattaggtaattacagcaaatgtggtcattagcctcatctgctcttattatcttattatgtatttgttactgtgagagccaaaagatgtgaggataagccagactctccctactttgaaaagacaggaattgtaaaaacacgtggtcactaatggaatctgcagtttgatccaccatgacttttgcttactggtgaaattggttttcttatattttgtcaacagtaaataggctgtgtgcttggataatagttaggctaatataggaaaatttaatcatggcttttctcaagtttaatttgaaagagtgcagtggggaagtcccctgcagggtggaaatcgtagtagttgaacatgagtgacctttttggttgactgactgcccttcctgtgaagctggcccaatatctttcccctgtcaggattacttcctgtctcagcctgaatagtttaagtagctgcaagattgatgttggatatctctgggaaaattccattctcttgaatttagctgacagagtacctctttcatttctttcattgtgttccatttttgacctcggaaggaactaaacattatttctcatccaacagactcattgttcatcatctttgggcttaaaaatcctgtgttccctcagttatttcttttatgaaggtttcaggtgcctcattattctctatgtggagactgtgttagtgtctttaaaaatcgacattccatgttttaagcatctagtatacattataagtagtgtgatattttgcatccatttcactcagccaccctgcttctaggaatttggccacaaggatgtgtagtaagtattttactgtgtatcccagtgaaaaatggaaaccaataggggattggttaaattatggaacgtctgttccgtgcagtcattaaaatgaaatggtagcaagaatgttgactgacataaaataagtgaaaaaagcaagtgagaaaacagtatttacagtttaatttttttgtcttatcttggaaaatttagtaaatatatgtatacatataatatataaagcatacatatataaacgtgtgtgtgtgtgtgtatatatatatatgtatgctttgacaaatgaagtggtggtgtaggcacaggtgggaggggcaactaatccacactgagggatgacagaaggcttgaaggacagggattagccaggtgaagatgggattggccagtagtgtgttccaaagtgaaagtggaaagcccagaggtgagaagtggcttggaagagtttaggaagagggatggatgctcaggagataaggcttatctatattttctccaggaaacgtgtattactctgtaataaacaaaaaaaatggtacctagaaagcttcttcttccaaagaagaaagtcaaggaagcagcaggaaaacagattgctttgttgctttaaggctgtggattttggactcttaatgagattaaggccagggaggctttcccaggttggctggatgggctggggctgggtgtctctggtgaaacagatgaattccagataggtaatttaatttccagaggtgccgcacaaatgcctttgcctcctgctactggttagagcaaaacaagcatgtgatttatgtaaaaatacatgaatattagtttttatcaaaaccctgcagaagaaaaacagtagaaaaaatgatacttcctgccatagcctctttgtggaatgaaattaagaaaatcaatattctttacaaatgactagtcacagtggaactggtctgttgaacctaccctttgtagatagcattaatacatcaccctctcccacattactccaaccataacagaaatagtgatttacataggaaaatgcgagctgaattaaacaaggatggccctgaattctgctgtagggattcttaagatggcacaagctaggctgtgaatgccttggcctcccctcttctcccctgtttctgggtcatgctcccctctggatttcttgctgggtagttctggagggaaggggatgcccttctacataagcatctgcaggtgcagagatgggatgggcctaagtgttctgagatcttccaggagatgggatttcaatctccagaattcccatccccgcttggctctttggtggcccagttctggaagttgagatttagaccaagattatagtcttaaaataaatcttggatgtgactcctgccaggatgacttgtaaataatttcgtgccagaaaccgagctgactttggtttgtgggctggaggtggctgattccaactctgggaattcattctaatttttggtgccctgttcaccctgagttgtcttctcacggctgcctgcccagtccctgtgtgggaatgggaaccgtcatagagtgaatatgaggacttcacatcctttgggatgcgggtattttagttccagggctaacatggcacgttggcagtgagatagttgctataataattctctaataagctgttggtctcagagacccttccgcgtggcgtatcaatggggcttgtgacagtaggagttgggatcttagaggattcatatcacccttgctcctaatccagtaacccctagcagtgcccatcaccagcctcacaccaccttgtaccagtcttgggcatggtgagtctctctggtacacttttacattagaaaaagtctgaagaggctgggcacggtggctcatgcctgtaatcccaaaactttgggaggccaaggcgggctgattacctgtggttgggagttcgagactagcctgaccaacatggagaaaccccatctctactaaaaatacaaaattagccaggcatggtggcgcatgcctgtaatcccagctacatgggaaggctgaggcaggagaatcgcttgaacctgggaggcggagtttgcggtgagccgagatcgcgccattgtactccagcctgggcaacaagagcgaaactccgtctcaagaaagaaagaaaaagaaaaagtctgaagacttgtgagcaagccttttctctcccataggtaaatattcgatctgcctttctgcacaatacaaaagcaaagtccttaacacaagccacagatggcactctgattcggcttgcaaaaaaggtaactgtttttttttttcttttttcttgtaatattttccttaaaaaatttttttcctcttaataccctaagccccaaaagggagtttgtattgtaaaatattctttaataagtcacttttaactacgtgaaactgggggaaattttccacatttggaccaggtccctggattgtattgccagaggtgtggcttttggcattaacttttatttaatttggatggctactttctagagaaatcaatttaacctaaaaaattgtcatagctcattctacatatgcacccctactgttctagatttaaaaaacaaaaacaaaagctttctaagtcagttttgattttgagacggagtcttgccctgtcacccaggctggagtgcagtggtgcgatcttggctcactgcagccttcacctcccaggttcaagcagttcccttcctcagcctcccaattagctgggattacaggcgtttgccaccacgcctggctaatttttgtatttttagtagagacagggtttcactgtcttggccaggctgggctcgaactcctgacctcgtgatccacccgcctcggcctcccaaagtgctggggttacaggcgtgagccaccatgcccggcctcagtttggatttttaaaaaaccaatcttattgaagtaaaatttatacatgcagccatttcaggtgtacactgtgataacttatgacaactgcacacatctgggtattaccatcccatcaatatatgcacctcctgtcacccgagaaagctcccttgtgctcctgtcctgtgcccccatgccagcgccgacctgccttcttgcactgtagattagctttgcctgttgtaaatgccatatagatggaagcacttttgtgtctacatcccttcactttgctttgagattcatccaggctgtgtgtatggtttgttccttcctgttatggttcagtagtctcctctctttctgtctttctgtgttcttcctgtgactcactcattgtctgtgtttctttttttccctgtaagcctggcctggtcctttcgtgattccctgtagtctttttctcaagtgggcattaaagcaaccttatctttcacacacactgaaagaacctagtaactgagagatgatccagccagattctgcccttacctttacccctcaccaccccactaggggacaaaacaagcaaatatactgactgacccaagccttgttgttccgacgaaaacactggagttcagcatctttcccgcaaaccgagctgcagcctccagtttcagaatagtgccttccataaaatctgtgggagttttccgtttatgttgcttgtttttaaacaatcttcttggaaaagaattcagtgctgttaatggattgccgtcggagctttttttacattacacctgtcctctgcttcctgatctccttttgatggttagggagaatatgttgacttagaatagcaaggagccatggcaccccaaggaaacaggaaaaatctcagttttcatggatgagaaagtcccattctattgtctgtgtgtgcctgagtatgtacactgtaacatctcatttttagttgtatgaagaaagcgctgtggctgagaaccagtgtttggaggttggggtagggtagcctgggttcatagtcactacatatcccagctccccaagccctaggaggtactgcacaagcagtacagacagggtcttgcatttgtgcctcttcactggtgacttcccattttgaagagtgccagcttttctgggaagtctgctgccaacactgagccgagccagggttgctgttcacatctaagcaggctgttggtgccgcggcagcatgctgtccttgagagcactgtggaatttgcagtgtgccgtacagattcagaaatggtgtatgtttcttgtggcattagtgttttgacttgcaaatctggaaaagaacaggaagtcttggtggaaacactctctggctgatgtatagaaacctgtggagttaactgcattttaagcaccaattattagaaaatgaatttcttcttacttggggagatttctttcagatcttaaatacatttgtcatctaaacctcttctcctaggggcagatgatccctgccttgggcctaggagagtagacattggtaattacctttggcctgtgtctccccaaatatccttataccttctgctggcccatggctgtctagaagccctcatggaggtgctgcttttgtttttatctcttcatttggggagaggatactgcatctggacccaaggcccaaggtgtcctgatgttgagtccttccaattctgggtagccatgaacagtgatgctgttcatagataaggtcaaagggacgggcttaaggttaagctcagttagtggatggcagaggctgtattcaaattaatcttgatccactctgcaggttgctgtggctcctgtttcccccactcctgtggtctcctgctgtgattctgtcaaattacccatttatttataacatttgccactacttcaaatactttgttatttatgtggttttggctttctctgctagaatataaagtaatacaataatttaaaaaaatgaagagcaagactctttttgttcttgaggtgaatcttcttgcttataaatttaccccaagcacctggaacagtgcctggcatgtggtacttaagtatttgttaaaataatgaataataagtaaacggcattttgaaagttgctgtcattcaaattatgatttgtggtgttagagttcttataggcagggcttagttttaataaatgacattgagagctagttataaatcatacattagacatagtttaatcagtttggtgcttgtgtatagaagcggacagaaccctggagatacagttgaggcctcttcagtgagaggagggaggaaacttgccttggaacagtgtcacagacaatccatggtacatagatgccagaggtagacactgtaggttagggaaggtttggggactgtgaaatgaatgggcagcaataattagtgaaatattataaattgcctttattactgttggtttcccgactgcttcagtaaaaccaaaaaatacgcacatacttagcctgatgtgtttagttggggttgccgttatagaaaagcctttcagaagatacagaagagtgatcctttcagcagcacatatactaaaattggaatgatacagagaagattagcatggcctgtatgcaagtatgacacagaaatttgtgaagcattccatatttttatgtattggaaaatcaggtttggattatgcagtttctaaaattgaagaatatttcatccttaccaatatgttttgaatagtattttgccttagaaataatttttacatactaaataatacgtatattaatgaagaacaaaaggaaacggaagagcaacgtgcttgtccaaaaattctccatgtgtataagtgaattgattctgccagaaagaagagtttagacatgtttttattgcaaacaacttccttcagatgccaggtagtagacaatctacaggactagggaggatgagagatgtccctttagaatgctgtttgaacccatgatggattaattacgaaggttgatgcccatctataccagctggctttccaagatttatttgacccgttgctttgtcttggagaactgcagtctctctcatatagctttgatctttactgtgggaatcatagtgcagtcagtacaccatagggtcaagtgctcagtctgccattttaacacagaaaacttacatatttagaagtagtcacgtatctagagtgtgactggactacctgaataattgagatgagatacggtcaaaaaagtgagatatcttcatctgcttcaggtggcttttaggctgcaaatccctagaagttgtggttgtccggaagttaccaaaataaatgagtggtgtttcgcccaattctgttttttcaagttctgtttcaagttctgttaaaattgttagcagaactgggaaagtgcgttaatgaagcaagcaagtcctgtagtgtgtgctaactgggcccagtgtgccgtccatacgttgagtacgttcattagtgatttcagacatgagtttctcagggctcccaaatttatggaagaagtaagtgatgacttccaaattctttgtcttcagattgatttaaagtgactgagggcataagctggaaccaagattagaaagaacacagtttacacgagtcctgcttccttttttttttcatcccgtgaatgttatcttcagtattttctcaactaatacgaaaagtaccactgaagtggggtctgctggcttgaaaacatgtgtgaaatacagattctatgggttttttttgacatggagtctcactcttgccaaggctggagtgcagtggcacgatctctgctcactgcaacctctgtctgccttccgggttcaagcgattctcctgcctcagcctccctagtagctgggactacaggcacacgtatttttagtagagacagggtttttgaactcctgaactcaagtggtctgtccacctcggccacccaaagtgttggcgttacggacatgagccaccatacccggccagattctatgcttctgtctcagattcagttgctaccctacagaggtggccagttaggagtgtttcataatgaagattatgtctttaatcattgtgaggtttgtggctgaggacagtagtccttatgcttgtgctggttagaagtaaagaaattttggactgttcttgctattttttttgagatggagtctctctctgtcgcccaggcaggagtgcattggtttgatctcagctcactgcaacctctgcctcccagattgctgggattacaggcacccaccaccatgcccagctaatttttatatttttagtagagacggggtttcaccatgttggccaggctggtcttgaacccctgacctcagatgatcctcctgcctttgcctcctgagtgctgggattacaggcaagagccagtgcacctggcccactgctattgtttttaacacagctttgaaagcagtatgatttggttaataggatggctacagccagacaccctgggtttgaatctcagctctctgtggaatgaccttgggcaagtcatttagccagcctgtgcttcaagttgcttgtgtaaaatggggataatagtacctttgttatagagttgctgtggggtttcaatgagtgtacttttggtctagaatgaatcttttgtagacagtcttgagtataatgggttgtgattttgtgcttcttgtcccatcagttatttataattagcaatggtactttgttgcatgtacttaatttgattttatctatttagcagtagaattttttttcatcagaaataatttcttcctgtccctctgtgaaatccccttgagaaaggggtaagaaatagctctgaggaccagttgaaaaataatcgatctgaaacacaacagacaatattaacatgtcagttttttctgttttgcaggaaaatgcaagtctcatttaggataatagtttgatttcctgaggtggttatggttatggttttgtgtaactgagagtcatttaaaggtgatgcataggtttgcaggtagaaatacagttttgtttgaaatctggggtgttcaaccgacattgtggtaagagtaatttcccccaaaactccctaggaaatttttaccttttacttcagtagacctggagtcttgcctcttgaactgaaagtgaggttgaacttcatccgtaaaggtgagttttccccaaaggtacctgaatgcttgccgtgtaactgatgggtccatagtccactgccagaaggtaccctcttgcgtctcggaggtgctggttctgaagtatcttttttgagttttagttggagtttctcttgttgagaattttgaatctcagaaaatgccatggctgcgtgggtgtttgttttagctccacacccttcatcttcagggtggatgcacccttgggtggcgttgcacacagctggcgcgtggagagccgatccctccagggtttgtttctttaataccagacccgctcccacaaaactggtgtatttaggcgtcccctcttctcctgtgtttgttgctggccagcagtgcctgcaagttccagcagatgaggtgaggatggacagtgaggtagaggctagtctgtttgcctgggttcactgaagttgctaggttttgagtttgctccagattagtgaatatatcagctgtgagaataagagtgattaaagcatggtggcgcatgcctgtagtcccagctactggggaggctgaggcaggagaatcacttgaaacctggaggcggaggttacagtgaatcgagaaccctgccactgcactgcagcctgggttacaagagcaaaactccgtttccaaaaaaaaaaagattaaacaaataggacttctccatttgtatttaaacttcaaagagaaagctgaactccaaggcccagctggaggacacgtggatccagccagcatgttagatgtaggcaattggagaaggacagggagacagcagtgaggtgcagggggatgaggcacatagttgtctacatgaaacaggcagatctttgttttcgtatacctagaatagtttccatgtccagcaagaacttccaggtttttgttgttttttgtttatgctttggtggtggtggtggttgctaccacctggagaaaagctgcctttgcagccccacaactgtgcagttgctgtgagtgagcaggctgggaaccacatgctcttgttctgacattcactggaggcacccccctcccctttccttacaaggcatctcagaggattgtcatttgaggcaggccggattcactggtgtgactgtttcaggactggcttgtctcattaaaaaacattttttggatcagaaacaatgaggggtgggaaaggcaacaaaagcctcttgagattcccggattgctcaggatgttataaacagtaagtgctgcttttgatcttggagggtggtgtggggtaggcgagaaagggggtggtggttattgggaagagggctggagccagacagccataatggcttgtccaaaggctgctgtgaatcccagtggcaaagagctctgcacttcccgctaatttctgttttctttactgtggctggctttattaaaaggacataaggaagcagcctagacattcagtccaatcagttttctagggtagcagatgaaaaataaaattgggccttttgtatttacagagaaagtaagtagggtggctagcttttatggcttattcactttcttgcagggagagaggatgctgtctgtctgtctctcatatgtatataacatgcttggaatgctataagttatcaaagattcattagatgagcacagatctttcattctgtcttgaaacatggcaaggtttgaagttggtggaccaatgagaagctgtgctgccttgaacaataattttaaaagagttgctctgacagcatatcttttgtaactttttcctctctgtggttctgcagtagccattttgtgtctgagtgacatggaatttctgtgttgcttttttcttttttttggagacagagtttccctcaagccagttgcccaggatggagtccagtggtgtgatctcagctcattgcaacctctgcctcccgtgttcaagcgattcttgtgccccagtctcctgagtagctgggagcacaagtgtgcgcaactgtgccctgccaatttttttgtgtatgtgtttttagtagagacggggtttcaccatgtttgccaggctggtcttgaactcctgtcctcaagtgatccacctgcttcatggcaggtgagccactgcatccggtctgtccatagtttctggaacacaattagaagtgagatctgtgtttgagggagaagcaggaaaagtttaacctgaggatggccctttaactttatatgatgaaaaactacctaatcaatggttgcagattatgtaaattaaaatagtggtgggtacttcttaaacaaattatgcaaatttgatgcagtcatcaaggcttcttgcttcactgcatcatttaccttttgatttcagagaagttcagccccttgactctttccttattcgaactggagctaagcactgagatatttcagccatacgcttgttagggagtgtatctatgtaaatacaagtaattttaagtagacaaggctatattagtagaacctgattacttttatcttgctggtttcttccattgttttattagtatgtttcaaatatttaccatggtgagccgatcagcttctgatctatgtggatcagtatccaacaaaaactgactagaagagactgtggttgtggatgcttgtgaagagaatggaaaatgtattacagtgttaatgtcctctacaattccagtgacttagtattcagttaagacacaggtaaggtgttggttataagccggtaattcaagttaggttaactctgtttcttttccatcataaccagttgaaaagaggaagactttacatttaattaggtagttcgtagaatgtaagtgtgagaatagaaaaatatatttaagaaactcagtcattgttctttacacaaattagagtggattggtagctttgggggatttaagtgggttgaagtagaaggtgaaatgatgactgttaattatcaaaaaccatacataaatgtgatttgtagtttattttgaaacctactgtagtttaaattcatctggtattcattacaatgcagttcttaaagaagatgaaactgtatagctaatgacccaaatgtttccttcttatctaatcagggatccttctttagtagctagattagatgttattcagaaaggataatataggaaataattactgtatttcatttgtggagttaagcatatggcctctaattcattttcatatgcaatatatgtaaattagagaccaatctatattattttcagccatggccatgcaagaatatgattcattctctctctctctctgtgtgtgtgtgtgtgtgtgtgtgtgtgtgtgtgtgtgttagttaaacttgcatgtgaagtatgacttgcagtttgtagtaattttgtgatgctggtacattttctcatcttgtttgggagttttatgaaatgttagaattcaaatttggggatgggaggcggtgtatcatatgaatgatttcattattacaagtagtattttgcagtagttagtatgttgtgagcagattgaaaatgccaggaacttaaaagaatttttggaagaaaataactagatctgtgcaagaattcaacagtctgattactcagtgttatcaattacaaaacacctggccctgtgccatgatatatatactatatatcagtataatcagtataatcatacaccttcttgtggggataaagggaatgaagggaatgtcatttttttacatcacaaagaaaaatcatgaaattattaatagttgtgagttgtccactctgtaactaaggctaactatgaactaatgaactcacatgtagtattaattacggcacatatttcattaatgggaacctgcaattcaaattatgtttgagcaggaaatatttaacaattttgtaaacctttttgattgggccttgaaacatggtttgtagctttttattacttctgctctgtttcttaaatgtgggtggcagtgaaatcaagatctctattcagaaccaaagactgactgtcagggggtttatctacttcgtaacttgtcattagaaaacatgatttccttcagcttctcctcgtatttacaagccaattgcttgactcttctttgggtcagtggctaagtaagttaacaagaacaaacaacagaaatgctttctttgaagatatgagacttcaataatagagtgtgagttagaatagcaatctaattttataattggaagaattcttgttttttttttttttttttttttttgagatggagtctcactttgtcgcccaggttggagtgcagcggtgtgatctcggctcactgcaaacttcgccttccgggttcaagcaattctcctgccttagcctcccaagtagctgggattacactgcccagcactacgcccagctaattttttgtatttttactagagacggggtttcaccatgttggccaggctggcctcaaactcctgacttcgttgttcgcctgcctcccaaagtgctgtaattacaggcatgagctaccgcgcccggcctggaagaagtattagatttagtgtctagtggttaatgggagaatgggaaatctgcatagctcctgtttggtagcatgaaaaacacataattgtaatttcaaatatccaaacaggcatgtagaatcatagggtcatttgttgaagcttagttttcaaggagcagtaagagtgaggaaaaggtgcacaggcttctgtgcttctgattatgagacttggttagagggcacttgccaggcatggtgacacactcctgtagtcctagctacgcaagccatattcactattatcactctctggaccaattattgatttgcaagttcctgtgaaatgttttatcacccagtgtgttttgtctgtgtacaggaagcactggatacactggctaggtgtgtgcttttaagtaacattcttctctgattcctttccttcaaagtgggagatactggtagcatctacctaccctgcaaggatttaatgagttttaatgacatgagaaatgcttagatttcagggatttgtctaaacccaaatacctgggccatatttttagccaggagccagggaatatttgcactaagccactggctgacccaaaacttctctctttaagtcatttagccaaacagcaaattagggagccagcagctcattttgggggtgatgttttgtatgagaagttggtgaaccctggggtagcagtaggggagatttcagcatagagaagaggggatagttgatttcctaaaccacttccaaattatgtcttcaaacaaaataaaactttccccttgatttccaaattccagaatattaggcataaccataatataaacataacagcatactcttaaaccagagagaaaaattccaagctgttctgaattatctggttcatttgagattggactgtatgcaatttggtcgtagcagcaggctcattctagcaaatgctaaggtagcaaacaccaggactgtaggttacttttcctcacaacattctggttgtaggtttcctgacacattcattctggctgtttttcttttgcactctgtggtacgaaacctcttagctctgtgtgggtggtgggcttttgcttgccaggcaggcaggcacagcctggtttcccaaatgcatttctccctgattgccttctctatccattaagcatatctgaactgtgtaggattagctgtgtcttgttctttccttttctttcttacaatcacaggaatgagccaggtgtgtgtgtgtgactcaccctagcccagcctgggtgtgctacagcaccgggaaatcctgccctcttggcctagcgtcttcatagatatgtggcttggccttctctctttggtgcttttcccttgacagcaaacttgtcgtcttttgtcttgaactttattgctcagagaccaccctactgctgtccttttacttcagatcttcaaattcagtcacatactgaggtactaggggtttggacttaagcataagactttttaggggacacaaggcaacctgtaacatttcttaacattgccttccaaagaaaattccttttgttgggtgtggtggctcacacctgtaatccctgcactttgggaggccgaagcaggcagatcgcaacatggtgagattctctctttactcaaaatacaaaaattagccgggtgtggtggtgtgcgcctgtaatcccagctactctggaggccacgtgagaatcacttgagccctggaggcagaagatgcagtgagctgatcgcgccactgtactccagcctgggtgacagagcaagattctgtcaaaaaataaaaaaggctgggcgtggtggctcatgcctgtaatcccagcattttgggaggctgaggcgggcggatcacaaggtcagcagatcgagaccatcctggctaacatggtgaaaccctgtctctactaaaaatacaaaaaattagccgggcgtggtggcgggcgcctgtagtcccagctactcaggctgaggcaggagaatggcatgaaccggggaggcagagcttgcagtgagccaagattgggccactgcactccagcctgggggacagagctagactctgtctcaaaagaaaaaaaaaaactggaaaaaaaaaaaagaaaatcctttttgatttgtatgaagcccaaggtattatcattcatcctttttgtgtcctaggaaatctttgtataacctaagattggaaggattatctcttgtgtttcctcttggagttttataattttttcccccacattttgcttgtgatcactttaaaaagaaaagcttcacgaatttgcatgtcatctttatacgggggccgtgttatcttctgtgtaatgttccagttttaatatatgagctgccaaggtgagcactatgacccccctcctttttcttcttctttttcttttttttaaaagacagtctttgaaccaggctggaggttcactgcaatctccgcctccgccttctgggttcaagcagttctcctgtcttggcctcccaagtagctggtactacaggcgtgcaccaccacgcctggctgatttttgtgttgttttttttttttggtagttttgtagccttgctttattttccaggcactttgcaaactcctgagttcaagtgtgatcctcctgcctcggcctctcacagtgctgggattgcaagtgtgagccaccgctcccgccaactgctttttgagttaatatttgtttggagcaaagtacgggtcagaggtggttttgttattaaaaaaaaaaaaaagaaaagaatgtcttttgttgttgttgttttaaactctgaaagcattccctgccctttgtcaaagaatttcaacagccctgaaaggaataaagtaataagttgcactcaagcctgcctaaatcccttgctggaggagatgcttttagagtttttctgtgtattcgtatgtgtttataatttctttttttttctttaatgaggaccataccacaatttcaaaacttgatttttttaacttaatttagtcaccacctttacttcctcttcaaacatggtttttcttcccattttctttctttataaagacttttataatctgtaccttgtacctgagggaattgtgttgttgttaattttgacttttatttgcaataagaactttcgaattgagacccagtatttgtggctacctgtgtgtgtgcacacacacaactgaaacaatttcagcttagcctcactctccgtgttatattgtaatctatcctttttttccccctatttaatttaaaagaaaattgcttgtcaagagacccagcatattgatttcctattagggatcagcggtctagaagtacatcttgaacattcacagcttgtcctgaatttagctgtgggaatgtctaagggtactttgaccagtccatactacagagaccctttcttcatgatggtgtggtgtgcaggagggtgttcaggggtgacatgatgttctttttgtcaacttgggactttgatttcaccagagtaaagaggatcgtagaaatcttgctaagtcaaggaaattcttatttaccgccatagactttgctccatcacagcggttctcaaactgtcatctagggatccctagatcatagtcccttcctgggagtttccaaggcgaaaagtagtaccatggtaaaaactgagacattattgtcttcattttctcacaaatgtgcagtggggctttccagatactacatgatatgtgatattgcatcagattgaattgagttatgagaactgtgttgactcccgttaagccagatattaaagacttttgcagaagtggaaagcagtgccacttttctcacagttttttcaatgtgtaaaatacaattttcataaaaattttatttctgttaacatgtaatgattgtataattttctaaatgaattaatatgaaatttgttttaatttctagtatggtaaatatcaatgtgtatatgaaacccaggtaaacagtagcttttttgagtcctgaaaatatgcagtacacttctatgcagcctctcctaattgcagaagtatcaacccatggtgaattttgtttcatttacacctttactctaagtgaagcaaatctcagacatttttttggggggtggaaggtggagacagggtggagttcagtggtggtgccatcatagctcactgtgacctcaaacacctgggcttatgcaatactctcgcctcagccttctcactagctaggaccgcatgtgtgcaccaccatacccagctaatttttatttttggtagatggggtctcactatgttgctcaggctgtccttgaagtcctggccccatgccttagccttccaaagtgctgaggttacaggagtgagccaccacgcctggcctgtcagtattaatgtttttattttctttggagacagattctggctctgtaacccaggctggagtgcagtggctcgatcttcgctcactgcgacctccacctcccagactcagacagttctcatgcctcagcctcccaggtagctgggactacaggtatgtgccactgcacatggataattttgtatttttagtagagacatggtttcaccatgttggccttactggtctcaaactcctggcctaaagtgatcagtccaccttggcctccgaaagttctgggataataggcgtcagccaccacgtccagcacagcattaatttttaaaagctgtgaattctatttagagaaaacatacccatgataatgataacataatgagtcaagtgttcagatttcccctactgtcagtctcatgttttcaaataaggtctatacattgatactggttgggttgataaaacatgtttgtttttaatctctctgtccctttaatttgttgttcttgaggaaatgaggtcacttgttccaagtgccacagcttttgagagtgaaggtgggtcatttaatctggcagcaacatttgggcccgacctgaaacacggctgatgggttttgctttgggatcttttttctcccctttctcttactctgttagcctccttcctccttttcttttttggggttggtgctgtttcttttttaaaaatttgttttttaaatagacaaataaaaatggtaacttctaggttccttttttgttttcttttttaagagacggtcttgccctgtcacccaggttggagtgcagtggtgctatcatagctggctgcataggcgccttttgactcgcctccaccccacccctgcacattttcatattatagtcccttatcagtctcagggcataactctgcagtatgtgtaacattcagcatacttggtgaggccacgagggggagatctgatgatggcatctagggcaggtataaatgtgagtgatactgcattcagctgccatcccttccattctggaagagtgtgtgtgtgtgtgtgtgtgcgcgtgtgtgtgcgtgtgcatgtgcgtgcatccccgcatgctgccagtgggtggtggggaggagtagagaggactaagaatgagggagggaggtcataaaggacacaggaagccttggaaagaagggcacgtagcaatctctggggtaaaacagcagaactatagaaatttggttctaggacagtctttataaaaagaataaattcaagaagcagatgaatgggcttggttgtgacctggactgcaacgcggtctctgctgtctttactttcacattcttgtccttcaaggctcaatgttatgtcttttgtgaagcgtttttcatcccccacttagatgcattttccgtgttggagtagctgtgttgtgcacctcgtttgtatttgtctccacacacattatacagtatcttgtttgttttcagagaacccctaccatccccagcctagccacctttgattcatcttagtggattgccagtgaatatttattacaggcccaggacatgtagctgttcaataaatattggtgcaatggaagactctcctctgtgtgagagttcatgaagggaaccaggaggtgaattttaagggtcagtggcttgcaacactcctggaagggctttccaggacctcttctgaggtccgaagaagcaaagatcaccccccacaaagtcacctgtatggaattcaggtagcgatagagcttgtgaacaggatctccaaattctccaaaacatagtaaagctgctatttactgggcacccgctgtgtaccaggcactgggcaggatgatatgctttacatgtattacttgcaattcctaataacaccagtgtctgcaggttgctgttgcaggttgcaagttactgtgctgccttatacctgtagttacttgaaatgctgaaaatcgaaggtaatagaaaaacttattatcatttagtgtcattgggagcgttaagtgattagatgtatggtgcttagaacattgctaaattttattgactgcttaatcctgttgttccagaagcagaatttgatgtatacaattgtttatctaggttgcccagtgtaatatagtaagtgttaaagccaggaccacagcctcgtttactccagacttcagaacatccatacagtcaaaatgtgtgtctgtggcctcaaagtaagagattcagatggtcaagaaacaccttcctctgtttcaaattcacgatgacttcatttacacctgtgcagcacatgttaatatggcatgggctattattgctgcaggaagggtacctgtcaagtatgtagagtgcaaagggcccttccttagatgtctagctgctgaggccccacctgtgtggggatgggcatggaggcacctgccttgttcaagaagcctgtgaacagtgaccagcagtaaaagccagagagatcttcaaatgtagtatcttaataatgggctttttttttctagttcttctttttcccttggggccacatgagcatctgtacacctattgtaaacccattgtgtcaaggaaacaaagtaggtcagaaacaggatttaggaacccaaagaaataatctttgttgatgcttaaattgaatgaggcagaaacaaatgtctctttaatatggttttttttttttggggattattttggtatcaccccaagcctgtaattccctccttagtcatcatcttactatcccttgggactctggcctgggattcttctgctttgtggttgtgattaatcctgcaatgagtgagttggggagggatgggcctggggaagtcagctgctgctagcagcaagcaggggtagggtttatagggagagttgacatcctgctgggatctaacagaaaagtttgaagattattgtgctgaaataaactagctcacaattttgctgtttgactcagggcaagctcactgtaaatctcaaggagtactggactgtatgatggcctcttttgctgtccttatccccactggaggatgcacagattagttaatgtctccctttcatgaatgcagcttttatctttaataagcgggttaaaccgcatgcgctctgtctagtctgtgaaggtcagccagccattcggattttatcttcccatttctagactgctgacagagttcttgtgcaaagttaggaatctttgggttttaaaatgttttcttcctttgcccatccatgacatgcccttattcttgaggggaggaaaaagaaggcctgagtctctgttaggttgcaaatattgtctattttttgggagtgatctttgtagaatctgggcagtgacttttgttgttttgtagtcctgatgatttaaaaaacatatctcatatatttctttacatacagctcagagctcaacattgaaatagatgttcagcagattcttgcccccacttaattttcactgggtttctgggtttttactgtgattaaacttgacattcatttaaggaatgagttgtgatgttctctggtcatgacctaaggaaaaggatatatatgtgctctaggagtgaattctggtgagaacgtttgtattctttcctttcctctttgatttcacaagtcaggctgtaactttaaaagaaactataggggctgttccccaggttattcacaaaacgagtctttgtctgctttttcattcaccatctggtatacaaagctaaattggaatcgtgcttgttttaattattttctacttgtgtggccaggaggttatttggtctggtgaggttacattataagcctgcgcactcattaataccaccgaatccacatcctgcgccagcattggaatggttaagttgatccacttgtgtggccagagtttgatacaacacagtggtcacgaccacattaccggaggaagtatggtgtgtgggttttgccctcttcttttttcattttttcttccaataatgttaattgtttcagtgtattttttcttccagtagaaatatgacttaggttggcaatcttagattagtgcctggtgtttattaaagggacaatgtatttcaaaaatcagttctaatatattaaaagcatagagtgtaaattaggaaaacagtcaaaacatttaacattttgaacacttcacagaatgagtaatggaaatagtgtagccagaaacttctctgcgtggtcattattattggtgaatcagccaaaagatgcaatcattgctaagaggtattgtttaatactgggaaagtcacatcaaaagctttctcaaaaaatatatattttaagtcctccttccattcttcactttcctgtcttggggagacagaatacttcaaagtagtctgtttttaaaaggtgacttctttcaggttttgggaaagagtgttatgtgttgtaattaagtaattgttccctaagatagtccttaagtacaaggacatctcactagacttcattgtcttgtgaaaggagcggtatttcaggaattaactactcatttaataaagcaaaaaggctggatgtgatagctcacacctgcaatcctagcactttgggaggctgaggcagttcgatcacttgagcccaggagactagcctgggtgatatggcaaaatcctgtctctacaaaaaaatacaaaaattagctgggcatggtggcacacacctctaaccccaactagttgggtgtctgaggtaggtggattgcttgagcctaggaggtcaaggctataatgagtcatgattgcaccactgcactccagcctgggtggcagagagagagatcctgcctcaaaaaaaacaaaaacaaaaacaaaaaaaacaaaaaacctgtaggccaggagtggtgaaggaaaacagaaagagtgcccttagaagtataatactggaaactgtctttttgagcaacactttaagaaataccccagactgaatggggaattcacaacattttgcatttgtcaaaacctgtagaatgtagaacacaaagagtaagtgaatcctaatgtaagctgtgacttccattaatagtacggtggggggccgggtgcagtggctcacgtctgtaatcccagcactttgggaggctgaggcaggctgatcacctgaggtcgggagttcgagatcagtctgaccaacatggagaaaccccgactctacaaaaattagccgggtatgttggcaggagaatcgcttgaacccaggaggtggaggttgcagtgagccgagattgtgccattgcactccagcctgggcaacaagagtgaaactccatttcataaaaagtacggtgggaccccctttctgcagtttcgctttctgtggtttcttaaaataaacaggtgtctgaaaatattaaatagaaaattctaattcataagttaaaaaaaaaatcctagacttaatgtccctccttccggactgtattgttctgtttgatatttgtgagcacacctgctaagccagtccattagaactgcatgcttgatgcaggaactgatgccctcagaaagtctgcttgaaaatagtcgcagtgccaagctcgaaaccagttgctcttcgccatatgtcagagtgaggaaggaagggtggggggattagaatgtgctaggaaaaaattccgacaaagaattagaattttatgcagaaacaactattgataatttattaatatttacagggcatgtcaaatggttctgtgagaaaaaccaaattagcaagctacctcaggaatttaatttttagatatatctgaatattaactggggctcaaacatgccagacaattcttttagtaatgaattagaatatatcatgtaatactgttaccatccaagactcccagtgttaacaccaaatcttaattttcatttcattaacctggcaggtatttgaaagcagcattgtatcaaaacagctttattatgtagaaggagcaatatttaatagctctgttccaaattactcctaacttccctgtatttctgaaggaatatttattatagtgacaaaagcctgtacagcagctccaggagaagagaccacagtgtttagaaaaagaaattggcttgcagctgtggtgggcgctacttgtgtaagtccagctgtcccccttgagctcctgccagtctgataggccttctaagttgttgcaagacctgaacagttcacttgtctagatcctgcagagctggaaagagaacaatttttttgtgtgtgtgtttgtcctaagaaataatccaaaatagttttcaatacatacattcgttgtctgtctactccttgtttcttaaggttcttcccgtattcttctgttatttttaaaagaataacagctttatagaaatgtaatcctcacaccataaaatttaccctttcttttcttttcttttttttttttttttttttttggagacggagtcgcccaggctggagtgcagtggccccatctctgctaactgcaggctccgcctcccgggttcacgccattctcctgcctcagcctcccgagtagcttgggactacaggcgcccaccaccaggcccggctaattttttgtatttttagtagagacggggtttcactgtgttagccaggatggtcttgatctcctgacctcgtgatccacccgcctcggcctcccaaagtgctgggattgcaggcatgagccaccgtgcccggcacatttacccttttaaagtatatacaactcggtgttttttagtatattcacagttaggcaagccattactactatgtaattgtggactattttcatcaatccaaaaggaaatcttgtactgatcagcagttattatttcttcccaggccctagcaaccactaatgtcctttctgtcactggatattcctattttggccacttcatataaatggaatcatatgctatgtggccatacgtgtatggcgtctttcacttagtattatgtttctccatgttccgtgaatcagtacttcatttctaatctcctcctttttcagttcttagaatggtggttaaatacacataacaccaaatttatcattttaaccattttttgtgtgtacaattcggtggcactgacaacatttgcagtgttgtgcaaccatcaccactatccatttccagaatgtattccttattattgctgaaaaaaattacattgtatgaacactgcatcttatttatctaaccatcatatattctagctatttgagtgccagattggttcagtaaatacgtgggtgaaagagaatagcattatgcatgatcaggaatgaaattcaaagttggtgccataacatacaagtgactagggagtcttggggccagggaaacctaaaggtaatcttttcaaaggagccacctatcaggatgttctggagaatagaagggtgcttcccccgccccgagactggtttggatgaacacacaaaatatatttagtgggcaaacctttaaaatatgacatcttagcgtgcggaagtccataaccccaaaggagggcttgctcagtacatgcagaggtgttcccagagcatgtataagtctgtacggttgtgcaaacaggaattgatctgacagcgtgaagacacagcagccttctctaattaaagcctcttgatgacattaaactgtgttgcttaattacaataaatcatacattaacagatcatgtctccaaagaagcattgtcagtgtgctgcataatggaataaaatttgaccttgtaatcacaggggttcctatggaacagtggcttatgtcaccaataggaacatgagccctagagttactttggcagaagtcagatcttagaatgcttccttataattctgtttctataaaaatgttttttctatattgatacgtattttaatgtgaggatgctttttatataccttgaaggagtaaggttttccattcattccctgccactacttttctgatcaccccctcttcatttcaagctagtctggatttgacataatttttacagcagtttttgcatactccttttaccatgtgcttgctccttttgctgttttccattgcgctttggggtaccagctttctgactgacagatgggccaagtcaggtacaggctgttgttaccaaagggcatcttccatcatgttgtttgtttcttcaatactgtaatatttgagagagtgtacaactctagatacagaaggccttttgaaattctacacaaagtcacaataaaacttggggtactgtgggcctggggagattctagttcctgttcaaaactactactgccatttaaagaactggaatataactgcatatcataccacctagactcatgaatattgctattttcattggtttaattttcaaaaattagtggtattaaaccagtggggtatatttaatttcttcatgatgcagattattaaacactcaccagccttactttctctcttgattttataaatggtaattgaaagtccatagattttaggtttgtggaactggaatgggcccccaggggatattcagtccacacccctctttttttttcttttttcctccttcttctttccagagacagtcttgctccttcacccaggctggagtacagtggcttgatttcggctcactgcaacctccgtctcgtggcttcaagcgattctcatgcctcagcctcccaagtagctgggattacaggcatgtgccactatgcccggctaatttttgtatttttagtagagacagggtttcaccgtgttggccaggctggtcttgaactccaggcctcaagcgatctgcccacttcggccacccaaagggctgggattgctggtgtgagccactgctcctggcccacacccctcatttttcacttgaccatgttaggtatgtcagagtcaccttgcttctggcaggtcagcctcctatagtgctgtttagaacttcacatttgacaggtttgactgttttagaagttctctgctcttccttcacatctgggatgccatcattcattctttgttctcttctgtgtgaacatggtcttgttgcagttcccctttctctgcctgcctgtccacattgaggtgtccctggggggtgtcttttctcctagtgtccactgtccacactgcaagagtgtgctggagactcccagattttctgtctgtgcccctcaagccttaagcattcctatgtgctgctcagtgtttctgtggaccaacagctggagcaggctctgtatctcctcctccagagcatggcccctttggcatgatggcttacccctgtaatcccagcactttgggagtctgggggacggattgcttgaacccaggaatttgagaccagtctgggcaaaaccccatctctatacacaacacacaaaaaaatagccagaggtggtggtatgtacccgtggtcccagctactcaagaggctaaggtggaaggattgcttgagctgaggattggaggttgcagtgagctgagattgtgccactgcactccagtctgggtgacagagacccgtctccaagggtgaatgaatgaatgaatgaatgaatgaatgaataaataaataaataaaggcatggcccctttatcatcccagaagagaggtaattccggtgagtgctgtggagatcagtggctgccttttcctgaaactgaaaaacaggtggggaatctgagggagggaaggaaaagtatatcaagcctaactaatttatttttgtgtttaacaacactggtggttcagtaatatttcgctattgcgaagatttctgtatattgttgttaaaaataggaacctaagattaaatgtttgtggcttttcatgttttggaatgaactactttggtcaaactcaaaaagtaatgcttgctaacttagttagagctggagtatagattttaattctacatttaagacaatatttgtaaatgcctgtgtacaatgacatataataagggtcttgtagggaaaccgttttgtctggggaaagaatgttccccaatgttgaacactactgtctggagcttgttaaaaacatacccccttcagtgttctaatttagcattggttcactagtaaaattcaggattcttttttttttttttttaatagatttggcagtatacagttctgtacgtttcatgttatttttacatttgtttttaaaatttaagagatgaggtctcaccatgctgccccaggctggtctccatctgggctcaagtgatcctcccaccttggcctcccaaggtgctgggattacctgtgcgagccactgtattttttcactctcttactgtaattctgttgcgcagtcaggattggagacttagtgatctggttagcaagttctctcgccagagaagagttaacttatttttagtattcagagtgtagttcagtaagtcacacataaaaatcaatttgttatttgtaatcactccacttaaatgtgtaatgggaaaggttccattgtcctcctcgcagggtgagtgtaaacgaatgcgaaactgtctctcttcctgcctctcttccaaaaccctgccatctctttcctgcggctgagaggctctgcttcccttcatgcagttttaaaccaccctaactgccgatcaaaacccccagaccttgtctcttctctctcttacatgagagaggtttgaatggctcttatctctttccttacaatgttaagagttttcctctaggcattggcaatattactaagtaaaatgagcattaggctcagctgccaaagatgcacatcagaccagatgttcctagaggtgccatgtatgtgtctctaaagctcgacagacacaggcactcatggctcagggcacctcctgttatcctttcctctcccagcttgggtggctatgcatgcctgcagcaggcaaggtctgagcccaacagccacgatgggggaggtgggtggtagaaagccatggtggtagctgagaccctacagggccaatggatgggcacttctcgtctgccacaccaatggaacccctgcccgaggaattcaacctggtctgaactgggaaaagacataaggattagggggggtccacttgcactaagcaaggggctttctccccccacccccctgaattttcccctttttgcctcttaaactgtttctctctttttttccttttctgagtgagaagggtccccctcccaactctgtttctgatagggaagttaacgaaggaacggcccctgctggctgagaactgcagatttgagagggcacatttgagacactctacacagatacaaacagcctctaaaatgctttttcagtcccaaacttgattccaagcttcaggcagaggccctagaaagaaaaaccaggtctgagggttccgaggccaggcaacaggcacaatgtaaataggaaggaccaagtcctgccaaccaaatcctccacctcacggaaggacgccatgcttcatggtgtaaacaggcccagggaactcagtttgccgacagcagggagaaatggaggcgtaggtgagggcagttaattcctattctccaggttttctttgcttcatgggtatgtactgcagtggtacctatggctggcccagggataagaagtggagagtgaaaggaggccactcgctttctctgtcacagcctgagttttcgctgaaagaaggaagggaatgagggacgcctctattccctgtctttcagaatgggcaaccagttctcttcaccactcccagcttatactcctctggagtgtgtcctaaaccattgggactgcattgactctcagaatctggaggaaaaatgcgtcgtagccctctgcacaaaggtttagccaaattacgatttacagaaaggactggcttggcttcagaaagaaaccatttattttgataccatttggcaaatctgtagacattgaggacagatgggctgaggccccatatgtgcaggctttgtataccttgcaaggcaatccagacctttgccgacaatataggattgatccagccctcctgtttgctgtctcagggaaggctgcaaggggcaagcccaggaaagtaaagaggcactcccagcagaggaaccagctccctctagccctgcccctctggtccaccccaacttccctatctagcttcagcctctcacttgctccctcctaaaaattcttgctctcaacaaggcccagtctcactctttcccttccagcagatgccctttgaatttgggcccagtaaggcccagttacccttctccctacaggacttaaagcaaattaaggaggatcttggcaagttttcagatgaccctgataagatatatagaggcttttcagaatttcactaaaatatttgaactctcctggagagaggttatgttacttttgaattaagaccttgacgaacactgagaagcaggctgctctgcaagcagcagagagatttggggatgagctttacgtcacatacagcatcagggaagggggcaaacattatccaactggaagagcagtactaatggatgaccttaaatgggatcccagtgacgaggtggaagacgggaagcggagacactttcaggtgtgcataatggaaggcttacctagaactaggaccgggcctctcaattatactaagttgtccatgattgaccagggatttggagaaaatcccactgcctccctggaaaggctaagagaggccttagtaaagcacacctccctatctcctgattcagccaagggacagctaatcctaaaggataaatatattactcaggcagcccctgatatcaggaggaagttgcaaaaactggccctgggaccagaaattacattagaggacctctggaaagtggctacctcagtctcttataaaaaagagagaagatgcaggtattcccagggtgcacctcttaactgctaaagatagggcaagaacagttatctctcccgccccacccgccctgcttttttttttttccttaagagagtttcgctcttgttacccaggccggagtgcaatggtgcgatctcggctcaccgcaacctctgcctcctgggttcaagcgattctcctgcctcagcctcctgagtagctgggattacaggcatgtgcctccacacccagctaattttgtatttttagtggagacagggtttcaccatgttggtcaggctggtctcgaactcccaacctcaggtgatgtgccctcgtcggcctcccaaagtggtgggattacaggcgtgagccaccatgcctggcccagttagctctcttctaaagtttatctgctcccatacaaggtttcatttctttcaccagggagaaaaaactcagaggacaatgttgctgttagtatatttcacttcttatctctatgatctttggcattaattttttttttttgaattggagtcttgccttgctgcccaggctgcagtgcagtggtgtgatcttgtctcactgcaacctctgactcccgggttcatgcaattctcccacctcagcctcctcagtagctgggattacaggtgcatgccaccatgcccgactgacatttgtatttttgtccactgcacccggcctcagatgccatgttctaatgggctgtgtctataaagttattaaagaacaagggccaagtaatttggggtgcctttgaagtgctgagcatggcctttccaatttgtgtgcaccttctttcattcttactttacaaatgaaggaagctgatgtccagtgaggtcatacagcaggtacaataatgggctgatttctgagcctgattctcaatctgtgacttgtgcgacatcattgtacttttgatactttgtcattagttgggtgtggattttactacctgggagtagttatgaacaaccagtttggtgctaatgaaaagtagttgtgattccttgactagatatgccaaccttcaggtttataaagactactctcatcttgctttggctggtctttgtagtggatggatattggagaaacccatgaggtgatatatatgaaacaatatattggggcagacttttattcattcattcctaggacttaggagccctgctggtgttctgtattgtgccccatttatagccatgatggtagagttagatttatgaagctgaggccgtgatctttatttcaatcctacttggtcgtttgctggtcagaaatgtgtctcgttcctctttagtgggaaaaatgtgagtgtgaatgtaagatagttttagataacactcagttggccttatgacctatctgaagtcctgaagtcagctatgggattacgatgtttgcctccaagctgtgtcttgggaagggatgagtctttctctgcatagtaatttaaacctggtcaaagacctgaccacctcgaagcaggaagcggtgctaatacactttctatatccaaggacagttatctcttttaaaaagaagtgaaacaaaagagactgtattcaaaaggaagtcttttcttttatacccacgctctccttcctgcccatgtgatgttagaaaaagtgttattttcactgttacataaaattttttgatgggttcttctgtgcagttttgagatgtttcctagctgatggaaaagtataaaaaattcatgcagaaataatgcctgctgcccagcccattttttcttgcttcatgtacctactgtttacataaatgtttttccctcccatatgttcttttttactcttccacatttgagtggaagatatttaaaaagttttcttatgtatacttatgattttacttggaaacagcaaatgtaaggtctagaagcagaggggctttcagcttctctgcaacacacaggaaagtagacaaagtttctagggcaggccccagcctccagggtaagataggcatgtgccagcaaccttgcctacccgtcatgaccctgccatattataggtactgagtcatgcttcaacaaggcttcccacacttcattgactggaccttctgttttgtcatcagaataatttatatttgtatataaaatttcttggtggggggtaatactgtactctagcagtgactgaagaggtgccaagtaagtttgccacctattgtgggtttagtctttattgttagtaaatggcaaagagaaatcgatgaaaggcagagtttagagtagtgcccgcttaagggcaagatgacatagtatctgcattgatagactcaataaatgtttaaacaaatgaaatgacatagtttaatattatgggagggtgtgtgatactgatcatgactcaaactgtagaaagaagagtgaatattctttcattatttcaatcctatttaagtcctgttgagtacagttccataccctattttgtatttgatttacaagagcaatatatttttatcttagaacatttgggctttctgctaaaataaaaaggggggggacagcatttataccacacagtgataattattaccattttgtggtatccatttttcttttctttttcttcaccaagttgggtaaaacatcgagaaacaaaacagaaacaatccccggagcagcattgcacatgctcagtctctcaaagtctggcttttaaataattttctgcatctttccttgtaattgggtggagaatgttccactgggcagctgagttgaatcgccacaatctctccacttggcctctgtgcgacttactgtaaacatctattgtctcccaggcagtatgcagtgtgatccctctccccacccattgtgcccatttagcctctgggactacccccacaagggtggaaacctggggcagagcagacactaaatactgtccaactagggtggttggatgctccaggtttgtcagcccagtcactgtcctgcattgcctcctagaatttattagcacctacctagcattggggtatctaattcaaactaattagaattagtttgatctaattctgtgctgttgaaagtaacaaagtagtgagcttagtgcaccttcataattaactccttatgataaaaaggagtgaattgcttattcagaatatacacatttttaatggggggtattctattaagttctattaacttttctagtttgttaaaattatagaaaaatttgtggtttatactggcaaaattttccataaaattattcaactagcttcttcttcaaagtgaacattattatgcatcttgaccttttcccacctcgttattttgtgtcgttacttacccataatttaggtgtttagtactagtactaagttaggaaattattactgaggtgctttgattgaagacgcctttactgagtccttgggaagtaaaatagtgacggttaggcctggagcagtggctcacgcctgtaatcccaacattttgggaggccaagacattttgtggtatccagtgttttgggcgggttacctgaggtcaggagtttgagaccagcctggccagtgtggtgaaaccccatctctactaaaaatacaaaaattagccgggtgtggtgttcatatctgtaatcgcagctacttgggaggctgaggcaggagaagcacttgaactcgggaggtggaggttgcagtgagccgagatcgtgccattgcactccagcctgggcgacaagaacgaaactccgtcaaaaaaaaaaaaaaaaaaaaaaagggaatagctgctttacttcacagtcctagttaaggatttaaaaaaaaaaaaaagctcatgagcatgctcttcaaattttggttttgtgatttctggggttttcccatttaattccagatggaagagtgtcattaagttctcttcaaatgtaaccaaatttagtgtgtattattattgctggtggaatacaatgatggtgaatatcccattaaaaactcctccctagcccctaatcacattgaagttacattaaagagttggatgtgtattgaaagtatgatagtctcttgctataaaattaggctattgtgcagtcaaagaggcctctgctaagtgtggttccattttggtgtatttggagggagaggaagggcagccggtatcctgtcactgtgtcccccaacattgagcagatgttctctgagttaatgttgctcttcagttatctttgacagaagcagggtctggttaagatcagattgtttagactaatgtacattgatcttggcataatgatcacaagactataagccagctagacaagcaagtgctggtggtgagttgttagattaaaaaaacaaagcagttgttttgagaataacttcggtgccctggacttacattacaagacattggttttgttgtatgctacttttagatttacctgggaggaccttttacttaataaatagctccagactattaagctcggtgctgctgatcctgcggagaggacccggacctgagagttagtgggagccaccctttcagacagacagggcgttgaatgcaaaattctcttgaattttaaggaagtacatgataatctgttttacttgggagtatgtagtgatttttttttttttttttttttttttttgtaaatttccaagggtggctgtgaaacttactttcgtggtagtggtggacccttgaagcgtttttggaaagtagatgaaagagggagatgtttactaattctgttatttttattcagtgggtggtgcttgagtgggtataatttcctctctaacattctgtcatgttccatgtaacttagataaagcacactctggcatataggaatttccctacttgcttaccttgggatgtggagtgtgtgtggctttgtcagactcggctgatgtaatgaaaaatggaattaaaaaacgtgactgagagtcctactaaagtctgagctctctggtttaaaaaaaaaccaacgcagctgtattgctatgtctcacttaccatatacagttcacccatttaaagtgtacaattctttttttttttttaactgttaggttgtgcaagcatcacaatttaagtccaaaacattcccattcctcagtctctgattgtagaaacaaatgatctatgactatttcttaccatgagtatgcagattatttgatgcacagctttttattttaccttctttatagatttccacccaggaaaaaattttaatcccaggttgtctcttacttgtatgaagttttctgtaataatttcttaattattgtaattctatgaacatcaactgaaatgtaattttattaatagcttattctgtaaaaatgctattaataataataaaaatatcaaaaaacgttttgaaggcattgcattacctgccgttttggattatgatcattcttttgtgtggatagttgaagattttaattttttgacaagctcaattgaattagggaagtaagtttgctgctattgcaaaatcatataatgcatgttaaatatcagttatcagtgtaatttgtttttttaatgcagcagctggtttctaggcttaggaatgatagttggcagattttcctactgctttcctgtgatgtttgttagaagcttctagtatagtttcttcatttctaagcttttgagactgattgtatgctgcttatctatatatgtagataagtttcttgtctttcaaggtcttttcaagaggtgctggagcagatttaggaacgcagcatagtttaatattgttaagcagggatgtgtacctgaatctcttttggaagtacaaaaattcaccaagttggtacctccggctacccaactctgatatggaaacctggggtgatctgctgtcaattacgagttgcacctcagctagagaaccgttgttaatttatttgtcctctaattgaaaatctggagctcgagcttactcattgatcttggtctagttactgtattcccatcctttcctgtgtaattgagaaagagcttttgataggaagtagtatatggaaaagtaattcaacctcttggaattttcaactaaaattcagttcataattaaacatattaatttatttaatattattcgttcccattgctgggaccgaaataagaccataagtgcattttatacattttctagcttttataagtttgcttcctttaaaataccgattttgactttattcctcttagatggaaattttctgagaaagaattccattttcttacgttttcttagagttacatgggcaacattgtagttcagcacagcccttgggttgctgggagtctgttactgggtcattgagccttgggtggaccagaaggctcacactgatgaagccttgggaagggaactgcctgggattgaatctctgctctgctgcttatccaggtttgcaacttgggataagttagcttttctttcatggagtggtgatatatgaaacatacattccgtaagtgttcgtggttttgttgtcgttcagctgtctgtattagaaataatgaattattattcagtgatttttcctgtctgataaaagtctgttgtcagatgtagattggacgcttagaggttcagggtctttcatctagttaaatgcgcattaaagcatctatttggtgaacattacttttgtggcataaaatagtttaaatgtgcttcccaaagatcctggcttccattaagatattcatttattcattaggagagtaattcattttttattacacagtagcttatagcaggtgttagaaactccagttaacactaatggcaatcagcatttaacttttttctttactgtctgctgttttgtggttttccaccatttattcttaattgtcatatatagtggaagtaattaaatccatgagtcgcctcctcttgttataaatgtttgtaccccttttaagtttgcttggctttctcagattctggtttcaattaacatgcttatgattttctgggtttgcagggcagattagtaggctttggtgtggcttttttctttcttcctttctgcctttacgcgtttggttgatgcatctgtgtacctaacccacttctctgggagaggggatgtggagccatcgttttgtcttgatctccaggagccttgcttgattttgtttgttctgctctaacaacgtctggatgcttgtagtgaccagcttgtagtggtcaagttattcctattgaagtaattgtaattttttttttttttttgagacagtcttgctttgtcacccagtctggagcgcagtggtgtgatctcggttcactgcaacctccacctcctgggttcaagcagtgctccttcctctgcctcccaagtagctaggaatacaggtgcttgccaccacacccatctaatttttgtatttttagtagagacagggtttcaccatgttggctaggctgctctcgaactcctgaccttgtgatctgcctgcctcagcctcccaaagtgccgggattacaggtgtgagccaccattccctggcagtaattgtaatattttatatcagaagaaaagataggtagactgttttcttaaagcagtatttgtcatccctgagacatttcgtggttaagaacatgagaacacatgtgaagtaactaaatattcagcagctactatatatttaagtagttgggttgagaatttagctataatttatgggcagaatgaggatatggggaaaagaaggacccaggtaggtggtgaaatgctatcctaaaccttttgaaagtatttagaaaggaagtatgttgatgaaatgcaggacttaacgagaatgtgtgtggggaggtggtgggaagtatgggagaagtgcacatgcttgatgatgagagaaatgattattttgtttcatgcaagcaagcattcttctcagtattttaaccttttaaaccatcagaattcattttgccttccctgattcctcacgtggttggtgagcatttgagaaaaatattttattttccatgatatgtgtttagattcctgggtatactctctaatgtattattgttgagcttgtgtaagaaaatgagatgaagaatgagatattcttcaccaattacaccaatgactttttaaaaagtagaattctgttggggtttaaacatttccactttgtgtatgttggtggtgatggctcaaaaatcctttactggacaaggaagtatattcatttatttttcagagcggatctcgctctgtcacgcaagctggagtgcagtggcgctatcatggctcacaatagcctcttcctccaggcctcaagtggaggctcaagtagaggctcacaatagcctctaccttcctgccacctcagccttgcaaatagctgggatcacaggtgcatgccaccatgcccagttgattttaaaaatgtttttgtattgatgctgtcttcctattttgcccaggctggtcttgaactcctgggctcaagaggaagcatccaaagtgctgggttacaggtgtgagccaccacacccagctgcaaggaagtttagttattttatttttcttataattattattatttttgttttgttctgttttttttttgagatggagtctagctctgtcacccaagctgtagtgcagtggtgtgatctcggctcactgcaatgtccgcctcctgggttcaagcaattctcctgcctcagcctcccgaatagctgggattacagccgcccgccaccacacccggctaatttttatatttttagtagagatgggctttcaccatgttggccagtccggtctggaactcctgacctcgtgatcagtctgcctcagcctcccaaagtgttgggattacaggcgtgagccacggcacctggccaattatttcttttaattctatttttttctatgaatattctttgcagtagataatctttgtgtggaggggttctcagtattttttaaattatattttataaacttccatgggctgggactggttcagagtcttcataagctcatagaaatgctttaaagtttgaacttaattaaatttttttttctagaagttaacttgtgggttttcttttcctcttctcttcagttatacttgaaaaggtagagagaattgctcttgctttcttctcgagtataaaaatgtcaaacattgttctttattcttcgctgaaaccatacaggtaaaaagcccacagtcaagcttttgcagacccagctcccagctagatgagaagcagctgcaacaggagaactagcgtggggagctctaaccagagtaggctttgctgtttaggtttagtggttgctattttctacctctttgtgaatggagaggtggaggcggatgaattaagccaattaattggaaaagaaatacttacttcagtagcataccatctgaagcaataggatggaagtttaagacttgttaattaagaccatgaaagaactccatggacaatgttgaaaagggttttcacattaactgtgtgtgtattaggaagggaaaaatgttttcactgagattcctgaaaccatattgcaacatgagtttccctcttgaccttgcagcttatgttggtctgcttttcaatattaaaagaaaaatgtggatcccatctatgaagtcatagctcatttaggggtgatgtggtagataggtcctggttagttttgaaggacctaattgctatattaggttttattttctaatccaagatggtgactttttgttggaggtgggagatactaaagaaaaatgttccatctggatggaattttgtgggcaggtaagtttttagtgtctccatccacaaccacaacaacattgtgtgccctaattagttacgtgtgtgaagtgggcctaactggagtagccagtgagaatgacttggacgttttcagaagaattatttgcaggttggaaaattctcacttctatttccaggattgttcagtctggaggaacagtacaaattaaagtgcactgttttagaagtgggactggattttggcattggcagctccataattgtagttttggccaaagatcactgatggcttttgactcatcacgcgtgaggagctcctgcaggaatgctgaagaaaaaaggaagggattccatgaagggaagtaaaaaccagagcagaaacaccgagcttcccagttcctctcccccaccaccccttacgctagtgctgcattctatcaaaagacagaaggaaagatgaaggctggggatgctacctccttcccgcaagcaatgccttattctggccttcagcttaatacatcatctcttctagcttgaatccttgcaggtactcttttttggagatgagacggacaccgttgaaatgtatatacaatgacagagtttattctcaggctatgattctgcgtcttttgctaaggatgtcaaatctggatattctcggttcttgtggtcccgtattattggttagatgaggaaagttaacagagatgggttgagtggaagtagctgggcccaccatgtcctggatcttaatgttggataagtctgctgtattgtttgttgaactctgcaagcccagcatctgttttaacacgcggctggaatttggggagacagccctttccatcaagcttgaggctgtgacctgaggcatacatcagtaacgtcacagaatcatgatcagaaaggtctaagggtgaagtcacagaatcatgatcaataagatctaagggactgggaaaccaatatgctgttatttttgtgctgcatgttgaccaagcacctgaaatgaaggaaataagctgtgttttgcaggatttctgatgaaggcagacctcacctggctcactcagtttctccgtgtcttgagctggagatgttaatcaaaacgtgcatctaatcaggtgttcgtcttcattagtaacacggagactctatagctagtgggaagaactttggtgttactgacttagctgattccaagatgtgctcggtattcacattttaaaatgcctaaaatgacaaacaacccatttgcatcagtcaccttgttctcatagcctgagtatgagtgaatttggtccaggttgttcataacctcatcacttccttatagtcatcgttgggccttcactgattgcatttaattgctatttaaacaagattcacatggatttcatttcaatgccaaatcatagtttaaggttttttttttttttttttttgaattaacaaaggcatagaaactgagtggcagcaggctgtacatttgattttagtgaaatatttggtgtgggaggaatgaccaaaatttcacttttgattgcaaaataactcccaaatatttttggcaacctagtaacaggaagacggtcctcaaagttatgttaggtcctcaaggattgcttacttattccagggtagctggaggcaggagaaactgccacatccttgtactgaaagagatttcaaagtaaaaaaaaaaaaagcagatatcttggattaagggttactaaatagcagtcatgttttcaatttgagtggtatgtaataaaatacaaatttcatatttgaaggtgcctttttggttaacgaagaggatgttgctgaagacctactgtgctcatcaggtatgaggaaaatagaggtcaccccagggagcctatagattagtaggtgagccaagcatttctgagtaataccaacagtaactaatgctctaatagggtctggtaaaaacttctctgaggtaaagagatgctgaaaggtgaatatgagtgagtgaggggaaaagctgggaggattccggtcaacctcttgtttttgttcccaccaatagctaccaggtagggattgctggattaaataaaactggaaaccttccttctagctggggtcctcatggaaagacactggcctcatggagcaggaggcctgggtctcatccctgctctgctccagaggggttcaaatgagcagatctttctgggtcccactttcctcatgtaaaatggaggggtggcaaatgttggtgcatgtgtagcgtctgatgctaggagtaggtgcatttatatcacacaaggctaccgacttgcacctgtgttctgggagccaatcctattcaccactggatttaatttgctcttcttggggaagtgaccaatgtatggattcaactgggaagttatcctgggcttctgatgagttgctgtgtggtccagagaggcacacacttttgtgcagccttataaaatgggatgttttggcatctgtagctgcttcccttggcagggagcaatggcctgagtcactcaccctcttggttcttccaagtgctctccactccccgcttccctctgctgatgacataccaggagattcttcaaactagtgttgacttggcttgagagatggtattaaagagcagttactactgtacatatccttttaaaaaaggataatcactgcgccgaatctgaggctgtgatgcatttaaaattgatgttgatatttcttcctttttaatttttttcagtaatagttctccctcttttctgtccgacgtaagggaggaacacagctagctcttcattgcaggcttatcttccccgttgccctcctgaaatcctgttagtttcttgaacccaaatttattgacatattattcattataacagaaaatattaaaggctgctaaaatctgagccatcatgcttagctgagattcctgaaagactataattttaacaaggaaggctctcttgttaagaaactatgtagccccccgcctctccaccccgttcttaatattaatgttacattgtcctctgtctgtaagctgtttcctgataacgtgcattgtcattggagaggaagactattcttcccccagctcagatgtagattactaagtaaaaagtccccagaggaccacatgaccacatgatccaggaatcagaatagtgaagggaaggctccaagcatggcctgggaggtctaagtcagggatacaaatgaagctctgcatcttggggtttccttgcagatccttttcctgtgcttcagtcctttccaccttactctcccttaacgtcctggaaacatgaagttgtctgagtgtctattaagtagttcacttggctgtcatgtagggagcagacaatgatggtgtgcttccagcaggcagaacagttcaaaggcagggtgcaacctctgcttttcccccctcagacatgactgtaagtctaaattcactgtaaataatgtgtacagtggaataagttttgtaaataaatacgcatagcatagcgccacgaggttacttattacagctgcaaagggctattgagacatcaatacatcttttgcttttattggtgaacaatactctgttgcatggatatgtcccattttatgcattcatgagttgatggacacttggctgggtggtttccatgttatcgtcatgatgaataatggtgctgtgaacatttgtaagcaagttttggtgtggactgtttttcacttttgggtgtatgccagagaattgaatttctgggtcacatggcaactgtttaaccttttgagtaatagccttttgagtatttttcagagccaccgtatcattttacactcccactgctgtttgaggttccagtttctctgcatcctttccaatacttgttgcctgtctttttagaaaaatagttattgtagtaggtgtgaagtggtatcgcattgctgttttaatttgcatttacccactaatgatattgagcatgttttcatgtgtttattgttcacttatatacattacagtagaaatcttgagcttaattcatatcgttgtacctattctgagagagctttgattcattcatatcttacttaaatttctacttaaatggtggttttaaaaagagcagtttggagacaagaatgcttatgttatttaggaaaaaatatcattatcgaggaaggtctctttctgaacaacaacagcaaaattttattccaaaatcgaatgccaattgatcgtggtgaattaagtgttctagtaataagctgctggctcagaagttaggagcctgtcacattagaatgatccttttcctggtgggaattccatgtttctctttattgagaactcagaacaattgtaaaccccttcaaccaatactctactccttctacctcttcaggatttcaatgcaaaaaaaaaaattcttttcaatcaaaacaattacttttctctttctagggaaacgtaacagagatggtagttttgcatgagttggagccaccagttatttttgacccactcaggtgttcatacttcgtcagtaggaaattcaaggaactgatcttttatgtacagtaaaataaaaacaaatggggaaaaaaatctgccacttatgttcctaaagcgtacagtttaagataacagtcccctctgtgccagcacatccctgtatagccttttcagagttcagcatgaggtgtatttcaatggcagcaagttcagtcttgttcacaggtgtatctaagtaaaagggattttgcagctgggattgatcaaggatcatcagacgagaagagtatccaggtgagcccaatgtaatcacaagcgtccttattaaacagaggtaggtggctcactgtcagagcaaaaaatgagacgagaagacaggaccgaaggtgggagtgatgcagtttgaggatggataagggggccacaagccatggcatattagcagccgttagaagctgaaaagggcacggtattggattctctcagagcttgcagaaaaatccagccttgctaacaccaccagcacagtgaaactgattttggactacttacttccagaactgtaagaaaatttgtgttttaagacagaaatgtgataatttgttaacagcagcaacaggaaattactgcatactttaatgctttctttgtcctttgttaacacaggggttagacatttgatgttactgcttaagtaacactcagtgtcaggcacacttctaaaaactttcagtgtattatatacacagcagacattcaagcacagataaggaaatgagcatgtacttaacattccccaagatcatagagccagtaaacagctgggatttgaacccagaccaccggactgtaaaagtgtacagtatatcgaatgctacttagctgggttaggccacatgactggtgaaattcagctggtaatgtagtttggaaaccatagaatacctacccctacaagcaagaattgtgtggttgataaatgctgtaaagaatgttaaaggagttccttagactggggtataggttggtcagagaaggctttgaagaaggtgatatttgagaactgaatattagaaaagccggggaggtgaatttcaggtggggagcaagcacaaaaaacttgattaggctgcggattgctgaccatgataagagttcaagaaagaaataattgaaagtccagaagaatgttcattgagagcactatatgaaccctccctcccattgtgtggatttggtcactgactggatgtcatgcaaagggtaggaggagagaaaaccttacacattcccattctgccctgtgtgaggtctcaaaagtagttagtataagttataaaggaattatctgcctgtactttgtattgataagctactttttaatttaatttaatttaagtgatactttgttagaaattgtcaatgaacttgataacatcaaaaaatgcaagctgatattttggatcactaaggctgcaatatatgcagaaatcttaaaatttttactcaaagtgattatgattttgttttgcctattaggtgattttatatctaatgttaatacattctagaactttcatatggggataaaatactaataatactaataattattcacacacagtatttcaaaagtaattttaagtacaatttgattttaggttagttgatttatttttgcttatgtaaaaaatcacataagattcactgttgtaaccattgtaaagagtacagttcatagacttttagtccttagtgcattccttccttccttcctcttgcttttttttttttgagacagtgtctcactaggtcacccaggctgaagtgcagtgctgtgatcccggctcactgcaacctctgcctcctaggctgaaacgattctcgtgcctcggtctccagaggaggtgggaccacaggtgcgtgccaccacgcctggctaatttctgtatttttagtagagacgggttttgccatgttggccaggctggtctcaaactcctgacttcatgtgatctgcccaccttgacttccccaagtgctgggattacaggcgtgagccagtgtgcccggccacttagtacatttctggaactttttcatcactctcaaagagaaacccgatatccattagcagtagtcccccctcctttcccagcaacctctggcagccagcaatgtattttctgtctttgtgggttggcctattctggagacttcgtagcaatggaatcctgcaatatgtggcctctctgcctccctgtttccctagctatgttttcaaggttcatccacgctgccccatgaaatcttttttacggctgaatatcctattgtaagtatatgccatatttcgttcatttattcatcatttgatggacagttgggttgtttatactttttggatattatgtataatgctgctgtgaacatttgtgttcacgttttacatgagtgcccaggaatagaattgaataattctatgtttaactttttgaggaacccacacttggcctaagtagctttcccacaattgctgtatgaggtttcccgtttcttcatcttcaccaacgtctgctgtttttctttttgtttttattatagtcattctagtggatttgtcttaagttcacgtctatggaatctttaacaagtacatatattttaacttcctatttgtcacgtagtacattgtgtttcatatgtaagggagagcattttttttttaggcaaattcataaatataagcttgaagtgggaagaaatgtattatagttttattaatgtgcacattttcctaatgtaaatacaggaacaaagtagagacaagcgactgagttgttttcattatctcatattttggattcttgttatttatgttaaaaagtttgtttttgggctgggcgcagtggcttatgcctgtaatcccagtgttctgggaggccgaggcaggcggatcacttgaggtcaggagttcaagaccagcctggccaacatggtgaaaccccatctctattaaaaatacaacattacctggtcttggtggcacgtgcctgtagtcccagctacttaggaggctgagtcaggagtatcacttgagcccgggaggcagaggttgcagtgagctgagagtgcaccactgcactccagcctggacaacagattgagactgtctcaaaaacaaacaaaaaacaacaacaaaaaactttgttcgtttcacagttacttggctatgtgttctaagtaccttttgctcagtgcagagtgaaagaccatctctagggaacgaagccttactggcaagactaggggctgctgcagccagatgtccttcatggcctaggaaagtcatgcgttttttcattgagtatgtaaagtcttcatgaagtacgctgaataagtgcagccataagcatacatcacatgggattttgcagtaatgaagttaacaatttttacaacagtgcaactttggatcaaataaaatacagtacaatttacacgggcttggtttctgaggcaaatgtgcccttatttttatgctctgaattcattcttagtctttaatcacaggttcattatggatgtgatttaaacattacatgtcagtgaacataaattataacttcaaactgatactcaaaatgggtctagtgtgggtctagatggacaactgtcttacatgttcatttaagaggtatttggagactgaagctgtttgtaaaagggaaaagtctctctaagcaaatgttatttattgattttttttttaattcgccaagttgaaagacccttggtcgagaaattctgtatcaaatttaggggagataatcaaaatatagaaaaataagaaatcttttctcaaatctttaaactgtagatggtgggattttaaagaaactcttctgtttctcctgcagaaagtgagctgtttccggatgctatgttgtgtcttttaggacgacactggcatgctgtatatccttgcagcagccctctgcagacccacggacacccccttctcttgtttaaacatcttccagatgtgtttctttgtatcacactgacaagcaattccaccgtcttctgagtttactgttgtccatgtaattttgtttatgatgtttttgtgctggtggtttttattgtgctctgcattctgactcaggaagcccatctcctttttctatttacggtaattactagagagcattttattttggcctctggggcgtgtctgctgtgtttctttgtgtgggcatgtatgttaaaattggaaagtgttttctttgaggtcagggcttttgtaaggtgttctaagaagtttgtcaaaccccaactagctttaaaaaattttttgtttgtgtaatataacctgtttactatttctgcttataagcgtttctatcatcaactttaatgttagtaggaagaaaaactttctcatcttcatatattgactttaattagtgattagtttctggtgatgagatatattgaatcaaagatggtctggtttttccaatatctcctttctgctattattaaataaatgaagaatcacaacagagtttcccgatactggtactaacacactgtttttgtgttgttggtggattaggactgaattacctctgactcagagattcagggttaatgagattttcatcattgagttggggcaaccgaagctttgaatggatgatagcagattgattctgtttcttgaagccagtaggtgctcgttttatgtttcagtgaatgaaaacttgtgtccactgtaacctttttgctttttctgagaatagtgaattctcattttcagagaattactgtcaagaaaaacatgtatcaagccattccgtgtgctctgtttaaacagttacctggtttccttagttacaaaggtttcccttctttctctctacagttagttactaagcttttaacgcgtaccagtcttgatgttaaggagttgtcagaatatagattttttcatgccaggaggctgatttgggagatggcgggactgaattctagagcagccattctgagtttataagatctctggcacaggccataccccaaccagttaagtcaatgtgagggtgaggaagtcattaagtggtttccagggcggccatgcctgaccactagtattctaggagagtgctcccagtgagtgctgcagaagcttgaacacaaaccaccagcagtggtgataagaagacttgttagaaaggtaggaatgtagctttctaggaaatgcagtgaagaatgttttagggagaatctttgcttcaggagctcaaggattatggaagaagaaattcaaaccacagtgtgtaggtatagcagcatggtgtgactcgcaggttggtaaataaaaacttttctgagtgggaatgattttctgcagtctccctgcaagtcgtagggtttactcctttggatgttgcgctgctgtatactttactgtcccaacagcttttctgacggtatgtcctgcccctgatgtggcatccagaggttgctcttctggattcttcctggattcattgactggagagaaagttcatttcactgccacacacatatttttgatttgcggccgcctgaaacctgaatagtcttggtgttgctcagagagtatctcatgactatatttttagctacccgcgtgggcaggccctaggcagtgtcacttcactcactcggcccctcatttttcttatttgcattgaaagcctaagtataaataaggctatctgtgggtagcggtggggggtgtgtgttagagagaggtgggtagggttgattataacctcagcgggtattagaatttccccaccagcagtgacagatggatttctttttccttttttttttttatttgagatggagtctcccaggctggattgcagtggcacaatctctgcctcctgggttcgagcaattctcctgtctcggcgtcctgagtagctgggaccacaggcacccgccaccatgccttgctaatttttgtgttcttagtagagatggcatttcactgtcctggtcaggttggtcttgaacccctgacctcaggtgatctatcttcctcggccttccaaagttttgggattacaggcgtgagccaccacgtctggccgactgatgaatttctaagtcctccactgttacattagcaaaaccaaaacctcatctcttatgagttagggcttgtgatgtcaaatgtagattttcagagaatggctcttgagtaatttctctttctatccaagactcttctgtgttagtcattctttatattttatttatttctattttattcctttataatatttaattaattaattttttttgagactgagtctcactgtgtagcccaggctgaagtgcagtggcatgatctcagttcacggcaatgcctcctgggtcctggttcaagcagttttcttgcctcagcctcccaaatagctggaattacaggcatgtgccaccatgcccagctaatttttgtattttttgtagagacggagtttcaccgtgttggcctggctggtcttcaactcctgacctcgtgatctgcccgcctcggcctccgaaagtcctgggattacaggagtgagccactgtgcccggcctatttatcttatttttatgagacagggtcacactcagttgcccaaactggagtatagtggctcaatcatagctcactgtaacctcagaatgcctgtgttcaagcgatcttctcacctcagcctcttgagtagcttggaccacaggagtgtgccgtcatgcctaattttaagtttttaactaattttaaatttttgttgttgtagagatgagggtctcttgctatattggccagggctgtcttggactcctgggctcaagcaatcctcctaccttagcctcccagtgtgtgagaattacagacatgagccactgcgcccaacctagtctttcttttttaaagcattgttttcccaaaggctctgaaaaccttgttagccaaaaaaaggcacagcaaggtccgccaaccttgacttgacttcactcctgacttttaaatcaatacataaaggcttttgtttattttttgttattttgctcttcagtaaattagggcacctaaatttatattctgagtttcgattaaaaccacccaactacattcatgtctctggactgaactttggtattttctctaaggtctgtaacaggtaacagcacattgaaaaattcagtggaggtgactccatttactgagttgaaaacctttggatgtattcgactcccttttttcacacacgccacatctagtctgtcagccttctcttggcccagtgttgtaaatgttccagaatttaaccagttgtcagtctttggcaccaccctggtcctcatctcttgtacaggtaactgcctcagcctcccttgtttttccacaccactgtcccccatgatttaccctcaacactgcagtcagtgctcaaagtctgctacttctttgctccgaagtctccagtggtttcccatttagagcaaatttcttatctcccccacttcctcctctgtcctttcacacacatcaccgaagtgtaaatggtaaatttctacatacatccactttgcttataacacaccttttgtttcttgtatgattgcaaactgtaaggataggaagaatcgtaactttgcttcttgatagccatatttgctttccctagcagctttaacttaaaatgaagttgtatgtatgccataccacctttttttttggcgggagggtggggtcagtcctcatggctttgggtaagtgtgaatttcttcattaaacccccaactgccacattattccagcgtcatagagctaaacaactgcaagaaacctcattctgcataaaggaagaaatgttggaactggctgggatgcacggaccaaagaagaggttcagttttgtttaggtagctgaaacaatggtgattgttgtaaagtattgttagaggtagagttaaatcttgtctttggattgggagccccctttttttttttttttttttttccctgagatggagtcttgatctcccaggctggagtgcagtggtgtgatctcagctcactgcaaactctgccttctgggttcaagtgattctcatgtcttagcctccagagtaggtgggactacacatgtaccagcatgccccactagtttttgtatttttagtgggttccgccatgttggtcaggctggtcttgaactcttgacctcaggtgatctgcgccccccccgcctcccaaagtgctggaattacagacatgagctgccccaccaggcctggaagaggagtcatttaatttgtcgaaaatatatcagtttaagtgttattgaggtcttctctcagggttacataggatcatgcattctttgcaatacagaacgaacagccagccttaggtcagtaagtgaaacagacatagctggtaaattaagactacttgtttatttctaggtgccaacacattggtatgaaaaagaattgagaatggactttttattcttgtctcttgagaaaggcaactctatttaccgtagcattactgttgaagtcatgatcagtatgcagttagtaaacactggcatttgtttggacacggggtctgacgatgagagcttttgcccctatgagatgctcataccttatcaattaggggtgttggtagttgtgtagaaattaaagcctgtaagggaagttaggctgatgataggtctttatgggctctgcaaggaaatttggagttttcttctgagattctggggagccatggaaaggcttcagtaggggaagtggtgacatggatggtgtcaaattgcagcgtggctgtgtttgtagagaaagaacgtggggtagatggttggaattgggattagttggtggtagagacattttaggagatttcttgtctttggaaagagatgagatttctggtttaaataggtatccaaggaattgagagacagacaggattacctggattttgaaagcaaatgtcaacaatgagaaaaaaagtgccaagtccagtttcggtttctagaccagagtagccaggaaggtggtgtggagagggttgtggtggggagggaggagattgtcaagaagatgatttagtagttatcagtatttagattatgattggagataaggggacggcagaagaatcaaacttgaaggtggtggaggtgatgaaacagcagaaaaggtattttagtgtggcaggaaaaccaggggagagtccagttgccgataaaaagtttgcgttaaatttggcaattagagtgtttctcatggcagtgagaacagttttcctggaagactaggatgaaagttgaataggctgcatgtctgctgttcaaacaccagcacttctcacgtgtaatccctgaaccagcagcattagcatcacctgagagaatctcagcgaaaggaggctgtgcacagtgtgtgttcacaagccctgggagtgttcctgatgtctgctcaagtttgccaccattgccttagataattatttgttttacacatgagccactgtaagattcacagaattccagaattggaatccaggcttctttgtacctctcactctttccacctgccacctgtttccctgtgttgtgtcttggaatggccttcaagtgcctgctacgtgctggactcattgctatgtctcaggaacataaaaggcgagtaagacacagactagtcagaatgtgatctgtactacttcacacctctgaacctcagtttcagcatttaaaaatgtttgtgtgataagtatgctagttgaaaaatgtggaagagaatatgtacaggaaatgtgtgtgccctgtcgcttggtggacacacgttattagtgggaaatgctttttggagggaaaatgtgcatcagaatggtttctggaggcccatacctgtaatgaaagggtgccaatcccagggtggttattaattattgggagggctggaggacacaggaaggggttaaggcatatgagacaactttatctgtttctggaaaaaataaggcaatatgtcagtttatgttaagtccaaggacagagtttatttgtagactttctgttagtgtggaaatttgcatgagatagacaaaaataaactggtggtttgtaatataacatgaccagagataaccagtcttgtgacaatatacgtatacttctgtttatttccttgctggggttcgggtggggtagttattgttcaaccaaaaaagccagcgagtcagtcaggcaggcattgattgatctcataaaatgatcccccagcagtgtcctgggtcctggtggaagaaacagcagcactaactcctttccatcacccacagggccgtaattctaaccagccctgtcagtaaggggcaaccatgaatcaaatcaagcctgttttggccaccctgtgggtacttggagactggctggtggataggactggtttttgtctggcctcaatcccggaggctttattttgtagtgatttccttagaaaaggatttgaaggtgtaggaaagcagtgtgtcttcaaggctttgcagacagactttacttcatcttcaggatgtttcctgcaagaggggtttcctgcaaaacccctagaggccagatgtgccccacaggactggaaccacttccaacctggagagttgtatgagtggatgtctgcactttgaatagttcttgcctgctttagactctaattttcttgtaaaagatttcttatctcccacagttttcttggtaaatggagtaacacataaggcacataagactctcagggacgtagtaaaatgcactatcacgtaacacgcaatgtcaattgaaaccctatccaatttaatgcagatatgtcagtgctgtccaaaagaacttcttgtgatgacagaaccgttctgtagctgtgttgtccattgacaggtggtcggattgtggccattgagtaactgaaatgtgaccagcatgactcaaggaccttaattttaaattttaattgagttaattataagtacttacatgtgactagtggctactgtattagacggtgcagattagaatgtggcatttggggattttttgggggtatatcataatgaacataaaaaggcattagtgattaaaagatccaaatattagaatttctttgtaaataaattaacataaattcccaaggaaattctagtaacataaattcccaaagtgaagtcatatatagttgcacactggcattggtgatattgaactatttatttgatttgatttttgaagacactggccaataatttatttgtaatttgatttcctcgccaccactccatcagtgaaggtacattgacaatccaggtgtctgttagatgctggaagataatcctgctgtagatcttgggtcttttttgattacattgaaaaagcgaaccgtcagatccagcactgcaggaggttttaatgccgtgttgcgtggttctggctgctctgttccctgactgcaccctttaaccatgagcgtgcggacgtcttgctgccatgctgctgccttgacgacggcggatgtctgacatgctcagacgcaaaagagctgacttggcagctgcccagcagatttttataaaggctcagttggtggccggagattcagcctgtcagagttgtgttatgcaataaatcgttttcagcagaagttcttaatccaatttcagctgcagctttttttttttttaaataggcagtaatcaaagataagtacacattatttaatgggagtttggaagaagtaaaactctccttgcagaagcattttcaggccgtttaccctaacctgggaagcatgtctgtctgaagaaatttgctgctttgaagtgcttttaatttaaaccctaggcaagggaacatcattcacaagttcagtaagtaagtttcttctctcaagatgtttcctggccccttatttccagttgtgaatgttactcaggcttcactttatttgaatattgacagactactttttttttttggaattaaatcaattggaaattattagtactactgttactttgttaaaagggaagaaaaggttattttagacaaagttgaagttgtacctttctcattttccttcatcacccccaaccccatttttgtttacacttaatctgtgggaagaatcaacattccctcccaattttttatttggtgctttcgtttttctctcaaagtgttgctggaacaggtttggcatatcaggcagccacaagttgtttcaagtagggtgatttaacagcaggtatatgagaaacacgttctgaaaataaaaggcattcatgtacaggattccagtcatttatccttgggaggaggaaatagcaatcaatcctttccttgtccatgggcctagttttttagaatgttttttttcatttgctattcagctctgtacggctgttgttcagatccaccatccttaatcccatgatatgacattgcatgttggtcctttgggcattggagtcaggaaaagcacttctttttctttttgaaagtagccacatccctccacctgtagagctctagcgatctctatatgtgggtggggggcggggggggcggggggggtggggggtggggttggcaactccaattgccatgtcttagcatttctgtgaattttaataaagaggctctgtgttaggagatcttcctgcctgtgatcctgagtgctcctttccttggtctcctatggccccatcaattcgaaggcgatttctgcatttcagttggttttaggtactaggggttgtgaagagcctttgatgtcctgtgcccctgcccagtggaagcaggattgtttttttgcagcaccttccgtaagtgcacctaggttgccaccttctgcctctttatcaccaggttgttatttaaaacattggtggggggtctgaattccaactttagaacagatgtgtgtcacacttacaatcctgctatgtctatgttatatttgttttataatatttattgtagtggctttatttctttttggagatatggttaaaaaaaaagtctttgtgtcattgtaggctttttttggtttgtttttaattgattcagatttcctggaaggggcctggtagagttggttgacccatgacccagtttccacgaggtatttccctgtcgttactaccagtgcccttgatttgggtaataaatgacttgaccactctacctgtgaagcatgagtgtctaaggtagtttgcctgcaagtgataggaaattaactgtcttccatttttaaatagatgtaattgtcagaaaattgatttttaattgatcagaaatgtgttttcctttaacccatgctttttcatctttgtttccttctcccaaatcaagatggcctgaatttgaaaccataataaaaaccaaggtatgaacaaattgcataacgatggtttgccaattgtaggctagtaatagaaaattccttcccctactcccacttctatccccactactaataatagttttttttcatatattgtttacatgaagcctctgcaaaccaataattttaattttgcttttacctaggagtcagtgtgagttacatatttaacatctctggctactaacacatttctgagttttgaaattttacttcctgatctgatatctgccatggactgactaccaatgccacatttgcgtcaagactctggaattcatctctagaaataactaaaagtttcacgattacttcgtttcccccatacctttgactctaaagggagaaagcagtggtgtggaccttatactaaaggaaggctgagcagagaaatcatgattattaaatgcaggtggtgctgagctcactgcccaactcctgcttccccaggagaggtttgctgttagtacaatcatgatggagttttcaagtctttccagtcgactccaagtatcatcctctgggtggcacccattctgcgagctttactgacctggatgtctctgttttcttgcactaatgtacttgagtccttttcagagatttttgagggcccatattattgaagagttggctgtcactgcagaacaccatcctgtaaaggctttttcttggtgggtgatccaaccaaccttgagacaaattataagaactcttggtgtagttagaaactatatcaaaacaatctggtttttaaaagtgtggatcatgtacctttttgtcttgtaaagcagttcattaacctggtctgaatacaacttggttatattatgcacacatagctttctgtcagtggcctgtacaaggttttaattttgatgttttttgtttttttgtctttaaaatgagtagaggagagcatcacaggaaaataaaattgtatcactgggagctgtgcttttggttggattggatccttcatttggttcttgtttcatggtgatgcaatacttttacttacttcctccccatccctgcaaagaaacagtcaccatggaggatatagttaactgcaaactcatgagatcctgcagtgtcatgagactgtgcatggaaatagaattatcttcttgtatgtgttggatctgttctggaggattattcacatgtaatttgaatgtatatttaattctggttgttgggttttaaagagaagtcatcccaagttgagtaaccaaaagagaagggtttgagagaccgtgtcacgtaaggaatgattaaaggaactagcattacttagtgccatacctttttgggtgttttccgctgtgctctttgatcactgaagaggagtcaaaggaagatttctcagggtatatttatatagacatctgaattctgacagtaatactggccgcatgggatggatgtttgaagcattcgtcttggaggtttcatcttttctttctgatgtatataggcacaggatggagtcctattttgcagagcagagcttctgaaacttgaccgtgtaccagaatcatctgggcatcagtgcagattctgagcccctagatctggatgggacccaggattctgcttttctaacaggctgccgagtggttaaggtacaggtggtctgtcttggagttgcaacactatggaaggatatgttgaatctctagcccggaccgtcagctgtggagagttgttacatggtgttgtctgataaaaggcatgtgatgttatcatgtgcttactttctgagctctggtattttatgtgtgtattatagaacttggaacagtgagtggttctgttctcctttttgtcttttagtaaaaagactcacagtccgggttagagataacttgcaatgccaagttgtggcccacagaccacctgtaccttaaccacttggcacagtgttttttactaattttagtaaattttgtaaaaaaaattatgaccatatacaagtttgattcctgaccaattgctctttttgataagaaattctattattttcaaaagtggcagtaatcctgcagtttaaaaggagccatcacttctcctctaaagggcgtattcctgtgtcctctatattaagctgaccagtaaaccagaatgcatggggtgcttggttttgtgggccattccagagtgggccaagaagaggtctgcactgtcaaaccctgactgattctaccaaggggcctgaagtggtttacagaggacaaaggggataatttggattttcagacagtgaggtgctaatgggctattagttgacttgaacatatgattgagaatgaattattggatctagagggtcgggcaggagcatcatgagagattgctggaaatacaggagaaagagtctgaacagatgtaagtggggtaggggaagagtagctggaatcattggtcaacatttagcaaatgggagtgtgacagagttgttacatgtgtaagaccatgtggacatctggactggcactttttcttacagagaacactgcaaagtggctgaggaacgagtggtagcagccactgtggaggaaggatgtctcccctaggacaccagcctctgctgagaatcagaggtgtggctgagccccttgggattagtctctgtggggagtgttttatgaggatagcagtgtgacttctggcactggatgttagacactggcagggcgagtaggggtaaataaatgtcagtgggaacagtgagactgagcttcgttgagtttgtaattgattccagaagtatttattcagctcttgctatatcaggcatgttttaggagctgggatacagtggtgaacaagagtagtgatttccttgccccgtggttaaatgcctaattaaataagacagctattgagaaaatggaaaggaaggtctgtattgggtgtatgtattttgagtttgcttgacctctaatgatagagttgtatctgggctgtttttttttttttttttttttaaagacttgctctgtcacccaggctgtagtgtgcagtggcacgatctctgcacacgatcactgcaagctctgcctcccaggttcatgccattctcctgcctcagcctccagagtagctggtactacaggcgcccgccaccacgcccggctaatattttgtattttcttttagtagagacagggtttcaccgtgttagccaggatggtctcgatctcctgaccttgtgatctgcctgcctcggtctcccaaagtgctgggattacaggtgtgagccaccgcgcccggccatatctgggctgttttttagagcgttcagtactggttgatcctgaatgaagaatgatatagccacagcagagttagcattaaactggaaggatatttcttctggccttcctctcccccatcttggataggttgagtgcaggcacacctttgctgtctgcatctgggattctgctagaggattataaggtaaggatgattcaccatgaccctacagttgagaaaggcagcttaattgggactatttggaattattacctactggtctatctcttgtgaacagcactgagtcaactcatctactagatttgtgtcttgcatcagcattgagggagcaggtgacaagtctcaaccagcactgtagattacaaaacacttgtgtgttgtgtgtgttttaagtttgaattttaatgtgtagcatttgaaaccccataatctgggtcatggatttgcttctcctgtatttaaagtacttcataggtgtaatgaagctgcttgtgtcagtaactgaaccttaaatgcgcttcctttcttgtagttttcatctcacatggtttatgttttaattagacattagttgtaggggaataattctctcaactggagcctgaagtcaggatgaaggcaccagcctgcacaggatgcaataaatcgtcatgggaattttacattgaaagctattttggggccttataatttataaactgtgtacatgtaggaaataatagtttataatctcacgtcattgtttgttgtggagattcgaacagtgagaataggaacctggtggtgatgaagagaattctgtctgacagcctttatgaatagactgaggctgctgaagaggtggatttcagcctaataagcattaactcctcctgcagttaacactatcattcagttgcagctagtatattaggagagctttcttgcaaacccaggggagttgctgtaaagattaattcagctatatcatgcttttcatgtgttgtggtgtcaagtcagttgcattttactcaggttggtatttgggttcctccatttttctggtttttaatcatttgattgggaaggtctccagtgacctacacgcagtagcaggttagaaattgtgtttctcttgttaggttggggcaaggtttgctggcttctcttagccttcatgtccgaaccctgaccccgtaccgtggtctgtggatgttttggctgtcttgggagagcggacaggaagactggatgtacctccttcttctagaggcactgcccagcagtcggaaatctcagcctggcaggcttctgtgagtgaaggatgtgaaggagaaggtggaaatcctagttctctcaggactttcttcctcttgctgtagaagatggagaattactctcattctaggaaatctgtgaagcttaacgaaagtgcagcttaagttatttagggcttagagtctctatgatgttggatttctaaaatgaagtttgtatttatgcagagtataggaacgtaagtgctggaggagacgtcagatcatctagacttctcattgagtcccatggaagttttctgtgatccttcagtgttagggaggaaaaaccaattcttttgtataaaccagtaaaacagcaccagactgcccatgagattttctgccttctccttgaacaaagggaacctgaatatccaaaataccccaaatcatgattttacctgggatattaatgttattattattattatttttagacagagttttgctctgtctcccaggtgggagtgcagtggcgtgatcttggctcactgcaacctccgcctccccaggttcaagtgattctcatgcctcagcctccccagtagctgggactacaggcgtgcaccaccacgctcagctaatttttgtagttttttagtagagacagggtttcaacatgttggccaggttggtctcaatcccttgtgatccgtccgccttgtcctctcaaagtgctgggattacaggcatgagccactgcgccaagccgttcttcttattcttttaaggcccaaagtatctgtatgcttccatttcttatttatttatttatttttttttttgagactgagtctcactctgtctcccaggctggagtgaagtggcacgatctcagctcactgccacctttccctctaggttcaagcaattctcgtgcctcagcctcctgaatagctgggattacagtcgcgtgccaccacgcctggctagtttttgtatttttagtagagatgggatttcaccatgttattcaggctagtcttgaactcctgacctcgtgatctgcccatcttggcccccaaaagtgctgggattacaggcgtgaggcaccatgccaggcctgcttccatttctaaaatgaacttttataaaatgcttaattaagtctgatgtaggtgtgtgaacataagtccttcttagattaacagctacagaagagaacctctcaatatccttggccatgtgaatcatcatctattaataaaaactatagtgacttaatcttgctggttctttaaacatgtatctcttcctatttaccttgctttagtgactgttgtcaaccatgtctgtcttcccacctcttgctctgtctcaagtctctgtataattttttcttccctctttagtgcttttaaaatttgagtctttctttatatctttatgactggaattgctggaatagtctctgggctggctgtttgtttttggtcatctctgcattcattttgttaattcttaagaacttgtattcgttctggagcaacagacatgaggttgccagtttgaaatgagaccttcaagatccatcattaatgtgtacattaaaacaaaaatcatgccagttgtatgccgccaagatcagttgcctccttctgcagtactctctccttttatttgtgattcttttacttaagtggccaatgcggatccaattccatgtcttctgactggattgtaaattccttgaatgcacagcacccatatctgctgtatcctttgagctcccaagggaggcagcaacatttttaagagctccgtacatatttctgttgcagtgtacattctggcattgctcactttataaaactcaagtaaaatgatccattatccttctggttgtgggtataacaacacctttttctgaactttgtcaggaatataaaactattactagttgatgaacgtatttgattttggggcgtataaagaagtgagatggttgtgtgttgctttcattctttttaacagcctgtggattcacttttctttgaggcctgttcagaaaggtcattgcccctttaccttatgggtgtaattctgacattgagaactgggtcgtggtcacacagtacgtgttcggaaattcctttaaaataaagtttattttgactctgaatattgccttgctttctattcagtaactcctctcttttcttatgtttcttcaggatgacagtgatgggattccgtggtcagaagaacgggtggtacgtaaagtcctttatttgtctctgaaggagttcaagaattcccagaagaggcagcatgcggaaggcattgctgggagcctgaaaactgtgaatggtgagttgactcttggaatatctcgttggaatgtacaatatctctgggcgtggacttgttcctgaattggatgtattctggcagcttgtgcttcctggtctaggcacctaaaggcagtctgtaggctaggtgaatctgcactgcagacatcctgttgggtttatagggttgtttttgtgttcctttatgtaccgcgttatatagtggacaaaatacattagtctgttctgtaggtcctgtcttgctggtttttctatatgtatgtctttccacactggtatgtgagcagaactctttgatgatcttgctgaaatgtggagtctttagttcttgtccccgggttgtataggaaatagcctaaatctttctgtctactgcttttcctgctctctggctcagcggctttctcatctctccttccttccttgctgggcaggttcctgcagtgggacagctttgcatacctctagaagtgtgcttcttcctggatgattatcacttggctccttgatgcctggaaagaaacttgttcctatatgagtttgttctcatgtctgttttgaacagggttcatatggtgcagatgaagtcatccaacagaaagtatctgaggacaaacatttgcttgtagtttactattttatttcaggggaatgcagtgacattctataatcccctgtgtacttatcaggattacagttaaagtgaatgaattgaccatgtttttgtttatgcttccttggggcaaggagatgagaaagagcaggttctgttcttttttgagagctatggctctggtcttaggagagtcaccacatatggggtacttgacagtttgttagggtgccaaaggacaggttcaccatggcttccaatttgtttcccaccaccttagttgtatggtgagttgtctggcagcctcctgttggaactagtgttcacaggcactagtgcacagcagtacctgttgctgctctgtttctatggggcaatggcagagtttcctgagatgacctctctgaacttcaccattcaccctagttgtgctgtctccttccactgttgcgtgacttgaaagaagagcctctgtccaccctcccgggttttctttcttatgggtgacttgcctttggaggtcaaccattaaggccatagtggctcagtcatgtgtgcgtctctcaacaaatctcagccaacatgtatgggaaaggcccattttgagtcttaacatttgcagaaaacaaaataagttgtggaatctattgccatagaatccaatttagaccctcatagctgctttcctaaaaggcactctgccttgttctgtgggtctccagcagagagggaccctagccattcgttgcttgtaatacagtaaactaaaaaccttgtgtgtagttggagaacatttgatgtgatatagatcgtgtttattgtcattgattcacgttgaacgtagcatcttgcttgattaaatgtggggggttgggtatgaaggagaatatcacttaatcctagagtttagagtggagcagtgactgctgtactgttagattgtatggttgtgatgctctcactgtactgttcaggaatggtgtaatgccttagtgtttcttggcattgccaacagtggaaacaaaaacacccatattttcttaactgggaaacaccagcttttagaacaagaagttagccagatgttcaggatttaataaaggtagaatttgagtaaatgaacaaaaactaaagtttgtcattccagaagcaaccagtgctgtcagccagttggccaaatgtaggtttagctctggcagagtcaagggattgatgatactgaggagaaaaatctcagttggcaaagatgcccacattgggatcactgaagtctttttatttattctggcactaccttcataagggaaggttagtttttgtcatggtagtttgcttttcatccagataaagacttttaagtcttttaaaaaatacagagacacctcggcttctctttgggttgtgaaattgctgtgaatatgccattttctagtttgtgttggtttttatgaaggcagcgttccaaggttacctttttgttattctgtatgtgggatttctatagcagttctgagtaaacagatctccttgtttcaggacttgagtgtgctttaagaatcattattttgcttggtgcggtggttcatgcctgtaatcccagcaccttgaaaggccgaggagggaggattgctggagcccaggagttcgagaccagcttgggcaacaaactacaaccctgtctttccaaataatagtaataataataaattagccaggcatggtggcacatgcctctggtcccagctagtcaagaggctgagacaggaggatcacttgaacccaggaggtcaaggctgcattgagctatgttcacaccactgtattccagcttgggcaacagagcgagactctctctttaaaaaatcattattttcaaggcagctaccatcttaaacaaagtgtactttcttattttggggagctacttggaatcactggaaaacagaattggtatcatgggaagagctcctcttctgtaggtgttttcggagcatgatccagagaaagctcacacagtagggagcaaccaagactttagggctggtgaggctaggagtaggggttgttgtaactgcaagctgtgttgtgcatatatatgtggacgtgtctgtgtgtctttgtgtatatatgcgtgtatgtatatgcatgctttgctgaaaaatccctttagtttgagtggatactttatagtcagccatcactcatgtcctatctcatagaaacacttcctaaatgtcaaatgaaatcagaagataggttagtgggagtggaagcagggtgtattagtttgttttcatactgctgataaaggcatattggagactgggaagaaaaagaggtttaattggacttacagttcctcatgcctggggaggcctcagagtcatggagggaggtgaaaagcacctgttatatggcagtggcaagagaaaatgagatttcgtgagacttactcactatcacaagaatagcacgggaaaggccagcccccatgattcaattacctcctcctgggtccctcccacaacatgtgggaatgctgggagatacaattcaagttgagatttgggtggggacacagccaaaccatatcacagcggattgactataatggtggtggttttttgtgagcctgtcacccaggctggagtgtaatggcatgatcttggctcactgcaacccccacctcccgggttcaagcgattatcctgtctcagcctcccaagtagctgcgattacaggcatgcaccaccacacctgggcaacaaattgagaccctgtctttacaaattatagtaataataataaattagccaggcatggtggcactttttttttttatctttagtagggatggggtttcaccatgttggccatgctggtctgaaactcctgacgttgtgatctacctgcttcggcctcccaaagtgctgggattatgggtgtgagccacctgtcccgagccaggatggataagtccatgcaagatgtatgtttttttttcaattttttttcttcttcttttttttttttctttgagatggagtttccctctgttgcctggctggagtacagtggcgctatctctgctcactgcagcctctgcctccgggttcaagtgattgtcctgcctcagcccccagagtagctgggattacagacacgcgccaccacacccagctaatttttttgtgtatttttagtagaggcggggtttcaccatgttgaccaggaaggtctccatcccttgaccttgtgatccgcccacctcagcctcccaaagtgctgggattacaggggtgagccaccccacccggccctcaatttttaattttttttttttttttggttagttcccaacccaaaagattccttttcaaatgtcaaaatgtttccactggttcattaatttttaattgtcacagaaatttgtctggtggtagagttgtaagattgtccagtccagagccattgctaggaggtgacatatgctgtgcaagcaaggatgagaacatgtgccttaaccccagagaagggtgggtggtggtggagcttctgcctctgtgtcctctttcatgccttcgaggttggggacagtgacatgcctctgagagccctggcactcagagactctcagagatctgtaaactgaaagacccatctaactatggggcctttatgactgttagatgtggtagtgactttcttaaagtcaaacaggtatttaattcacagtagcagaattggaattgcagctcaagtcctgtaactttgaatccagtacttttttgcaagacagaatgcatgaaaactacattggatctttgcaataggaatattgaaaagaagatgttttgttttttcccatttccagcgttgtttctggatctttgattattggaaaatataaatggatgattggaggctttcctgggaaaaatcatttgtttttaccataatatttaaaaataacagcagaatggattttacagaatttttatctaatttgaaaataaaatacatgtgacatctcctgaatcattggcatcctggtgtgatgaacaagcagccctttgcccttcatctgtgtgaagggggtcgggtatctgatgcctgggaacagtgtgtggacactgcagcttgtatctgagcagtgagctcagctgccctggttctgtaggtctgtgagtagtaataacctaagcagacataagatagtggagacacgtcgtttttcatgtcataaaatccatgtttgctatcagtcttgtttttgtggttttacagtgacaaggaatgaatttttttttttttggccctactattggtaggatatgtgagttttgaacagcctcatgagttgtctgtgtagcaactgatgccatcgttacagcttgttggttattgctgggcttaagcgtgaagtggtaagatttgctgattgtgagccttctgtctactttttgttgtagataatgccacttttcatggatgtaataaattgacaaaagctttggaaaggactggcagaggctgagaccttggccactctttgagggcccttggcctgctgaggctaaaattagggacatttaaataataacatgctacacaaataatgagtacacagaattacacagtcagagagggaagctattaactgtatttgaatttcatttgcttcctataaatgtcatcttagatcaagtcctttggccagcaaaacactcttgatgagatttaagggaccctggattcatttccttaaacttaccccgggcagtagttgtgatggctagcctaccttgagttctcactatttgccagttattgttctagtactttagctgtatttaactcatttaatcttcagaacaagcaattttataggtgaggaaactatatactaagagtggattagcaatttgcctacccagctattaagtggaagcatgaggatataagaccaggccttttggatcagacctcccatgctttctggattagagctcccaagcttgtagccaccacttagataaggagaggtaattttggagcctttcataaagatagcattccaaaaataagaatttgtaggaagactttactttttttaagtaggtatttatttggaaggaggtaagtggattttttttttttttggtcgggggccgggggtgaggggatggagtcttgcttgctctgttgcccaggctggagtgtaatggcgcaatctctgcccactgcaacctcagcctcctgggttcaagtgattctcccacctcagtctcccgagtagctgggattacaggcatgtgccaccatgcctggctaacttttatattttagtagagagagggtttcaccatgttggccaggctggtctcaaactcctgacctgaggtgatctgcccacgtcggcttccccaagtgctgagattacaagcgtgagccaccgtgcctggccgtcagtaagtgaattttttattgggaaaaagaaccttggaaggcatggtaagtatttattgactgtgtttctgggctttatttatgatttgtaattgaattgatagagggtatcaaaaatgtagactgtgaattggtttcctcctctcttcagtcagacacacagatgcatccgttagtttccatttcctcacttagagttttgtgtttttaatgctgttgtcgttctggctggctggaactcactggacggatggtgcatggatgttttggcaacagctgccaatttgtagccaaggaccagtattggaagcgcagatgtgggacattctgtagccaacaccccccaagccccctttaagaaatataattttgaactcctttcagaatctttcagtcatttccaaagattcttgatgtgtgtggaatgaaatgtgggcccgactgtgaattcattgttaacaaaatatgttcacacaagtcataaaaacgtatttgtgaatcaaaataaaaaaatgtcaggtcacatggtctgatttacgtaagtttatttgtgggccatatttgaaatgaatgtctggggtataaagtgaccttccctctacgaaggggaacacctgtcccttctgtttttgctggaaactttcaggtctagctgtactagagatggtgcctactttatcattatcatttattattatttattattattattttcttctgaagacagtggcttatgggccgggcgcggtggctcacgcctgtaatcccagcactttggggggccgaggcgggtggatcacgaggtcaggagattgagaccatcctggctaacatggtgaaaccctgtctctactaaaaatacaaaaaaaaaaaattagccgggcgtggtggcgggtgcctgtaggctgaggcaggagaatggcgtgaacctgggatgcggagcttgcagtgagccagatcgtgccactgcaatccagctggggcgacagagggagactcctgtctcaaaaaaaaaaaaaaaaaaaaaagtggcttatgcttcagctttaccgaagtgttgatgtctgtgtgctagtctcctcctctgcaagctgtagggagaccagttgcagcttgagttttctctaacactcctgtgtcctggcctccagacttttttctttccctctcctgtttcccctgatgtgaggacacactctgcatgaaagaaagctgggtgaaatgaagggcttcaatgttgttgaaaacaacttattttttgtttacaaaggaagctacatttgttgtggaaaggcgagaaggcttgggctctttgtctttcagctgcttttttgatgtagtgatgtaggtggggcatttctcagattttcattttgtaagtgttggagtttttattatgtgggaggcattgtgggtataaaaactgagatcaagttgcttactttggtcaagtcctaataccttatttcatcccttctaagatgtcattgagtgatgcaccattatgttatgtatcagtaagcaagaacaaaacagtgcttccaatgatgaatgtgggacagcttaattatgagatgcatgttttaacatgagaaaaatagatgcaacttaaaatctgtgaagcaggataaaatactgtaggataaatgctttaacaaccaaatggggctgggtactgtggctcacgcctgtaatcccagcactttgggaggccgaggcgggcggatcatgagcctggccaacatagtgaaaccccgtctccactaaaaatacaaaaattagccagtcatggtggcgcacgcctgtactcccagctactcaggaggttgaagcaggagaattgctggaacccaggaggcagaggttgtggtgagccaagatcgcaccactgcactccagcctaggcaacagagtgagactttctcaaaaaacagaaccaaaaaccccaaacaagtgtatgggtgagtgcaggaggctagcagggaggcagatgatgtcagagacccagtcctaagatacaggaaacgttgtatatccatgagccttgcaaaggggtcttgaaagatgcgagagatttctgagcaagaccttggggtggcaggggtcagcaaatatttgactggtctgttggtgtcataatctagtgggacaaatggctgcaatggccggtttccgtggccaagtcacttgtactggtctgatgccaaaggagtggtgtgcaaaattaaggactgctagagcaggaagagtctttttagaggtatataggtcaaactcatcattttacagatgaggaattttgagccttgatgagaaacttaactggaaggaatggatcatgctgaagcctgattggaaccagaaatccaatttaagtgacagtgaggcgccacgcttcctagtaggcatggctgcttgcacgcatttcctggagcgttaagaatggaggtgcctgaggaggttaatgtgctcctctttcgggtcactttgtgcttgacacccactgcccctctctttctctctgcccgcctcctttgtcagttctgtgagctgggctctgtttccctgattacatcatcattcccatccaatcctggacgactttaggagggacacagcactcaggtagtgtcacctgggtagtggagtctgtatgtgtagggctatagggcggaggaggtggtctgtgtagggagacagaagggagggagagcagtctgagctctagttgggcctgtttgctacagcctatttgcttttgccagtttttataggagttcagtttcaaagaagtggggaaggcaaatggatggaaatttgttgtagtctagaatttttttttttttctttgaaacagggtcttgcatgttgcccaggctggcctcaaacccctgggcttaagcagtcttcccacctcaccttctgagacactgggactactggcatgtatcatcatgcccaggttgggatttttttttttttttaagctgaagctctttctataagggtctctctagtttctttgcggatgaaattaataactccccctccatgacatcacactggaaattatccctccttcatcatttacctctctttactggttcattcccaccattgtagaaacatgttcttatttttcccataataaagtaaagcctcccttgttcttgcatctcctgcctgctgtatctttctcttagtttatagcaaaatcccccataagaaaatgtctaaaaggtttgtctccatgcccttctatttatattcatattaatatcccccagccttcctttgccattcacctttaaacccctcacgttgggccacttatcaaggtcagtaatgattgcccaagccacatttccattattctggggtgtaattgcccatttagcagcatttaccgtgattgaacatctcctgaacaccacctgcctgcttgactgctgcattttgattttattattttattttttgagatggagtttcgctcttgtccaggctggagtgcaatggcacgaccttggctcactgcaccctccgcctctcaggttcaagcaattctcctgcctcagcctcctgagtagctgggattacaggcatgcgccaagacgcccggctaattttgtatttttagtagagatggagtttctccgtgttggtcaggctggtctcgaactcctgaccccaggtaatctgcttgcctctgcctcccaaagtgctgggattataggcgtgagccaccgtgcccaacctatttttttatttttattttttagagataggattttcttctgtgggccaggcccaagtgcactgggtcgaccacagctcattgcagcctcgactctcaggctcataccttagcctcctgagtagcttggaccacaggtgggtgccaccacgcccggctaatttttaaattatttgtagagatggggtctccctgtgttgtccagggtgatcttgaactcctgggcttagctgttccttcgaaagtcaagtttaagccactgtgcctggcccactttgatttttttttttttttttggataggcctcatgaagttaagatgtcccaaagccaactatctgtgaggtctctcatctgcttctgttgtccgcttgccccttcttccctttttcaataagtggcagttcctttgttctagttttggtggccaaaaccttggagtcatctgttacttcttttttcagatttttgcatttagctttagctaacctgttttactatttatttatttatttagagacagtgtcttgctatgttgcctaggctggagtgcagtgggggctatcacatctcactgcagcctgggctccttccccatttaacatcccgccccaaccccccgaactcaagttgctgggacttcaggcatgtgccatcatgtccagcaaatagacacagtgttgcccatgctggtctcgaactgccgggcttaagtgatcctctttcctgccttggcctcccagagtgttagaattacaggtgtgagccacttcactagtccttagtgaacctgtttgaaactcacagtaccttttgattctgaacttgtactactgctcctgttccacgttgtcatactttctagcttaggttatgttgcagcctccctgtgctcgctcagcttctgcctttgtattcctcctggcagcagccagcataaacctttaaaaatgcaaatgaggctgtgctatgctctgttctgattctggcatatctgcctatgctcttaatgtgaaagcgaaatatcctcatggctggccacttgattgggcccccgtatcactctgttctcattgtctctgtccctcttcctggtattttaaatacacaaagcatactctgtttagctctagctgatccttctattgagaattctctcccttctggtatctatgtgacttgatctctctgtatgtttcaggttcccctttaagtgcccccataccctggaatgttccttgaacattctagtaaaaagggtacctgcctctgttactccttagcgctttaccttatgaagtctgtctgcacagcatttctcactgcctgacattgtagtactgtgagggagggacatgtgcgtgcgtttattctaatttatttatttatatagattttttaatagattttttaagatatagttttttatagatattattttatagatatttattatttatatagataattatctaatgtgtctagccacattagattgtaagcgctttgagaggaaaattcatttgtgttgactgctgcttttccctgtgcctgggatctccgaagtctgtgttgtgtgaatgagcatgcagacggctcagtggcccacctgcatgccacccacgtctctgccgccccctttccagcacctcttgttgccatgctgtggatgtgccactctctgttcaggggactgagagtctgccaactgggactccagatttcattttagaaatgctcacaccgtgacaccctaggcccccagatgtcagctcatcttattttccccattgccagagggaatgtgcattcataattgtgtgatatgtctcactatcatagagattcttggaatagggtcagccttgtgtcctttctttctgaaccacattcatcgcatccctgtttaggtacaaggtatgttgcttggtggtttaaattacaattgggcttttaagaaaaagtaaaaaaattatgtctcttaattctcaattgatgatttttgtacttttactaatatttttggggttaatttaatgggccttaggtgttaagcagcttgtacaaggccacctagcagagaagtggtcaaatcagggtttgagcccaggtcttctgactccagatagctatctctccctctcccccacccctctccctctccctgttcttctcccccttcctttccccctctctctccctctctctacttctgtgtgggtgtgtgtgtatgtgtgtgtttaaactaaggaaagcctgtgaaaccacatatctccagtatgtcttgttgtgacaagtgtacacatataaccaagtgagcaacactccagtgtagataaaataccttcctatcacgctgaaaaggttcctccttctcccttcagtacagttgacatgtttgtttgtttgtttgtttagagacagagtcttggtctgccacccaggctggagggcgttataacctcaagatctggcctcaggtgatcccccctcctactggcattacaggcgtgagccacttcgcctggccggttgagttctttaaatgtatttgctcattgtggagttcctcaacaccactgcctgtatttttaagagctgttatgcttatcgatgggtttatgatgtttgtccagaatgtgccgaatgtctgagagtgttggggactgaaagtgcctcaaggccagaggcccatgtgcatccccttagcagctccagaagtggcttatgtaggcacagtgttggaataagaaccctgcgattggaaagatgatgacattctcagagtcagactgtctcttaaactggcatcatggtttttgttctgaactgttgtgtaaactcagagcagatgggctttggaggaggcttcattctgactgtcttcagtgtcacctttctcgtatagcacattagccaccactgtttttaatctgtgagtattcggaatactcagcctgggtgtgtattaatgttaataattaaaaattctggagctagggtcccagacttggcttttttccccagaggcactctatagagacatctgtaggtcatgtcttttgctagtgcggtgtctttagttagactgaatcctgtgaggagcccatgatctccttgtcgcccttgaggatgccaagacagtgtgcgtgtgcctgtggtgggataggattgctaatcatattcttgcggctgtggtgaaagtctgtatattagtcagctcaggctgccataataaattaccttagactgggctgctgatataatagaaatttccatttctcacagttctggtgtctgtaagtccaagatcaaggtgcaggccagctgggttcctgttgagtgccctcttcttggctggttcctctgagtcttcctcctcatgcgaggactccagccctctcaggtcagagccctgtgcccctatgaccttatttaccctcgatcaccttctcatggaccttaggggttagagcttcaacagaagactttgtggggagtacattacagtctctgcaggccttggacatggtgacaattttattccagtctaactgtagattaaattaaactccatgttaatctgcagcatgttttctttcttgcttgtgtgatactagaacattttcctggtaagtcaggaaacccttagagctgtttgacctttgagaagcctggatggagtaactgcttttgacagggggatggcagttgtgatggtcctgggaggatgtttctgttgtcatagattatttggggaagcattgtggaattatttgaggacttctgaggtcgagggaatcctatctgtttaacagtaattcatcttatctaccttttgtgactcccagccattttttattcttgacgtgtaatagaatagaaagaccctgcagggtcaccagatagggcttcctacagccagaggtgacttgtttgtgaataggatttattgacgttctttcttatagagtgatattgttccctgctagagaaaggcttcatgtgttttctaaatcttcgaattctgtgatatgtgtatttaagtagctttaattactatcagatttattgtaatggactagggtagttttgctgtgcttgtgaatgtcttagatctgatttccctcaaatttagagggccctttacttagcttttggaaataacctgttattacttgagccactttaaatgtttagagtcctgtatggtatatctttaaaagccagaagagtgattactagatatgcttctgggaaattaccctacagttcataaatcccttaatttacaatttgatttttaagctcacctgctgccaaatctcatctatccttttagcttcctctataggctttaaaatgtttctgtagagtcccagatttagcttcttcataatttctttcccaaggatgataaaaacagtacaagtctatcgttcaaggaggtgtggggatgaggagagaaacatgagctattttataatatattataaaatatatatatataatttttctacaacaaactataatataaaatatataaatattttataatattttatattcgccagtgacatcccattcttgattataaaccggcaaggccaaacctgtaccctgccattgacatccaaggagagctgtctcttgtgtttcatggtaacttatgccccgcatgctttcagaccccgtagcttctctccctgacctgttactagtgttcttgcttcatttatgctttggagctaatggctggttcagctctttctgtgtatacacagaaaggttgtcttcctgtgtgatctgccctgcccttgtcatctgggtaatccttaactgagtccctgttttctttctgcagttaggtgggtgcctgttcatgcttggtactgccatcttggtgacggggaaggccacgtgcggaggctcccaggctagcttctggtggtctctgaagtggtagtctgcttttagctttccatggctctcaaagttatgctgccatgtgttacatgaaggcagtccaaggtctccattttgcaatcatttaactgtcttttatatttaatcaatttatttaactgtttgtttttattttttctgttgcccaggctgtagtgcagtgacacgatctcagctcactgcagcttgcgtgcaccgcccccagcaaccctcccacctcagccgcctgagtggatgggactataggcacgtgtcaccgcctggatgatttttaaatgttttggtagagatggggtgtcactgtattgcccaggctggaacactgttatttttgatagtctgcttccatcccatgtgattggggttttcaccaagggacccatgcttttgaatgcttatttgaaaaatagcatcttgcctcctttgagagtgaatttagaagaatgcatctagagtgatctgttccctaggggctcccccagcagtgtaccctccatgagatgactttgttcctagtgtcatttgaaagggccttccagtttgctcagttggaaagtgttacagagttttaaagggtgagctggaaggctctcagctggcactttctgaatccctctgaggaaaatgttggcaaactcttcactctgcctgaactctttttataaatggagaagccaggagttgggaaactaccacacaaagtgaggtcgaaccctctgtggaaacgtgtcattatcctagctaagacagtggactattttatggtaatatgatggtatggaccccctcccaccctttgatgttttgatgtttcagagagcccttcagttcatcttcctgctaccaaaaatagaagtgtgtagtgcagcaatttacagtgtatttctatttttaactggagagacttttttcctagagatgcacatggcttttagtttccttctttgacaacttaaatgaggagggcggtgcttgagtgctttattcaacaggtgtcccaccttctaaggaaagtccacttttttcaccccctgcctcctgcccttccctgtttcagagaacaagtttccacagtaaggaggaggaacttgcctttgatttattctcatatttgttgtcatctgtccacttgcatttcagtctgatgagaaacccaatgtgagtgcgccatggagctcgagaggtttccatgctcctgagctgtctgactgcagagcctatagccacttctgcctagtccccagagaagcctagatatggagaagaacccaacagtgcttgttggtgtggggttctctatccgttcatcgccgcactgccgcacactcaggtcaagcagggacgtccttcttagctctgtccacgttgtgcagcccatgcttggtgcttctagccttctggggtctccctttatggacgaattccaagggaataggttaagattgccatcaagtggctgttcttggtagtggatgttgacatccctgctggccgatttcttagcccctctgtgagaaactctgtgcaagggattgcctgtccttttgtgggggtaggcagttgttgacagagctcaggtcatctctgggaacgcaagctgggccttctcatgtgtgctctgtaaaactgaaggaagactgggttgtccttggatccatgaatacagaccatcagagatttcctggagagaatggctgggcatctaccctcctgccagctcaggtccagtaggccgcagtcctccagctctgctagtggaaattgttgaaggatcacactgtcatccctgtaagtatgtcccagggtcccaccaagggttcagaaaaccgacaaacttgataccaccatctgtttggtttgttgttttccgtctcagaaaatgggatactaattttttttcctcagaggtggtattcttacgatgaatgcagttgatttatttcaggttcttagtgcctggaagaatgtaaacatttaaaagggcgatcattattgaggttgtagatatacagtaccccgtgacttcctatttgtgctgtagctttgtcatgaagcaggacacctaagggacggttttcaagttggtttgcccccttctaggttctgaatgccaatgtcttgtaatcaggcctcaccctagggcttggcgagctgagactgctgcggccctgacaagcatggaaggaaggattgcctctctagttttccccagcaaggcatcctcagtggtgttggtgaaagctgccctgtaggcgtagtcggtgttaggtttgtataggaggggtaccccacagactattgggttctgaagtctctgaggagccctagcagagagtttcagagccagcatgtggcatgtaatggaggctagatctgtgccagctgggtcagtggggaggcctgagacagacagaggggagaaagtgactgtgggagagcatccgatgggaacaagctctaagttagggtcaacaaaagaaaattcttaaggcctatctattttaggcagctttttagaaatgataaaggctgtgttatgcaaccattcactttgcaatctgtcaaatcatattaaaccagaattcctggactgtagccatctcaagcaatattgaatgcatcaaaaatttgatatgttggaatgggcactgacattggatcgtaattcttgttctaccagtaactgggtgtctaggagcaaggcatgccttcactggcatcctccttatgtaaaacaaaacactagatctctttgtctcatttggttttgtttcagtggtgagtggctttggggtgttgaaggcatgctcctgctctcccactttggtggctctatcatgcttttgggtcagggaagcatttggatgcttttgcagaatgtggagggaagcgaatgagaagtattctggaggaaatgtgcccttcatggctactgaccctgtcctttggtgtgtgaaggcaccagtgcagtgatcccagagtgtgtgtgtgtgtgtgtgtgtgtgtgtgtgtgtgtgtgtgcgtgtctggaggtggcaaaatgtgagtccaacttggcctaggttttagtgccactttgtccagagtattagttgatgattgctgtccttcctttactgtcaagccacgttaaggtggcctaaaaccatttctaataaaaatcaccctttgggatattcgtttgtatacgaagttttccttacagtttttagttttctgaataagcctggggctctttaacagttccaatctctatttccccttctcccctcccctacaagctagactgattaccacctcgagccatctgctgctaaatttaaggtgatttgtcagcctgctgctgcatttgccccctgaaaaggattcaccttctgtccgacttgccctgtttatgggggaggtggtgaggagggggttctaagcttgtaacaggggacgacagagggatgagggactgctgcagacatgttggtcagcatggtcagcagtataggtcattgctacccattagaactgtgtgtgatgttggaaacgttctgtgtctgtgctgtcctatatagtagccactagctacctgtgatgcttgaacttttggagctttgctgttgtgattaagagactttttttttttttttttttgagtcagggtttcgctttgttgcccaggctgctggagtgtagtggtgcggtcttcgctcattgtaacctccacctcccaggttcaagtaattctcatgcctcatcctcccaggtagcgggggttacaggcgcccaccatcatgactggctaatttttgtatttttagtagagatggggtttcaccatgttggccagactggtctcgaactcctgacctcaagtgatctgccaacctctgcctcccaaagtgctgggattgtaggcgtgagccaccatgcctggccaagagactgaattttgtgtttgatttagttaatgtaaaattaaaaagccatgcgtggatagaggctatcagtgcagccatagaggcaggatacgcatgaaatggtggtgaaattcttcctgtgtatccctatgctctgttcttgcttttggcaggaagtctttctgggtattctttcagctatcctcatggtgtgttatgtagacaattctgacaaagttaaaaaaaattgatattttactcaaatgccttttagtcttttgggcaatgttagaatatgtttgcccatggtatctgtgccactataatgagaagataataaactacagcctagcaatttattgctgagttcaaaattatctttgtctacctttgtcatttaccttatgtaggttttcccttagctccacgtaaataatgttggtagctccatctcatttccatcattgagtaattctcttgtgattgactctacttctgtgctgttgacacagccagtttccctgtgataccatgtaaattttaaaattgcctttcaccatattactaaagaaagtcatctgaattgtggaaaaattcaagatttcagaaaactgtaaaagattgccactggagagaataccataaatgatgttccatatttatcgttgcagcacttgggttatttctggtcttctccatgatgtatgaagcttttaaggaaaatgccaggaagaatatacacgaaattgttaacagtgattactggtatattgggacttggatgatttcactgcgtaaataagaggaggaggattctaggtagttttgacatttatttaaatgtttagtaacagaatgaggttacgttagcaggatataaaaggcacatattttgagaaagacgcaaaactgctttagttacagaaacaaaatcagcctccaaacaaaaaaacaaaaactgtaaaattgtaattaataaaggcccaagtatctagaaaacatcgtatgtctagatttctgcttgttaaattcagtgctcgtgaaattatatttcatctgaaaatctgaagatgaggtcttctacttccgaggaatttctcattttaatcagtgagtgctgagatctcataatttattgtaaagtatatgagctatgtctagtctaataatttcaaacataaagagagttctttgacacatttgcctttcccagagaatgttgaatgttaggtgctttgtatgtagggtgggacttcccagataagagcacctcaggcttacgcagccctggattggccttgagacacagcttactctttgacagcataaatgcaatgcagcattggagggttattgagatgagcaaggcgaatgcagtggctcatgctcataatcccagcactttgtgcggctggggtgcctcgggaggatcgcttcaggcctgggcagcttggcgaaacaccatcttcacaaaaaatataaaaaattagctgggtgtggtggcgcctacctgtagtacagctacttgggaggttgaggtgggaggattggttgagcccggaaggtcgacgctgtagtgaacctagattgcgctacttgactgcagcgtgggacacagagcaagaccctgtctcaaagcaaaacaaaagatgaacaagactaaatcttcttcttgaagaaacctgacagtttggtaaatgttacctttgtatgttttgaaattgtactggaataacacctgtcaaatggaaagaggagcaggtgctctctaggcagaggagagaatagtcagaaaagggaacagcatgtgcaaaggcctcaaagctccaagggtcaagtagtggagagaatgtgtcagctgccacacatgcaggactcaacccagctaccccagcggcttcatgcagtaattcagaaccaaagcattgctaatcggtctattgcatggcccaggaaaccgacgtagaataattccttttttttttttttggaaatggacatagaatttaaaccagtcaaagaagcgacaaaataattaaaacaagctacatagaaatttttgcttctgtcattaatttgttgtattaaccaacaaactaattattagaagcaaatcgttgcttctgttattggtttgttagtattaatttctagaaattactggattacagatttgttaacctccatttccaggttgctcttttgaaagattttatcagttaatcacactagcagcatatgagagtactacttttgtcagagtcagaaattcgaaaaggtgattactcactcttcagttttgacctatcagccctttgtttcaatgcttttttggggggtggtgggggcacggagtttttgctcttgtcgcccaggctggagtgcagtggtatgatctcagctcaccgcaacctccgggagtcctgagtagttgggactacaggcgtgcaccactgtgcccggctaagtttttgtatttttagcagagatgggatttcatcgtgttagccaggatggtctcgatctcctgaccttgtgatccacctgcctcagcctctcaaagtgctgggattacaggtgtgagccaccatgcttggcctaattttgtgtttttagtagagatgggatttcttcgtgttggtcagactggtctcgaactcctgacctcaggtaatctgcccacatcggcctcccaaagtgctgtgattacaggcatgagccaccgctcccagctctgtcaccaggctggagtgcagtggcgagatctcagctcactgcagtgtttgtctcttgggtgcaagtgcttcccctgcctcagcctcccgagtagctgggactacaggtgtgcaccaccatgcctggctaatttgttgtactttagtagagacagggtttcatcatgttggccaggatggtcttaatctcctgaccttgtgacctgcccgccttggcctccctaagtgctgggattacaggcttgagccaccgcaggtggcctcagtgcttttaatatacagttttcctttcttcactattcctaagtaggtaaacagcttttttgtgattctggttcaattttactttatactattgagtaatgttttcaaaatattctgaaaaaggttgatcatgttgtttgacttggcattatttctgtgttcaccttttaaaattcattaaccggatcaccttcaaatatgttaagtacattttattatgtgtttctttttccagccaaaaagccaacaatatatattgaaccaaaatttgagtgttttattaccatgaatacatgtaggtagccctgtatgtttacagtgtagcacaaacccttttacttgtgtaattaatgcctccaacaccagtgttgtccttatttccgtttaacaggtgaggaaactgaggcagaagtcttatgatttttcttaatcattcttaatcatagctatgtgtactatgatccactaaggtttttagtgcaaggtgtttatcaaataagtcagtattttttaatttaaaaaattcatgtagaatacagtagtccgcccatatccatgggtgatacatttcaataccctccgtgtatgcctgaaactgtcgctattaccaaaccctgtatatactgtgttttttgcttatacataaatactgtacagtgcagagcattcacgtcctgggcaggatagttcaaggtttcagcatgctacacaaaatggtgtgcaatttaaaagttatgaattgtttattttggggatttttaaatttaatattctcagaccttggttgaccatggctgactgaaaccttggaaatctaaaatccggataaggagggctacagtgttgtcttttttgatagcttctgaattggaacaactactttaattgtagccttaacaacccagttagtttcacgagtttgcataccatcacccagtccgggtcaccctactatgttcttgtaattattggtattattttataattgtacagtgtggccttgttgacatgttagctatcgggccagccacatgcattacaaagttcagcactgttggtgtttcaggaattaccaagccttcttggaaagcattcaagccagactgtgtgtgtacctaattctggttggtatagtgccagtgtattaacttttatttaaataaaattccaacaggtaacatttattattactatactgctgtcacagagtgcccacactttaatgatgtttttgaaagtcaaatattagcacagtagatcccctttctgcattaatttttatcacaccctatgtgatatggtcaatactacgtaatttcatccatataacacagaaatatcattacaaatacatggctgatgctgtatgatcattacaattctgtattatgtgaaattctctggcaccataaccttgtactctcttctatcatacgacaatccacaccaccctacccctcctttgcgattagtagttttggggaaattattaatagcgtggtactgaaataccaaggcaccaactggggttggtcttggggttgaggtgataattaggtggatggcagccatgaacctgggtgtctgcatagaattactgtgaatatgagatcccatctgaaaattctgacttctcctgaattagagttagtagagttccttggtctctcttgtgacatgttatagaaggtctttaaacattttgagattccagtggtaacattactggtgcaaaatcaaaagttgacacctgctttggaaactgatttgccattcaacttgtaaatttgaacatttgcatatccaaggatatctaccacttccagtcccaaatattatctaagagaaactctagtgcatgatttccaggagacttgcagagaggaattgcaacatggttcatgatagcaataaactagaagcgccttagatgcccttggacatgagaatcatggtggaatacctaccattcatcagttgtgtagtattataaatactccattgtgtaataatgaaaatggataggcaagcgatataataagcaaggccacggatggatcttagtaacttgatgttgagttggaaaaaacccaattcccattggaacctgttttgtaaagtttataatcaaatgcggtgaaacaaaatgctatttatatatgtttatgttataatattaaaaagttagcacataggcaaggctttaggttatgtttgagtagtttggtttggcagcgggttcacagatattctttatatccttaaaaattaaagtggattgattattcagaggactttggtttaagatttatgacttgctctgatatttcactgttgaaacttagatggtggtgccttcagcctattaatgaacatggatggagcaaagaaaagttcttccccagtctttccgccctctgctctttcttgtctttaaatattgtaagttgtgttgttattcctaaattgaatccatttcttagtgttattcttggtcttccagaggatgctgtgagtctaatagggtagtttgcatgtttcttctttagtaggggaccaacatttcatgtaaacagtctaaaacttatggctatttacaacggagagttttgttaagtctccttcctggcctgacagacacaggactgactcgcatgtactgtgttttaggaaatattgcctgcatgatcaggaagtaatgacgatggtcaggcttttcttatttcttaaaatttaaatacccgtttctctttaattgactagaataggaggaagcagtggagataggaaaggggcagatagtgttttattagtgctgatgcctgtgtgcactctgagtgtttgagtgacagaactgggggtgttcaggaaaaccactaatcatacgtgattctgaaacttcatttctggccaactgtttatgtctcggcgtttctacttttcttaccaaccttgctgagaattagcataatcagaatatctgcctcaggtctcctttccaattctctgctttgggtgctgttgatcattgaagcagccaaaagacatgtcccagtagaaggaagaggaaaaaggccaaatagtcatcccccgaatgtcctttaattgactctgtatgacttacgctgtagtggggtgcattccaaacacttgttcactgttaacaggaacgtgctgcactgtagagcactaaataagggtctgctctgggggctcaccctggcagccattggagagcacctcttctccagccttctatgttctgtagggaattgtatattgaggttaccccaccccttcttccccagtgccactgggttctcggatagcctcctgtctgttgagacataggagctacctctgtgacctttgctaagagacaaacttgtttttagccacagtttcatcatctatgaagtgggggaattgtagtagagtatctctgaggccctatgtataattatgattttaaagtggtggatatcaactagacactaaggaggaccatcatctaccttcgtgatgtctgtgtgtgtgtgtgtgtttatgtacatgtatatatatatttatgtttatatatttttgatgtaagaagttgtggcatgttcatgagctttaattatttaggaaacaagagttggccattgtggagagaatacccgctagcctgggtgacttcactcctgagcaaagttgacatctaccttcagggtttttgtgaggtataaataagttactgtgtgtgaagtattagaacccagaaggtcctcgttagatggttccacaactaggaaagaagaaactgaaagtattagtaaggcatgtttccatttcctctggatgcatctgaggaaaacttccagtgccatgtggacttggccaccatcttcctcccattggaagggcatgaagagaagcatgtggtagtgttgagagcatgtgttttggacattatcattgctggttgaagttcaaagaaaggcttcaagaaaattgactttaaaaatcaaaaagctataacatatgaaaggagatgtgtactccagttgtctgaggccagggagctggccagccctcagttggactcctgcctttttcacccctcccagcagctgccagaccacagagccagttctgtgaaagatcctcaagaaacaatgagagaaaacagcttctgtttgattagattagatcaatttatgtgcctcggggaggggcctgcgcagggcagggggaggggtgcccctctgttgttggtgggggcagcggtggcccatgcggtcacttcataagtaatgaggctccgtggaagctggaatcagagtaagggggagggcgggctggaggaggagcatgtggaaagagatttctgcagtctgtctggagagctgcccaggtttcccagccaaaaaaacaaataaaaataaataaaaggcaagtgctgaatgacacagattatgatattaaaaagggatgccattgaaactgcgccctggagtccgctgtctgtgggggtggggtgtgcttggcaatggggtgggggcatctgaccggctggggacacaaaagtgtgcacaattaaactgtgaatgtccccctccccccatatgtcagaaattctatacttcggatttgtctgcattgcaggttggggaaatggcaggatgaaaagctagtgactcttttcctttttctcattttaatttatcagggtggggggagccagccggagacccctcctctttggtgttcgattccctcccttgcacataaataaccttctctcctggctgcctcccctccccctcggccccattgctgttctggccgtcctattgccgcgcggaatctgcactgccgcttgcttattacgtacaggggaggattgttgacaagtgctccggagcctgcctcactgcgctcttcctccctccctccctctgtccttcttcctctctgtctctctgcaatgatccggctctgaggatggctgctccacgggtctgtcaggtgcagtttttggtggcttatcttgaggaacctgggatagaaggtctgttcctataaataaaagacaaaccaaatagctctagatttgtttcaggctggtatggcttttgttggagaaataggcctttgtgggtttccctgctggggtcctgattaaatccattgtggatggcaaggtgctatatatatatatatatatgagagactatgtaaaaagtgttgcaatttgcttaatattaatattcttttagctttgatatcctccctaggggcaatggtggctcctgcaaaggcactgtggaaatttacaagagagaattaatgtcgctcttaaagcattaagctctgttgaccattttggccaaagctgcagtttcaatcaggcttgtatgactttagacatttctctggagactgaatgccatccagctatagctggtcccttttattttattaccaatttatctgatcatttcccagcatttaaaaataaatgtttgattaaagttaattagttcatcctcaccatagctctggtttccttcataaacagcatgtttgctttcatttccattaatcctttctttttcttcctccatcatctttccttgaaagatggaggaaactgaggcatgcaaatagatcctgagacctgaagtggttctggattgagacctttaaacttcgagtgctcttgattcttctcccgaatttcgtgcattaattcatgtctgtattactgtctgtaaacacagatgaatttcaggaaccttcaatgtttggtgcctcaaatcttagcagattccatggccacattcctatagtgctgctttctgtactgcttccattcattatatttcagtagtggaaagaatgctgctctgggaggcagtaggcctttctgaagttatttgttgtcagcagttttttttttttttttttttttactttgaatggactacttaatcctctctgaatatattcatttgaaaagtaggagggcagttgatttcttgatatgtgagtgaggtaataaggaaacaggggaactactgtccctcctagtcatgctacaaagaaaacagaacttagaacttccaagagattccttttatcctagggaatgaaggcagcccagagaggtttcagggcaaagggtgtggctgtttatttatctacaaattatggtgtcagtcaggacacaaagtttgtggagctttgcccatttatcattacagattagtacacaaaccgataactttatggcacttgtcgatcgagttaaagcagcagctttgcttatctttggagagcctggctcaaattggatacctggtttcttttggtaccttacatttgtggggtaaagatgataggaagctttagagacctaagtacatacacacttgtaattacttgaaggtagaagaatatcattagctatctgtgaacatgctgtgttcatggacatctccctttgagaagtgcaaattctgtgagatgagaaatcaaatttgggcctgttagtttatctgaacacaagactttccacatgttgggcccatttatctgtcttagaaaaaatctcaaaaaaaaatgcccttgtgtttccgtctccttcatgtgactgagttcccttgctctgcagtgatgccattgttctgccgctcatggttacacatcagcctaagcccactgtcgccttgagtcagttttcttctgtaggcggcttttgaccttggaggtggtcagttctgggccctctgtggtgtggaattcttttcatgagctgatagaagctcgagttgcatatcctaggggattccagggatttatattttggtgcgtatttataactgggttgtctggtgggtgtgtgtttgactgggttgtcagtgtaaaattaaaagggtgttgaaatgaagtgtggacccagagcagttacggcctgggatagagtagtcatgggattggacacaaaactagaactgccgattgtagagcatcgtgggtgtttataattcagtcattattattattctaggtactgtacttgttctgattgttataaaggtcatattaaggatgaagaaggagtgaagaggggaagagagtggggaggatgagcccttgccccaaagaagtaacagggagttgtgccaaaatgagcagtacatttatgttcacagtggtgatcatcagagtttaaatagcttctggtctgtttgggaaatctttcatgaagatcacggctctttgtttttgtgagaggttttgtgttgaataaagttaaactgtcagccttgttgtctatttttatttatttttgttggagcctttcagtgagcagtgttttctgtccccctgggattgttggttaggatgtacgaaggggagatcttttgtcttttggtggttcttactcatttggggtctagagagccagaatggggcccattctagtagtagcagtgttctgcttacctcttcctctgaggaaataggagatatctgctgggtttgttcctttgtagctcaaggcgtttattgccttctggggcccagggtcctatctttctcaaagagtcatttacttgtttctgaaataggaaaaaaaggatagagtcagacattttccttatctacccagtgacccaacttttccatgttaataatgaacactgtgtcaggtcttagtatctaacgctttctcaaaaaattgtgcatgcaaaagaggtgtagattgttgaaggtgtgtcgtgggggcggattctggtggtggtgagagagctcttgtgagattgttgatttacaaatcagtatttacatctgtttttgcaggggttaaatataacaaaaatatgtcccccgcgtccacctattcatcctccccattcctgcctccaaatcttgggactgttttaagtagtgatgggtgggggtgtttttggattgtcttttcttgaccggaatgggaaatctccatagctgatttgacagtagacaaaggggagccctagtcggctcaggggctggtctcataagggaaagggataattattttccataagccgaggtatgaaaccactttcatttgtgcctcgttgaccacaagtgtgccaccgacatcctgcctcatgacttggcatttgttctcagtcacaccagtgtgttgatctggtgagcaagtcagtggacaagcctgggctgtgctctgcagaccctgtgccctgctcgcccctctccctggagctctgtgctccattggaagcttcacatgctgacctgcatgtgtacagtgatgggcaaactccatgttcatattgaccatgccaagcaggcccaaagccaaatctgccctggcatcggaatgcctaccctgcttaaaaagcaattcatttttttttctctttgcaaaacttgagtgaacataacatttatttttcactatcaatggcagcaaaccatgcattctgatgacctcagagagggccctacctcagccatgggggctgcttttataatttttctatcatcttaaagtgcacacacacacacacacacacacacacacacacacacacacacacacagaaattgctgctgaaaatgaaagctgtctttggatgcttgactgtttgatatgtaatgtgataaccttgtctcacagtgacagggtgacagacggcattggctctataatacagaattaccttttgtgcatcttttctacaacaaagctaaatacattgagtcaccctaatatgctaatgactttggtgtgctccagatgttttagaagccctggaacagcctcaaagccctccttgtttttcctttctttttaacccttgttttggggcactgcttttgtggaatagagccattggcttttcctttagttttctattgtcatgtatgtgtagctaatgagagaggactggtaaaacttctttgtgtctaaaacatcataaaatgatacagactacatgctctagtccctttttttttccagatattagaaaagagttgtcttctgtccatacatttgtgttctgaaatctgtcgttctcattggttgctttagaagttccttcagctaaaggaatctttggcctaatttgtgtttcaattttcccaacgcccatcatataaggcaagagggagatagccatacactagtgtctccagttaccaagaacaacaggaattcctattccattttgatgctgctgttccagactcagaagcctgttttgttgtattgttttgtgcggtcttttcatttcttgctaatttgggagatgcggtgaaaagctcctgaatgtgcagagctgctgatggcagggttctgttgtgttcaatttctttagagttctcggctgcacaaatggacactgccttgtggctaaatggtcttggatcccagacgcacttctcccgtcagctgatggtgactagctgaggttgcaggcacagtaaccaagctgcctttactgcaatgatttacaattttcagctcatatttattgcttttgtgaaagacaatagacatggtttaatttaagttcaacctactgaatattaatagaggagaacaaatgctaatgggatagactgactctttgggccattcattcaatttcctctgtttaacctcctctccccaacaaaggtttgtgttggtcggggtgggggagggggttggaaaaataaaaacggtttgagtgtgtgaaggaggggatgccatttcattatttctcgttgactaaaaataataattttaacaattggtggcagggctttgttaggggagagaaaaggcagtacattagcttggctaatgttataataatggctctgttgccctgtggcgtcatattccatcttgctgacctggccctcctggattgggcaggctgtatgattgggcttaaaacattcaaaatgaaatgtggtagccagtacagtggagattggtcgccagcgggggggttagataaagaaaaagcccaggtttatttaaccatgtaggctgtctgactattaataaatgtaaatgttttctgggctgatatatacagaatggaagtactcacattgaaaaagttgatcacgtgcagaataaagtcagtcttgcgccttcgtaagggccagtaaaatctatggtcctggccaggcgcggtggctcacgtctgtaatcctagcactttgggaggctgagacaggtgtatcacaaggtcaagagatcaagaccgtactggccaacatggtgaaaccccgtctctactaaaattacaaaaattagctgagcgtggtagcgaacgcctatagtcccagctactcaggaggctgaggcaggagcactgcttgaacctgggaggcggaggttgcagtgagccaagattgtgccactgcgctccagcctcatgacagagcgagactctgtctcaaggtcgggggagaggggagcctatggccctttaatttgtataaaggcagttccttatgtatgggccccattttatgaatctggaacatgaatgtgattctcttctagttcaggtactcattgcaatcctcagaatggtggaaaacttggagttcttggaagatttagttagataagggcctggaacaatggagtcagtactttgatttctttttgctcagtcatgccttatcagagtagccttatctgttttgcattttgcttacataaaatcgtttaatattcctaggtatttttcatgtgtaaaatctcttcataaaattacccctaatttatacttaagcaattgatttgcagggtgagagggtggttggggagaacattacacatctctttacatttatgcttcttagacatgcacattttttccaacctgttaacttttttgtctctatttgtcacgttggctgattcttgtaactttgtgacattttgcaggcaagtgtctttttttttctgcaaaattattgataaaaggtacatgaggccatgtgcggttttcacgcctgtaattccagtgctttgggaggtcgaaatgggcgaggattacttgaacccaggagtttgagaccagcttggcaacaaagcaagaccccatgtataaaaaaaaaagaaaaaaattagtggggcatggtggtgcacacttgtagtcccagccattcgggaggctggcttgagcctaggaggactgcttgagcccaggaggctgaggctgttgtgagcatgtcaccgcactctagcatgggtgacagagcaagaccttgtccctctgcacccccaccccccaaaaaacaagtccccagagcagccaaagcagcattagtgtcacctgggaatgtgttagaacgggggacacttggggggtgattcgcatgcatgctcaagtttgagagtcacttctctttacagtcacccagattcattttgtcaggaggacagaagcaaagctgtcatcaaaaagcttaactttcttacttacttgctaaatcatttgttcattctttcatgcattcacctcttattcagctaagacttcagctgctgttatgtaccaaagggtataggaacccttcccagtcttcctgagctgctcctagtccttatttagttcgttttttataccaatatagctcttcttcctccttgtcctcttcgtccatcaccacttcgtgtttttaggcttactgcaaatcccaactttcttgttcttgttttggtattgcaagcttgccggctggctccattggctcactcattatcctctccatcacattcttttcttcacttactactgagtgatgcatatgtctgtgtttgtctgtctctcctaattttagattttgattaacctgtatccccagtgccctggcatatagtatttgttaagtaaattaatggataaattcagaattgatcccttttttgccttctgtgctttattctccattatgttattcccaccttgtgctattgaaaaaaggaaacttcaggtcaggtgcagtaactcatgcctgtaatcccagcactttgggaggctgaggtgactggatcccttgagcccaggagtttgagatcagcctgggcaacatggcgaaaccccatctctacaaaaaatacaaggattagctgggcatggtggcatgtgtctgcggtctcagctgaggcaggaggatttctccagcccaggaggtcaaggctgcaataagctatggttgcgccactgccctccagcctgggcaacagagcgagaccctatctcaaaagcaaaaagaaaaatttgaactccaccaagacgatacatatttacgatgtgcatcctctttttttccttttcagttttacatctggttctttaaccagcatttttattttcagttttctctatggtaatttatccatcttctctttttacagataagataaatattatgttccttggccaactctaatctcagttaaatgtcgtctgtatcctaattgggtgggaagagggatcccccactcgcatagtgacactactaatgtgatctgagtgctgatcagtaaagatattatttaaactacatacgtaattttagtttctgcagtcacactcaaaagaagtaggtgaaatcaatgttaatatatttgatttaatctactccaaaacatttccacaattaatacaacattgtcaatgacatgttacattctgatattaaattacaattaagtaaaattaaaatttattttcttatccacactgggcatatttcaggtgatcagtagctgcacatgactagtggctactgtaatggagaacatggcttcaatctctgaaacactggccacgcttttatccttggattcttagatttccatacagttgtcttcttttgccctcacagtgcagactcccagcattttctttgggggtttttgtatgtttctatttctgtattgtagtcacaactcttaaagcctcattagtcgaagtgaataaccgtgtgttttattttcaacctcatgttatcactcatactctgaaatgatgtaaaaataggtaactggggaaatgcaagcagaaacaagccaggtcccagggctttgttgatgtgtactatgttcattcagaatgtttatgtattttttaatcaaatacatagaacactgtgttctacatagtgtttagtacaactaacagaagtcactttctgagatacttcagtcacaaagacttaatacagagaaatgaagtgtgcataaaattggtggaaggactagaagagcaaaaatcaaggggccactccgtatttttggcttcaagatcaagcaccgtaaaactgcagatgctgtgctagcagtgctgctcctgcccagttctggttgccttcgagggttgtgactagatagtggacagcgggtctagttgctgtggacatgtcttatcagtggaagcttcttgttggcagaacctacattgatgtaagggactctgaggctttgttattcacccgtttccctatagtgtgaccttactgctggttagaatacttccatatcagttagtacacagctgctttttagagcccccaagggcctgcagcttctttccatattttggttactaaaagcacatccatgagcaccaagactcccctgcttatcatctgctatcatagagaatccttatcctttgagatgatcaaaggcaaatccggttacaatctaatcttgtagatggctatgaagaaaaacaagtggagtaggatttctagttaatatctaagatgtagctgcaaagataaggatgccttttcttgtgtggcaggtactggttcctgcaggcaattccagaaaggatttcagtatctgtagagtcaatatttacctcttcaagagtgactagtttgataacagatactcctttcttcctttcaaccctttagctgcaaaagatgtttatgtactctttaaaaacgaatcctgaagtatagtgttacagttccaaatttctgctcaaatttcttactgttgaaattgtttccctcttaggcatttcactctctttaaaggtctcatagaatgaggttttgcttttctccacccattcaaaagggatgtgtgcttttaaattctcttctatccacattcttgtctgtcttcatcagcgttgtgtagggttaactgtggtaaagtgctgcctcctgatgtgatgtatttaagtgtttgtccccttttctcacctgtagggctccttggtaatgaccagtctaagggattaggaccagcatcagaacagtcagagaatgaaaaggacgatgcatcccaagtgtcctccactagcaacgatgttagttcttcagattttgaagaagggccgtcgaggaaaaggttagtacccaaggctgaaaatattggtaccttcaaccagggactgcaaactcaggtgccagttttcaccacatgataacgtgagcccattcacccaatctcttgattttcatagaggagccagaatcatgaggtttcgtatcaaatgccctgctttctaagtattgtctaataattataattaaaaacgggaaaaaaaagtgctctggactgacagcacatgttcctgctggaacagttagccaaagagttgccagcttgtaatgcctgtcttaactgttcatttaaattgattctcagcagcagccatcttgaggaatatatatattaggtgatgttttgccatttctgaaaagagatctttctaaaaatttgaagaagtaaatgtggtgtttctgagacgttttttccttgtcaggaaagctgaaattacactgtgtatttttaatcccttgctgttttaccaagttccaagttagtagctgtggaattggtgcttaaaacttagaacagcagttatttttatgtggctttcctaaataagcttcagatagtttggtaaggaagttggctttagtagtttgataacagtttgtggtttcatggtcaaacagtggcagtgacattttataataatgattttacttgggtgtttttgaaaccctttgcctagtatctaccctacttcatacctgatatgttacttcctttttttccctgttagaatttatatttccctttgttctctttatgtttacctggaggaccagcttcctgactttttcttagaatttgttcgtttccgggattgaaggaaaagaaaaaaaaaatcccccttgtcagttcatctctgtttactcattctggagaatttactttttagaagcaatctacatgtatctatctaaagaagaacagaatagagtgaaaaattaagagaaaaggacaagattagccatgtgtagatatttaagattcctgttttcaggactgaaagttgagatgcatagctcaaagtctttattttctccatcatgagggtgtcgtcttttaaatagccttttaaatacattgaatctgtattcttctctcattttctcttcatcctcagcactttgtcttagaagatgtcataagattcgttattagtatagttaggatcttcccgtgtactgagctttgtatgtcactcctttaaaaagagtgtctcagtgatgaacctgttatattacagatattccataacaaacattcccctgttccagtttaaagcatgaattatcacaagagagtgattttaaggatgtgtaaaaaattgtgtcagtaaatatattggaatgtgtgataatattatccatgcctccaacatgggcatctggcatgcatctggcatcaactttcatctccatttggggagcagaattctctgagtctgggcacccactcctttagctatgtggctggccatcaccctcacttctggctgagagctggtcagcatccgggtgcagtgatgtgtgttgtaggcttcattcttaaggaggagggactctttgtccctaactcattgtgattctctcagaagatagtgttgctagctttctctttgtatgggaccacagtgtcatgtggcacctgagtgcaaagcagtcatttaactggaattctttaaggtagtagaaaagaggaactctttttcagagttagctgaaggaaaacttagccttggcaaatcgtttttaattattaatgtgtcaagtatcttactgaattaaggattcattacagcctactaacttggttctggtctcatcaaggttttatgtggattaaggtttgataggcttgggtagattttggggatgggctggggcactcttgattataggaggaagattttgtagccttcaaatgtgtagtgtcattagggtatgcatttctttttttgggggggttgagggagacaagagtctcgctctgtcacccgggctggagtgtggtggtgcaatctcagctcactgcaatctttgcctcttgggttcaagcgattctcatgcctcagcctcctgagtagctgggattacaggcacacaccaccatacctggctaattcttgtatttttagtagagatggggttttgccatgttggccaagctggccttgaactcccagcctcaagtgacccacccacctccgaaagtgctggggttataggcgtgagtcaccacacccagcagggcatgcatttcttggggtgttgcagggtatgtagcaagcataaaatgataacttaaagtcttaagaactcctttgttttgatccttcgtcagtatttagtgggttgggtatgaaccctgccttcaaaagcagagtaaatgacttgggacctgaatttccagagcttcggtagtatactgttgaaactgtaatatgtaacctgtcttcaacgcacatacagaatgccttttctaatagggtaatggaatgtgctgactctgaagatgagaagttgagcctaaagtaactacctataatggttaattttaaaatatctttagtggattgttaaacagatgctggtttttttacttgcgagttttaaatttctgaaacattatacatgggaagagcttgtgtttttgtttttttttttttttttttttttttttgagactgagtttcgcctttgttgcccaggctgcagtgcaatggtgcgatctcggctcaccgcaacctctgcctcccgggctcaagggattcttctgcctcagccttccgagtagctgggattacaggcatgcgccactatgcccggctaattttgtagttttagtggagacagggtttctccatgttggtcaggctggtctccctacttcaggtgacccgcccacctcggcctcccaaagtgttgggattacaggtatgagccactgtgcccggcagggaagagcttttaagactgaccatttgcattctcttttggtctttagactttgtaggagaaaatactgattcctaaaaattcatattgttgtagtttgtttcgtgttgctgtaacagaatagctgagacggggtaactttagaaatacagaaatttattggcttacatttctggaggcttggtattcaaagattgagggactgcatctggcgagagctttcttgctgcattataacttggcaagagagcacaagaaagtgctaagctcggtttttgttgtttgtttttcttttttaagtttagtttttaaagagatgggatctggctttgttacccaggctggaatgtagtggtgtgatcatgacttactgtgttctctaaagcctgggctaaagggatccttgtgcctcagactcctgagtagctgggactacagtcagtcacatgcctccacgcctgtctaagcttgcatttataacaaacccactccctagatagtgacattattccgttcacgagggcagatccctcatgatgtaatcacttcttaagatctcaccctctcagcactgttggattagggattaggtttccaacacatgaactttgggggccacattcagatcatactgcagggtcataatttatgtatgtgctttggaaagagcattttcactttattttttagaatgatacgaattgctagttagctatacttgtagatttaattactcctactctacacatccttttatgtgcatgattttagaatcatcagcaaaaaaatatgccttttgtctacagtagggtgatggggaaaggggaagactgagagggattgtatgtgcttgacttccttcttatggaaaataaaaatctatggtggagactgatgccagcctcagttccaactttatctagtctgcttttccaacctgcacgttgaagcaattacatttttctgatgatgctaataacatgttttaattcttcagttaaaacatccatgtgtttacttaagtgttgtttttctgcagaaaaccccctgagtcagattttgctgtgtgtatttactgccagtgcctttacttgacactagggatctttttagctatagaaaccagtggagtccagagttcttgagggttttggagtttcctcaaatttctaattctcttcctcagagtttttctttatggaggcaactacaacaacaacaaaactcaaaaccggtatatttttacctagccattgaaaggtcatctgagatgcctctttacaaaaggaaagccagtcccccttcagaatctgtctgctgtgttcacggaaagggcagcccaagaaaagatgagtggagattctgtgctggtgggaccctgaaggctgagtcttgtttttagttctagatgttgtttttctttttcttttgatcattgtggtgggtgagattgttttttttttaaatgatatatttacatagtttataacatatatttttttgtttgtttttatttatttttattgatcattcttgggtgtttctcacagagggggatttggcagggtcataggacaatagtggagggagggtcagcagataaacaagtgaacagaggtctctggttttcctatgcagaggaccctgcggctttccgcagtgtttgtgtccctgggtacttgagattagggagtggtgatgactcttaacgagcatgctgccttcaagcatctgtttaacaaagcacatcttgcaccacccttaatccatttaaccctgagtggacacagcacatgtttcagagagcacagggttgggggtaaggtcaccgatcaacaggatcacgaggcagaagaatttttcccagtacggaacaaaatgaaaagtctcccgtgtctacctccctctacacagacatggcaaccatccgatctctcaatcccttccccacctttcccccctttctattccacaaaaccgccattgtcatcatggcccgttcccaatgagctgccggctacacctcccagacggggcggtggccgggcagaggggctcctcacttccctgtaggggcggccgggcagaggcgcccctcacctcccagacggggcggctggccgggcggggggctgacacccccacctccctcccgcacggggcggctggccgggcagaggggctcctcacttcccagtaggggctgccgggcagaggcgcccctcacctcccgggcagaggcgcccctcacctcccggacggggctgctggccgggcggggggctgacccctccacctccctcccggtcggggcggctggccgggcggggggctgaccccccccacctccctcccggacggggtggctggccgggcggggggctgacccccccacctccttcccggacggggcggctggccaggcggaggggctcctcgcttcccagtaggggcggcctggcagaggcgcccctcacctcccagacggggcggctggccgggcggggggctgacccccccacctccctcccggacggggcggctggctgggcgggggctgacccccacctccctcccggatggggtggtgccaggcagagacgctcctcacttcccagacggggtggctgccgggcggagggtctcctcacttctcagacagggcggctgggcagagacgctcctcacctcccagacggggtcatggcccggtagaggcgctcctcacatcccagacggggcggcggggcagaggcgctccccacatctcagacgatgggcggctgggcagagactctcctcacttcctagatgggatggcggccgggaagaggcgctcctcacttcctagatgggatggcggccgggcagagacgctcctcactttccagactgggtagccaggccgaggggctcctcatgtcccagacgatgggcggccaggcagagacgcttctcacttcccagacggggtggcggccgggcagaggctgcaatctcggcactttgggaggccaaggcaggcggctgggaggtggagtttgtagcgagccgagatcacgccactgcactccagcctgggcaccattgagcactgagtgaaccagactccgtctgcaatcccggcacctcgggaggccgaggctggcggatcactcgcggttaggagctggagaccagcccggccaacacagcgaaaccccgtctccaccaaaaaaatacgaaaaccagtcaggcgtggtggcgcgcgcctgcaatggcaggcactcggcaggctgaggcaggagaatcaggcagggaggctgcagtgagccgagatggcagcagtacagtccagcttcggcttggcatcagtgggagaccgtggaaagagagggagagggagaccgtggggagagggagagggagaggggggagagggagagggagaggggctaacttatattgtttagaatggaaccattacagagactttcatcctgttctgaatgtgaaggtggccctgcctatctcctttctcattttgcccttttattccactcagttcttcttgtaaagtgtgtatttgccccatcagtctctcagtatgtgtagaaaccagaatggatggattttggtcatttgggtgtggacttgtggtcagaaactctttggaaggatggttatggaggtgaggattatttgtttgaggaatgaaacgataatgtacagttaatttggtgatggtatatttttagatgcaagtaaatacgagatctgaagtgtacgattcaaaagaggtcatctgagttggcgactaaaatagagagcaagattaactgtttatttttatctgtgggtgagtagggggaagagggtagaaaaatttcacgagaacagtggttcttaagcgggttttgtggagactgtggtgcagcataagagtatagactggggccaggctgtgtgacttctcattatatcttgaacatttacttgttgtgttatataatgcaacaggtattgtatcatacctgttgggcaggttatataatatgtctgggccttagttctctcatctgaaagatgtgaatcacagtagtaactgcctgatggtgttttgtgacctgaataaattaattcttgaagagaattttggtgtattggttgggtgcaatggctcacacctataaccccagcactttgggaggctgaggccggccggccacttgaatccaggagttggagagacctgcgtgggcaatatggcgaaactccatttctaccaaaaaatacaaaaaaaattagctgggcctgttgacatgagcctgtagtcccagttacaggagggtgagatgagaggatcgtttgagtctgggagatggaggttgcagttagctgtgatcgtgccatcacactccatcctgggggacagatccagactctgtctcaaaaaaaaactaaataagcgaataaataaataaaaaattctcatgtataaatggtactctgtatgttagatgttagtagccattgtcagtatatgtgacacatgaattgctacatgtgagtatgcacatcctttcgagacttctctgacttgtttcagagggtttttaatttacacaaatgatttatatctttcctctctgtcagccctaccacagccatctgtaggcagatggaaatgtatgggtactccctcttttgaagttattgagtcacgggaaggaccctgtggtgtatgttgtaaatttcctctgccgagcttggtgcgacctagtatttgcctgaatggagcaggcaagagtggtggggtgaggagattccatcgtggctgctcatgcattagtcattgcttcaccttagggagagacccagaaccctaatgtttagtgttgggatctcttgttaactatattcctcttttttttttttttttttggtaagacagtcttgctctgtcgccaggctggagtgcagtggcatgatctcgtctcactgcaccctccgccctcccgagttcaagccattccatgcctcagcctcctgagtagctgggactacaggtgcatgccaccacacttggctaatttttgtatttttagtagagacggtttcaccatgttggccaggatggtctctatctcctaacctcgtgatcgcccgcctcgtcctcccagagttctgggattacaggcatatgagccactgtgcccggtcaactatattctttagaagggtatattgctttttgtgtactaacagactttaaaataaaaactcttaagagtttctatttaactagtacagaagtaccgactctgtctctaaagggatgtaacttttttgttaaacaaggagctgctgtattttagttaggctttcgatccaataggacttagtttaaacactgtttgtcctattagattgaattttgaatgtaaagaatcattggaagtgtatggatttcataactcagtgtactctgagatatgacatgcctctggatatgaagacatgttgaaagtggtgagaattctctcaggcttttaacaggtatgatattcacagctacattgtctgcacgactgtgttccttattctttttggtctgagttactttgatggtataaaatacttttatttacttcgagtttgaaaggaagataagcccaaatgtatacgaatcttcttgatagcatgcatgaattgggattattcaaagtgagcatccttaataattggaattatattaaataagtgcctagtttttactcattcctgtatcaaaaataaattagtagtataatttactattaaatgcaaaaaagtgaaagcaaaacaatcagcaaaaggcttaacatttctcttaacccttgatttatatttagaagcttccactgatcaggttatttggagtttattttgttcttacaacctggagatatattttataaataagagaagtactagtttaattttcaactttagagttatcatgggtgaaatgtactctctactacagaaagtaaagaaaaattgagtaatagattatgatgtggcagttttgaacacaaaagatgtggaagtaaatataaagtaaatatgggtaaatctcgcctatcttctgtttcaagttatctacgtagttgccatttttgtttctagtatcatttgcatttgcttttgcttgaaggattttaacatttctaacattaggtctgctgttgatcattcagcttttgtatgtctgggaagatctcatttcacccacattaaaaaaatacttttatgataattgtagaattacatgcagttatacaaaatacaccttcatttcttatagatatttttgctgggtataaaattttaggttaatagtcattcaccatcagtacttcagtgacactgccccactgtcccgatgtgcatcatttctgatgagaatcctgttgttattttcatagctttgtaggagcaatcatttaccacaattttcttttgaatcccttactggttttaggcaatttgatacgatgtgccttggcagtttttatttccagagtttgagattcattgagtgtattaggtttgtagatttcatttactatggaaaaattagagccattattatttcaaatattttcgtgtgcattcgtctcccctttggggacctaattttcatatatattactctgaagttgtcccatagctcatgtgttttgttccttttttgatctgtatgttgcattttagatagtttataccctaaatctgctggtaagactattgaatatatcttttatctcagacattgttattatattttagaagttacagctgggcacgcctgtaatcctagcacttcgggaggccgaggcgggtggatcaccaggtcaggagttcaagaccttcctggccaacatggtgaaaccctgtctctactaaaaatacaaaaattagctgggcgtggtggtgcgcatctgtaatcccagctactcaggaggctgaggcaggagaattgcttgaacccaggaggcggaggttgcagtgagccaagatcacaccactgcactacagcctgggtgacagagcaagactccataaaaaaaaaaaaaagaagttagattttggtctttccataatcttcagtgtctctagtaatatgcttattctttggtgtttcttgaacatgtggagtacagttacaagagatatttgagtatatgtgctatttttgtcttccattatttacaaaacagttttgattgattaatcttcctcctcatcagtcatattttcctgcatctttgcatgtctggtagctttttattacttgacagacactaaatttttctctggctgtgggaaatgttcgtatttctctacatattcttgagcattgttctgagatctgattattagggaacagtttgatctgtttggatcttggtttcaagcatggttaggtagggccaaagcagtgtttactgtgaggcattgtttccctgctactcaggcaaaaacccttacgagtattttacttgatgtcctatggattatgtttaccatgtaggctagtaagaatgggcactattcctggtgcttttacaatttggatactgttcctgctaatcctttctggaaatactttctcttgggtagcttcctaacacaaatgtgcttgttagtactcagcggaagacatgaggagcgcctttggcagattccattgttgtctgtgtggctctggcctctgctgtgctctgccttacacattatatcaccttggcctccccttgtgtttctcaaccccggctctgcttgccctttccgtaactgctgcagcctggacattctctcagggcagtgagctggagggatcatttgttttccatccgtcagggatcacagtatgttgctatatggtggccgttgttttgtgtggatttttagttctttcagacaggcaagaggtataaatcctgtctagcttcactaaaagcggaagttctttctgttctttgaatgttgaatgagagtgtgagagagacacgtaccatcaggaaatggaactagccacggtcatagcttttcatttagttttgttagtctttaaaaaaaaaaaaaggtgaacagcgtaagtaagccctgactccaagaaaaaaaattcaaaattaataaacataagcattcggcctataataaaaatagtaaactccattccataataaagcctgtgactattagaagtccttctttgaagctatgtaatctgtctcttccgttaggaagaactgaccttagcctagataatattgtgctaaaaatttttaccttaattcttttgaaatacctgtttttaaggttttaccaccctcacttggcagctgagttaataggatttggatctaagctttcacatctataatgcctggactttgccactgtaccatgtcaccttccataagttgtagcaaatgtaggtctgaattttcaggtgtgtgcatctggacagcagttggcttggtgagctgtactgggggtgggggtgcagtttgaactggggtctggcctggtccacaactgtgctgaggggcacctcttgctgtcatgcctagtgttactcttcagctgacctcttctagtaaataatctcttctgccaagggatgtattccttcttttctgaagtacatgaaatgccttgcttcattataaactgagcgatggatagaaaggggaaaagttttagcttatcttgagcagaacctacagctcccgaaatcctctcttgggtcctccaatgttagaggtccttttgtttaaggaccctggagagaagcgcgtccaggagagggcccagctcagctgactgttgtttcaggtagctgctgcaagtagatctgtgattacttgttgattttagtgggtggttctctgtccttctggacgaatactctttttctttacttttcctgcagtgagctggagttggtaggtttggggtggctcacatcacagtgcttgcttgtgcatattcacctttcccatggaaatcttccaagtgtgggagggaagtttgtatttcacgcactgtgccttcaccttgatcagcaaggtgaacctgagttcctgggtttcagtgtctgaggttggatagcacagagctaaggaagcgttttctgagtgtgccagcaattctcgctgggctgtgcatgctctgtttcctggaggctgcacatgctgctcatcgacattcgtggtcaggttctttccctgcagcaaaaacccttggttcagacctcatttaactcacaatttctcacctctgctctaggggtacccaagatggtggctgtgtctccccacttctgcttccccatcaggaaatagagccccaccatgggtgtctacacaatagatgaagctggtcaaataaacacgaaatctgactggttttgtgtgggcttccccgctccccctccctctctcagaattttaagtgcttggcagaatactgcttatgtgactctgttttgggattataaaacaatcttttgtattgctccagtttacaggaagcagctccttttttctcattaatgacgcctgttgttgagtccatcttgtcttctcatgggttaggcctacttgactatgctatcaaggcttacaggtgtagcctagtcttttttttttttttttttttaaacatttatttgagacagggcctggctctgttgcccaggctggagtgcagtgttacgatatcggcacactgtaacctccgcgtcctgggtgcaagtgatcctcctgtctcagcctccaagtaggtgggactacaggtatgtgccaccacgtccagctaattattttcattttttgtagaagtaggttttcaccatgttgctcaggctggtctcgaactcctgggcttggttgatctgcctgactcagcctcccattgttgggattacaggtgtgagccactatgcctggcctgcatcccagtcatctgtcattggaaagaaagctgaggtccagctcgttttttgaggttggggacaggatagtggttttggcttttgggaagaattgtgcaactactaaattcagaaggattaatataggaggtagagttcaacatcacagaaggaagagtttggatggggaatgtggtttgttggtgtaacactgtggggcaagttgttcctgagtcatgggacaaagacaggctggtattttaagttcacttttatgggtcatgtgtgggtagatttgtgtggcttacgtggcaggatggactgcaggttccatttcaaattgttactacctagatcaggataattaagtctgagaggtacctctgtatgcttgacctcaccctgggctgagcacgtacgttttatccttggtatgggatatctgtttgcaggatgctggagaagcttgtcacttctcatctccactccttgctggcctctgcttcccttggggccgtgatagggaagaggtgtgaacatgtgtctggtgaccagtgttttgggttcctgcaactgtgaatacctttatggtgctgctgtgcctttgcaggtgccctgtctttgggtggagctccgtttttgttttccccaagacacctcctctcccggagggtctttttgttaacctctggtccctttctctagtggtcaggcttcatcccctcgttggtctgcgttgtttggccagtacttactactttcactgcttagacatctgagcccgcattcctaaactctttctgggaggcacacagacgtggatagacctgtatgtattcatccctggctgcctcttttttttttttttttaagagatggggtcttgctttgttgcccacattagtctcaaactcccagcctcaagtgatcctcctgcctcggcctcccaaatttctggaattacagtcatgagccactgtgcctggccattgactgtctcttgatcttcaagcccttcttggcttattttgatttggaattgatttacaccaggaggagttctccctccacaatcctccaaatgttgtggcttagtgtcaaacatgtttttctagcccagtcttataattaaccctttgattagaaattaggagaaaagagcaaaatttatgattatagattcatatagactgggcttgaatctaaagtaatactctgtccctgggggagtcagttatctgaaagaagagcaattttgcagagtggctctgttgatgttaataacagcaaacacttggccaggcgtggtggctcacgcctgtaatcccagcactttggggggctgagttgggcggatcacctgaggtcgggagttcgagaccagtgtgaccaacatggagaacccctgcctccactaaaaaaatacaaaattagcttggtgtggtggcgcatccttgtaatcccagctactcaggaggctgaggcaggagaatcgcttgaaccaaggaggcggaggttgcggtgagctgagatcgtgccattgcactccagcctgggcaacaagagcaaaactctgtctcaaacaaaacaaaacaacaacaacaacaacaaaccagcaaacacttacatagcatttatgatgtgctgtccacttccactgttttacattccttacatatgttagcccattttattctcatagcaaaatcattaagatacgttattttattatcatccccatcctaccgatgagaacactgaggcacagaagactatacttgtctgggagacaaggctcccggtatgtaatacagactcagtaaatgatgtctgctcaccttaaataagtcaatgaagagccatcataatgtactgatgacaaacagagaatagtatagttgtaccttcaaaatttttggagtggcctgagaattctggggtgtggcaaagtgattccattttaaccttcagaggattgtgacctccaaggagcacatatgcataggtgctaatttgtaaatgaaaacgcatgctaatagttttctcaggtgctgagatgcagctacatatgattgatttaagcctgttttgagccacagaaatctgcatcccagggaaagtagagaagtaaataatttttgttgcggtgtactgtggtatgaatgtgccccccaaatttcatgtgttagaaacttgttccccaatgtagaggtgttggggtcatgagggctgcaccctcttgagtggattaatacctttatcgtgggagtggattcatacctttatcatgggagtggattccttatagaaggacaagataggcccccttttgtctctcttgccatatgttgccttctactctactatgttaggtaatggcatgaaggccatcaccatatgcctgtccatcagtctttaaaatggtgagaaataaatttctgttctttatatgttacgcagtgttaagcattctgtaatagaagcctcaaatggactaagagcgcaagtgtgctgcaaaagaaagatgcgtgaagtttgtggaacacaagcagagtgactagggaaattgcggcagcttcaatatggtcatgtgtgcacttcattttcccatatctgggagatgtaataagagcgagaaaaggaggagacccttttagtattgtgcttttctgggtaagtcagtcctctttgacgtcctaatagcatgatgtgagctgccagctgtgggtttctcagccaatctaatgcagggaaacaggcctgtacctgtttctgtgaacatggtagctgggtgcagtgcagttatagtaataacatgatgagcttcttgagtactgggcagtttgccttgggaggggacagcagctacttgagacctgccactcaggaagggccagagttttcgagattgtgactcttaataatcctcgagtggggccgaggtttgacaagtgaagggttctttgtgcttcttaacaggctgcttctagaaggctttgtgtgcttcagggcattctctttaccgatggacttcacaagctggctgagagagaaggcaggattgaattataaacttttctttaccaagatggtgagctggaggcaagatggttagttgatattcaaaaggacgcacgtggatgttgggcaggctgcacattggacaggcccagctaggcagactggaaatgaccaagaacccaggtagtttgtagaattaaatgaaataacctgtctccacactatgtaggaggttactatgcttaagtgttggctcccaaatcagtctaagccaagatgtgctcagaggcactgaatcaatatttgttgaatggatgtggactgacagcactagcttccttcagttatagtagggagtggaagagctccaagagggtttcctgtcttcaccttagtaaatgaaaaacaaaccccaatcttgcttgcttgctgtttttccaacccccagaggatgaggtgacttaagcctaatagattcttggataattacaaggaggtcaggagattttaccatttgaaagccatcagtgccattttatggttttgatcaaaaggcttatttatagtatacatttacattgtttaagtgtatgtgtttgttaaagaattacataactggcctgagtaatggggggtacatcagcaccttgatatatttggagtagcactttgcaggaatgtaaaggagggctgtgtctggcaaccctttgtggctgtgtgcaatttatttttaaccttgccatttatgcttatcttcctgaaattgtgttttatgagtttgaaacctgggtcttctttctttaacaagttcctgttcctgctagacttgggtctgtctctagagaggtcttattagatactcaattcttctgcataaacctgcaccacactctgtcctaagagttcagagcatgtgagttgtagtgtgatggaaggaatcgcaaagcctggacctgccgcagaatatttgcatcctctgcaggtttagatgttggcgaacacttgttgggacttcatattcacccccattatttgcttcaggctcctggcaaacatactagcttcttccgcatttgtttattttctagaaaacaaaaaaggctggaacttcatttttattactgcagtggccatttcctttttctgttacctcggagatcagattgcagggatatcacttccaccccccatgtaaattatggtctagtatgctttgtggttgccatggaaactgctggatacaagtttctttccttcctcctctaagctcttgctaggcttttaaacagtaacatttttgtctcatccctttgccctccttgccttttcacacccccaaaggacaagtctaaacaccaccctgatctttttcagcagtttctgaccctcctgggaacatttgatcagttcctgaatcttccttagtgtgaatgtgtagacactggttcctggcatcttacgtgaaaggcactagatgctggaattgtgagggcttggagtcacctggtttgtgaaggaggtgacagccattaatgtcacttgtggttcacatgtgagtgcttatatggggttgttagacataccttttttttttttaatgcagagtgctgcttgatgttaatacctcacttgactgcctagtgcaattgcaagtagtgcacagtgctttaactaagatgagaattgaatgtttcttcttactactgtcgccgtatacttcctgttccctcactgcctccctcctattttattgtaagatgggagtctggcgggtgatgaaaggcagcaaccaaagtgacttgttttagaagaaaattgggttcatttctgcttttggaaattttaaggaggggtttttatggtaagtgggtttttttctacacaataaggtaaatatcatgcaagaatattttttcctttaggctcaatggctttaatttgcaatgatagaatcttctttttttgttagatatatatttttgttatactttaagttctagggtacatgtgcacaatgtgcaggtttgttacgtaatgtatacatgtgccatgttggtgtgctgcacccattaactcatcatttagcattaggtatgtctcctaatgctatccctccaccctcccgccaccccacaacaggccctggtgtgtgatgttgcccttcctgtgtccaagtgttctcattgttcaattcccacttatgagtgagaacatgccatatttggttttttgtccttgcggtagtttgctgagaataatggtttccagcttcatccatgtccctacaaaggacatgaactcatgcaatgatagaatcttctagtgccaggcatggtggctaatgcctgtaatcctagcactttgagaggccaagactggcgaatcacctgaggtcaagagttcgagaccagcctggccaacatggtgaaaccttgtctgtacttaaaatacaaaaattagctgggcctggtggcacacacgtgtaatcccagctacctgggaagctgaggcaggagaatcgctggaacccgggaggtagaggccgcagtgagttgagatagcaccactgcactccaacctgggggacacagcgagactctgtctcaaaaaaacaacaaaaaaaaaacaaaccccccccccaaaaaaaaaaaaaacttctagagtatagtcctcattaattgtcttgatagctccatcctcatacttaaagctattcacagaattggttgaaagcaacatcatccatatgtgattgtcttgcctgtgtttgggtggggcgaggaataggtagtctttgctttctaggctatgtccacttgagtagggatgggtccttgtttatctttgtatccccaatggtggcagagtatctgctgtggaataacaatttgcatgtttttgagtgtgtaaacaaattctaagagtagctaaaccaactattaggaaaaggaatctttttcttgttcttttttttttttgaggtagttgtggtctcactctgtcacccaggctggaatgcaatggtgtcatcataggctaactacaaccttggattcctgggctcaagcagtcatctcgcctcagcctcctgagtatctgggaccacaggcacatgccaccatgcctggcatacattttcatattttgtagaggttgggtctcagtgtgttgcctgggctggttgcgaactcctggtggcctcaattgatctttgcacttcagcctcccaaagtgctgagattacagacctgagccaccgcactccactgaaaaggaaacatttctaaaggggtcatcacatttcagaggcaaatactcctatttagaattgttctggtcttttgcacactatcatcttggagggggtgtatgcacacgtgtgtgtgtctgaagtaaaaacccattggatttgtttttttgaagtgttaggaaagaaccgagtacacgtttttggtagtgatacataccgttttgtctccggccctgcgagagagagaaatgtacacacacgtttctacattcttttccctgggtacagaaactccacatctgaccacagggaagccaaaatgtaccgtgtaaattttactccttggtacatctgattagtaataaggaagtgtgtatttctagcctcacagcaggcttgtgagtcctcagacgtcattataatattgctgaattgctagcagccctctctaattagtcatgccaagagaaggcaaaattccatcttcttgcatgaagattctctggttcttcccttggtgccaacttagggttaactccagctttctggactctttcaaatataaaaacatttaacctctgcatctatgtccatgataataaaataatgtcttataaggatgccattaaatatatctgacgttcttgctaagattttgttttttccttaggtacaagatgtacttttgcttctttatcttcctggagtttagttatcaagacaatttctgtgacattaaaataccatgtatgaccactttatagaatatttcaagtatgtacaattgacctcaatgttaattcatttcgtttactatatacaaaatgtgggaagaaggaaaacatttaaacagaaaacaagaaccatgcttgatactgagttattttcctgctgtttatatgtggttgccaattatatgttgaaatacatgaggccttttgagatgttgcttctcttatatgaaatactgttctgttgagtatataacagtataataggccaggtgctttattgaattaagtaaattgttttctaatatgatttaaaaagtgcactaagcaagcattgggtcgggtgtagtgagatgtccatctgtgaagggcttattgataatctggtgatgaaatcgcttttgtcagtgcctacttacctgggggttgtgggacttgtggggcatgctttccagtccaagcccacttaagcttctgctaactcttgggggaatgaatggtctgtaggggctgctttgagtaactgcacatgatccagaccagtcttggggtactttattattctgtcaacttggaactgtgtaggatgggattctagcagtttctaaatatatgttgttttcagagccattctttttctggaacatagttacaaatttgttcagcctgttactcagcccccaagaaatatgtttgcattcactgtgacagcctgtagactattggtaccgtgcagggctgtaatctgcttgttgttccggcaaataccattgtgtaatgtggactggcacttggcctttctggagcttgtagtttttcccctttgtagggagttgaactgcctttgccataatttctctcctgattatcatttcttatgcctcctgcaattcagcctaattgaactgtgctgggataaatagagcccttacagatcatgtgaatgtgagatcatcccattccctaaatgaggaatctatggcttagataggactgggtgctgtgagtcttcctgattaatgttttgaaatgatttaggaacccaaatgcacgctgatgttttccatcagctgcgatccgtatgtctcataaacgatgccttcctgctgtttgggttttgggaattgtttgaggccaaggagaggagggtatggctccttcagctttacccttctgaaggtcatgaggaataattctgacaaacaccttgaagacagtgacggcttgtgccttctgtgttgctgttaccactgcctccactacttttagtgtaaacaagctctttacatattattcacatttcttggttcaagcctcagaagaccaggatataattttaaattgcaattagttaattgaaattaagtttctaaagaaagtgttgaagactcttatctttttccctttcaatgaagcaatttaagcactgtaagaaatttacagatggcagtttggataatgaccccatagatttttttccagagaggttctgtctccagtgttgtccctttattcagggacattgaatcagagctgtgaagcagtctgttttgtggtttctgttgaaatcctcttaagccaagtcactaaaggtatgccactggaaaggactcttatctcttgtgaaataaatccagtaggaagcctgttctcaggaatgcctggttaggtacacaggctcactgtgctcagtagtgctcctgcacttttgctaagccactgagacccacagttcagctggtaccagtgtgttaccggtggagggtgtccaggttcttggcgttttgaacaaagaattggacaaaacacacaaagcaatgaaaaaaaaaaaacacagatttattgaaacgaaagtacactctacaggccgggtgtggtggctcccgtttgcaatcccagcactttgggaggctaaggcgggtggatctcttgaggtcagggattcaagaccagcttggccaacatggtgaaaccctgtctctactaaaaatacaaaattagtcaggcatggtggctcacgcctataatcccagctactcggtaggctgaggctgaggcatcacttcaacttaagaggcagaggtggcagtgagctgagattgcgccactgcacctcagcctgggcagacttgggactctgtcatcctccagctactctcaccttcaaaaacaacaacaacaacaacaacaacaacaacaagaaaagtacgctccacagactgggagtgggctcgaagccagtgtctcagtagcactggttgcagaattttctggggttcaaataccctctagaggtttcccattggttacttggtgtatgccccatgtgaatgaagaggatgaagtgaagtttcctgccatagctggaaagtttggaatgttacaaagttatttacttgggctagaaggttggcagtttttccgtttgatttagttctaggaagtccttaggctccttccctccagaccctgttctcctgctgcagaagcacaggtttttgaataaagttagatgtttggtttgtatctaagctgttaaaagctacttaaaagtgtctgagcctctctgtttccttgtctgataaatgcaaccattacaccttatagcattggctataacccagtatttctcacatgtaagcgtgcatcagaatcatctggaggactggttaaaacacagactggctaggtcctgccctgagggtttttgattcagttaagtctgaggtggtgcctgagaatttgcatttctagtatgctcccaagtgattcttttgttgctggttgaagaatcacactttgataagcaccactccgagggctctatgtgatttaaagcacgtattatattattacccttaaataataagcacccattctatatatagttgctgggtaagtgaacagtgattatgtctgtggttaagaatttttagggccaggtagccccatttccttatagggaccttttcctttgtgtgtccccaaatgtttccttcctcagcttgttcatctgccttgtgcagagaaagaaaagtaataatgtctttccttcccttgcggtttatttgaaattatttatagtctagttgttggctgcatgcctcctccccaacccccatgtctctctgtgtgtgtgtgtgtgtgtgtgtgtgtgtgtgtgtgtgtgtataatttcagtttaggcagtcgcttaggtggcgtgcatcctacctaagggcatgtcatccaagtgaaagtcttttcctgatgtaagcaacttattagagcaaacaatgtgatttaatcttggatttcctttgtattaggcggtcatatgctggctttaattttatattcataagatgattcccagcttcctgtgggttgcaatacatggtgcttcccttggccaggtcgatgcacccactactgcccacccacatcaattgcatcatacaggactggggatgtttttctccattcttttggggatatggggggaaaatttgacagtgctttctccctgatagttcttttctcttataattagcattaatggatgatactgtggctgacaataatgcaatatccatcatacccctgttttttaaattcttttaggccctaagagtttttccagtagccctcactctccagggtgtgtgtgtgtgtgtgtgtgtgtgtgtgtgtgtgtgtgtgtgtgtgtgtcaggagtagaatagggttgagaatatgtatgtgccagtgtactttactttccctggtttcacatgtttcagcttggcatgagacagtttatacccagtgggggaatctgcccgtaaaacacatgtacctccgtaagtctgtctccacccttcactgtgttcctaacagttttttttttatttttattttttaaacgaagttttgttgtagatcagagaatgagagatgacattaaataatactgtagctgtcccttgatgcacagaattcatgcttctgtgatggacaattccatatactcctcaatcagtgacttatcttttaaaatggaatttgttgtatttttagcctgtggggttgtttagggtggtggtatctttcagagagtgttgcacatagatagattacgaggagccagttccctagaggagctgatggggagagagattttcagaaaattcttagaagggcaaatagggtcagctgtcatctttgtttattttaaccactgtgaaatgtggaagagaatgcattggtttttcattgtcatgacaacagaggctcttcacacccctgggcacaacaggaaatgaacccattcatttatccaagtgtgagtctcagaatcccattatgtgaattccatggagtgttaattcaagtattttgatagaatgttattgtgtattctccagcagtatttaatagttgcctaatcctactcaagtcactaaatacccttcttgatctgctgtttcctcatctatcagaaggagataagattttcatctataggacagtgtttctcagctttccgtatcttgggccttaacctctgctggaagaggactttgaagttttgcagtctatataactcatgaaatttttgctttctacttctcaagtaggtttgggtttccttcaatagaaaaatggtttgttactgccaagtgagagccttaattctggctagtttatttttgatttctagaagctctgtttggttcttttcaaatgttaggttacactcaaatgttagtttcaatgtttgttcagtggtagtttcagtgttcactgtttcaggtgttagtttcctgtttttcaaacttggcttttatttgttttaacatagtctgatgattcaaattactgactgacattttcccagttggacatctgctgggttttcctcatggtgctttatttcccctgaatgtgaaaagttgtttgagggggaattcattgaggcctgagatgaaaaaactcttcttacagagggttcatgtatgtttttgctacataccttagggtatcatcagtccaacattatttaaactaaattcagggcttgagagatgatttttatattccaaatcctcgtgagggccgcttaagttttacaacttctcaggaaagatatccagcctttgggaatcctagctgaatgtaagaaagttgtctcctgttagagccccattttagggcttggagggtggtaggatgccaccttcctcccagtgccagtgctagggaaatcaagttcaggtttgtttgtgtcagaagcacaaaagtggggtcatttctccttgggtaggtctgggttctagcttttgttcttagaatttccatcagtaatttcttgtttgtttattacctcattgatggctttaatgacttgcttgaatatcttggcctgctgtattcctggaaatgactcatgatgccatgctttgctacattttatttttttaattttaaataaatacattttactaatttgaaatcgagtagattaatagtataagctgtttggcacattggagtttcagtgccttgaggatgaattccaaattttttttttttttaaactttgaacttcaggagtacagagcaaaccaatcccaaagctagcagaaaacacagaaaagctttgctgcattttatggtttctattgaaatggggaaggttttcttgtccccctctcagggcgtgcgatggaggagtggctcacttcttcagtgccccgctgctcatacctctaggggagcatacagacgggcaggttgtagggctgcaaccccacagcagtctctaggggtgaatgtttacagctgaagtcccagtgtgcatgtgttacagggtgctcctttagtttgctgtctataggcggcttgtgttagctcaattagactcccttccttgaggacagagggatttctgtaacccatgatcctacccttggtgtatcagaagaatcggatcacacgtgggcttggagaatgatcgcaaggttttattgcatagaagtacctctcagcagatgggagagccagaagggagatggttttcccctggaggcgggctgcacgctggtcgatggcttactggcctgccagtgctcttctgcggccgtgctctccacaaccagccgcttgtgtcgtcttccgctgatgtgttcctcaggacgtccagcagcttgtgtctatgtcttgctagggtcttgggtttttataggttttcataggcccaggatgggggcgtggcagatcagggtggtcttggaaaatgcaacatttgggcaagaaggcagaagtgccttcctcacttaggtcttgggagtagagccctagccaggggccacgcccttcctctacccagcttttccctccccaccttccctatcatttaaagggaccatgctcttctattcccagcactcctgtatcacttgttgcctaccacctgcgatgccctgtttgagaagcatgattagaaaaatcccagcaatcttttctgtttctagtggtgtggactcctgcttggaaggcttttcttgtgattttttttttcccccataatgtttatattctgtgttttcctattcagttataatgagttcagttcaggggagaatgaggttcaagtggactgtgcttccctgagagagcaattgagtgctctcctggtcacataggtcttgcacttctggagctctaaatggaaccctcccagcatatccaggtccttcttagagcccgactgcaggccaccctgtccttcagccgtgtgattttacggttttactgttcagcttcagcatagattctacctggaagcacaggggtgtgtggtcatcttttcttcctggaaaggtcccttttggtgaatgattgagttcccaagccaatttctgtcccagagggaggttgtttcagggactggttgggaatggcagtctccactgactccatggtgtagtctaggtcatactttatgttgtgaggctgtgactggattatgtcgcacttcatgaaacctaaggcttcctgttcagacctgaaaggcagaaactgtgtctccttcattatccattccctaaggtctgtccccttttatgtccagctgaatcacaccatgaacccttggcctcagctccttatgcactgtcctttacgcttacattgtggaagtcctcccttaacctagttagttactagggttgtctatctgcagtgctagtttgtgtaacattctctgcttttaaagttgtatgacataaaaaaatagaagaaacgtattttaaaaagaggaactttttctctaccctcttaagttcagttttggggagcctgctaattaaatggatgaaagacagattagcaacagggaaaaaaaaaacagatttagttgagttcacaaagaaatgtgactctaagaggaggttagaatttaccatcctagaatcgcttgaacccgggaggcggaggttgcagtgagctgagatcacgccactggactccagcctggcaacagagtgagactctgtctcaaaaaaaaaaagaaagaatttaccatcctaatgggatgtggggggcaaaagggcgattctgggaggacaaataaattcttagaagagggtggagaaaggccacttaagaagaacaagtgaatttttggaaaggtaagtgggcccttagcagaatagatagaagatagaatatttttgtcagtgtctgttagtattgttttccaaacccacacaggtttaatgtcttggggcctgttctgggtatgaagttactatggctgctttttgatggtattttggaaatgggttgtggggtggtgggatggggaggaaacttgaagtatccagctggaaatgttctcatttacaaattgctggaggagaagcctcagcaacccttcccaggactgatatatggctgggagtgtggagtttggcagtggattgacacagttaaagatggatgcctctttgatcaaagggagaccattagggcatgttgaggctggcggaatcggaaagttgcattataaagagggtagttatgcatcccccctcccagtgcctgtcacccacatctttatgaacatgattctgcatttgcccagttggctggcataacattctgctgaagtcagcagtgagggagatgtacgtacgtagcttttttcatctgtgaattgcagagcgtagaaggatgtagttcatttccatgattcctctgcacgtcattgtttctgaccaatgtggacaaaatgtgagtatttttctgacaattccaacttctttgttattgtggttcctcctggcagcccccgctttaaagatcctttaggcaaatgttatcctttctcttcaatggtggcttgccttcctgtggtgggggcagcatagcttgaaaagagctaggaagcagtttccctccacagtatccttctatctgctccattgaaatcccttactgtggccatgctcggtggctcacacctgtaatcccagcactttgggaggccaaagcaggcggattgcctgaggtcaggagtaagagaccaccagcctgggtaacatggtgaaaccctgcctctagtaaaaatagaaaaattagccaggcatggtgttgggtacctgtaattccagctactcaggaggctgaggcaagagaatcgcttcaacccggaagggggaggttttagtgagctgagatcacgccactgcactccagcctgggtgacagagcaagactctgtctcaaaaaaaaaaaaaaaaaggtgtggggggtgctttttctggttcaggcagtggaacaggggagaatgaggcaaacccagctacagtgcctctcataggaagcatcacaaccattaattactcctggtgcaagaggactcagtgaagctaggtttgaggttggggtaaaagataagattttggacattgctcatttaagaagtttttagctgaaaaatcttatcattggctgctttcattgttggaggtttataagcctgttgcatggatctctatcctcctcctgtacttgcacccctgctgttatgttttattaggatgtcgtgcaatttattctcccgtttctttcactcctggttatacttttgatcacccttccctctgttttgtaatgccatccagaaaaaatgaacagatagtgaggctttgtgaggaacctacgatggatatgtggctgcagccttctttggagggtttaagctgcactgaaggaggctgaccttgtggctttatcatttcctgtctacagacaaggaaaatgggcttaagcaggagggattaatgaaggacttaattgaacaggaagtctttgtcttttagcccttcagaattacacacagcttgggtgtttttatcttgagtcctgtttaagagattggacttcttttctcaggatgtttccggaaactgagtggggatcagaaattgtcatggagttaaaatgctaaagaagaggggtaacaagccagcttcattggatgaggagaagggcttgttttgatttcctcattcttcccagtctcacccctgggagtttctgctactggcttggctcaaagccttaaaaacccatagagtacttttataatgtcacagcaaatgcaagcatgttgtctctggaaaggaactctgaggcacatgtgttaaaccagcaatgctgtacctttagcagagtgttgttggttccgtgcctgaaacacagataacatacttgacatcaagaccccttgtgaatcagagagaatgactttaccttcttggaaacgttttgacttgagatgtagtcagaagatattcttgtccgaccctttgagggttcatttaagccgtacgcaattagatgaacatgtatgtcctgcagatactcactgctcatctgttgtccactgccgctgtctacatatgtgacctctttcaatttagtgcacattcttgacatcaggtggattcacagcttgcaacagcggactggtccttggctgataaaaactgggaggactttcatgttgtactgaggcgaggtgtctgaggtcatggaatggttattaagattgtaatcgaggtagaatattgtgagttggaaggtttgggctgacccctttgcatcctgcctcccagcccctcaggtccctccctttggtttgattcagtgatgccatttggtttctgttttgtggcctgaaatatggtaccatgtgcagtgttgaatgttgggaaaaatttaaggctgcttaagggatattctgggtattgttagaaaggaagttgatttgctcaccttgccctgttgcccactttccattggcacagtttctttgggttgtatttaaatttttattccactaatgtgtcttctagaactgttactacagccagtgacatagatgctcagacactgtgtctgtaatagctccggtttttaagtgggagaatgtgccgttgtttcagcatcagagagctcaaacagtcagaaggtggaggagaattagttttcctaaagttcattagctattagcagattttttaaattatgattgtgtttccttatcttaggcatttttaacaaatgttgtcagagacaatgtgtcagttatagtgaatccttttcttacagagcagacttcactccgcatttttgttggtgatagtttaagtaatgccccatactttgaaaatcacaaatgattaaggtccaggcaactaaataaatttctgtcagagccccaaaatgtgggttttctgatacttatcaaaaaaggctagatgttgtgggttttctgatactcagaaaatgtgataatcagaaaatgtaggttttctgatactcaccaaaaaaggctagatgctgtgtgttttatctctagccatgtttcttgggatctaaaatagctggattgtatattcctagatgttttccatacaagaactttggggtgtaatgagttggaggggtgagatggtattactaatagcgttgatagacctactttctgtaaatagtggctgggttcttaactggcaccagattttagtgcaggtcctaaaaattggctaatactagtgcttgtcataatttagcattcctttttttccccttaggggtgatcccacagctggagtgtaaagactcgctattgccatctattggtgcatgctggctacttcataagatttgcagtgggtggggaaattgcctgggatcccttttctatttgttaccctttaaatgaagaaaatttctgttagtgaacttactgcatgagagggaggacatgtaagatgccagagcccactctggtccttctgggacttagaggacactctgagtgccgcctttgtgctttggtctgtcgtgtgctgaatggatggttaggacctcacctaccgcacaactccatctggtatgatatttctggtgggaagtttctgcagctatcttagaagcattccactggattttctttatttatttatttttattttattttattttatttttgagatggagttttgctcttgttgcccagcctggagtgcaatggcacggtctcggctcactgcaacctccacctcctgggttcaagtgattctcctgcctcagcctcctgagtatctgggattacaggcgcctgctaccacgcccagctaatttttatatttttagtagagaccatgttagtcaggctggtctcaaactcctgacctcaggtgatcccccacgcctggcctggatttttattttttaataagctgtatagcattgtagaatacaatttcttcttatatttctcttgcattttgaaaaaaaaaaaaggaagtaaaacaggattctcgcctcacagggtcattccctttgcctttccaaacatgcccattgccaggagagttctggcaatttgcagttgggtgttgagtaatctaaaattgagagactgctagggtttttgttgaaatgatattttaaaaactaaatagggaatcccatcgagagatagtagaaaggcaaattaacattttaactcgctcttctaggcttttaaaactgaatgtacttagataatttgttcactccttgtaactacaacagcctattagaaattattttggccagatcctggctggattctgtagctacttgcatgtgttactctgactcttactgtctttatgtagtcccttctgccttaagatctatctgctttttgcttgagactgtcctgagaccagcagtctttgacgagaagagtatttgtggctcttccctcctgggcttggagttgtatccctcataacaacggggttatgccgtgtggggatggcggcgcagacagccttccataggtggtaaactataactgtgtcatttgtgactgacagaacaaaagggctttgttgccactttaattgttgattaatgatgatccctctcaaatttgacacggttgctttctagaacacaaaagaagtcaatgtcagatgtttccttgatcatgacagtcatgattttcaggcagtcttggttctctgacatttcaggatgccatagaagatttcaagaaacataattgaataattttattaattgaataaaaaactgtactgcatattacttttcatactgtttgtgcaggatgtcaccagctacctgagatttatatgcaccaagtcatgttttatttgggaaaaagttcatatcttgtagatatttagtgctattatcttcgattttttaatttttttcctcctctttcctacccccctaatccttccctggaattaaaaaaaaaaaagattcacctttctctctgatgcctgttttccactttagtattccaagggagtgaagtgtctgcgagcaagaatggtgtcttcctgatgtggtggtgatgtttggatttgcaaggcttgccttgtccttgggctggcttcttcatggatagagctgatgaatatatttttaagtagttatgtcagcgttcctaagggtgactcacagttctgaagtaagttaacgtgttgcctaaatgagttactcctcattggaagggctaagtggaaggaaatgcagattacagattgtattgctactatttaatctttaagggagtaggggagtggatttttggaattgtgatatctttctaaaatatatatgaatgaatttttcaccttcccctccaccttctaaagtgctaggtggtagtactagcactttaaaagtcagtatattttgctgttttactggcagttagaaagttggcgctagaaatctttagcaatactgacagtttggagatttagattttacttctccaaaataatcaggacttttcatctactcttacgaaatgatagatccaaaagatttattacagaaattactacattcaggtaccacttgtttttttaagaggaggtcaaagatcacagaagcttggagctagagagagccttagcttccctttttaaaatagtccttaaaaaaaccacctaagaaaaaaagacccagcttgccctaggtgacaagttaggtgaactaaactcaggttttgtgacaccactactcttttgcttgtaccactgaccaagcaaaacatcataatgtttcatcttgaggggaattcaactaacaaaagatttctttacgcaaattccggctatggcaaatgtttattctaaatagcttcctatgtaacttaattaagacaagtgctgcaaatatttaatatcctgcggttttttgcataaacaaagtgttccatcagtttatgtgtaaagcaagaaatgaggctgtggaccactagggctccatctccagaagtaccataaagcaggcattctgcgtaggataactctgcttacagagccagctgacctcccgttttgtcattgtgtgatgccctcccattctggtaaatcaaaccctgaccgtttaaaactgtgggaactgggtggaccttgcgcttagaaggatatggtctatgctagtgcctctcattacagagtttgctatgaattggtctctgctagcctctgggttcacttgaggatgtgtttattttctctttactgttcaggatgtttacaaccattctgtgtggtttgctcgcaaccgcacttgcatttgaatttggtgggcagcttgccctgggtagagggtatcccttgcccgaccccccacaacctccagtgcgcacacacacgggcacactcttgtttctttgagtggctgccaggtttgtagtgtgtgtgtctggggggcgaatggagtgggtaattattttggggatggaaacacaggaaattttttttttttttgaataggcctttcagcaagttggcaaagcttcagggccagctcccacaccggcacaaagagcgcagccatgccggtcattttgcatttgccagacacgaactgtctgatttttttttttttttttttttgaatgaacagaccctccctcccaccctttccttgccctttgtttagaattgggatgtaatctaaataattggatttaccagcttacgtttttaatattggaaaattgagttaataaaatgatgttttggcatgtacttccctcagcaagggaacagctgtgcattcactttaagccgcctggtcccccttgctcctgcttgatccagctgatttgtgtgtcacgccatgcccttcttgggtttgcaggctatcagaaatcctggacagaaataggatttaattaacctggaaattgctgttgtgccgcagtcagggctaccctagagattgagtgcacagatagcaataagctggttaactctacactgttgatgaccccagaggaaacctggagaaacagtgccacccttgtgtgaagcttctaatggcaggatgcccaggaagcttctaaatcaatcatttggggaggaaggggcacagggagggtattacaaaagaaaaaagtatttggcataggactgttagttcatccctggggtttctttacaagcatggtctcgtgatttattggttaactttccaaataatgttagtgtgtatcttgctgtgctccttcgttctcataaaggtgctatatattttattttaacaacaaacaatgaagattgattttggtaaatttttaagcggtgatacctaacagcaagtgagaggtggctgtgggaggcttagcagaaaaagaaagtcaccttccatgtagcttagggagtggatggatggggaaaggacaatagggatctttcccccttcgagctcatgcagcttgatcaggaagtacaaatactctctgatgtatgtggtggtcttgttgcatgaggtgtgtcaggagccgcctcttgggcccagcgactgtggcctgggaacagttgtgctgtgtgaggccatgtggaatacaatgaaatgccaagggttagaaaagcgccttgtgccacagggtgactgtcagccggaggcagaccttatttggcttctgcgagatgatggtgagaatgggcaagtggcatggtaaattcttaagggagggccatgtaggctggtgcctagttggtatttttttgttttcgttttcaaatatcagcctctatattcaagacacagttttattcttaacgaaactgaattcctgtctaccttcaggtagacttctgctgggatggctactaactttacctggagcacaacaataccaaggctcctcctctcctgttgctattggatctgtttcacaaacatgcaccaatctcccttttcctctgagttgccattcagtctgcccctctgctcagataccatgtgtgtactgtattctgtgattcctaaatcatgagtgatgggttgtataattctcagcaactatagcagtatagtgttcctcccctcctcctttccagcatctatggaggccttgtcctctagacttggtaaggcctgtatatagaagtggaccagaaagaggagactgcagtagagagtcttgtgtataccaacagaagggcagagcaatggctttggggttaggtggctggttatgcatgaggtactgctttaggatggtcacctctctccgaggaggtgacttctgtgcagaggcttctgtgcgggaagtggcctctattacagagtaacaggcctggattgtttgcttctcttatctggcctagaggatgagaagccgccaggcatggcaagagaaagagtattccagatggaaggagctgtttggagtaagcaagatccccttggaccattcctgcaatccctacctttgtcttaggccatttgttgccacataaaatacactctatgggatcccatacactcccatacactcccatatactctatgggatcaaatccgtaaatggtcattcattttaacaccttttattttgagacagcttaaatggtgttcactcagcggggctgattttggttatgaatgagggaccatggagctccttggcctggcaggttttagtgagggagtgcacaccagaaggctgtgctcacaaggctttgcctaacctgccacgtggaggtggcgtggcatgacagagacagctctcacatagggacccataggttcgtctgctgctcctatttgttttgccatccaagctatgtgacccagggtgggtctcacccttctcctagttactcatgtgtacagtgaaggggatcttattaagatccttgaacataacaaagtgaccagcctttcttatttccccaaacagcagctcgtatccgtcttcttctgaacttatttgaactttgtagtcttttaattcacatacacgccccagtgatgatctgatctgaaacatctattccctcacccccactgcgccaaccctatgttgtaccatattgtaaataaaatgttatcctctgaatatatcaacatacttcttcctctgctggtttacatttacttgatttgatcttttcaccttggcttgctggagggcttgatttaattggtttcattgacataaagggtacatgtggagttcctggaatgaaggtgtcttctgtaagggatctccttgaagaattaataaaaaaatacacatgaaagtaaattacaccatgattgctacttccgtggtgcgtgtgaaggacacacaccttctctggggctgtgttacccagggcaggaaggcccatcctgactacatgcaaggcccaaggcttgggagggcacgtattttatttttctctcaaacatttatgtttttacctcttcaaccccaggaaccccgtgctctctccaccccaaccccacagtgattctgaacctcttttatcccagttcttttcatttttgctgtaataatggaatggcaggtagtattctgttgaaaatgccagtcagctgatggcagggagtgaggaaataaatggtgtggtgggcgggtatgccgcctcccctggagggctgaggccccacaggctgggtgcagcctcacctttctcctcgtgcttgccaggtgacctcctcctttaccccaggcttctgctgctcctgccattagcatctctaggtgcaaatattgtgagttttcagcacatccaaatcactttcttccattttcctatatccagcattctagaaggaaactcctgtccctgaagcctgtctgtactgtttagagggcttactcaggatttggctgtgccattcaagctctttggttgtatggggctcttaatccccacgggactctgcaggttgaaaagccacactgcagacctaccctttttagacaatacaggttcttctggcctctttataaaagatattggtttgtcttgttctttagttcctggtttcatctgggtctcacaaatgtttaatcacttgggagcttggcttcttcctctaaggggtaatttattttactgccactttttaatgtgttattgccttatttttcatagcctcactgggaaagtcattaggcaccaagcaccttttatttgagcattggtaggagcagtttatctttgaggtcctgaaattgtaaaatatctcacagtgtctcgctccgttgtctgtgcttcgtctgtgtttacttgtttgtttctcattgtcgctgcacaatcttctcatcgtgtatagggtttgttttccctgacttctaaaaaagctgtaaacccttaacatcctgttaacatgcaggcaatatttctataaaattcctgcaatactcagagtgcgatttgcgtccattcaaatgaagatgtatatattatgtaattgccaattaaaaatacttttcagtagaattaaaaaccagcaatttttctaaatatggcacaacatttcctttgttttaaaacagtctgggaggttggtgggaaggaaagcctcatgggaaaagcagggcagttgtgttgggtcagtctacctggcagctggttggaatgtggaccaagggttctgtagccttccctcctctgacactgtgtgctcgagacctggccatcaccaggtgcctgtgaattgatacagaaattgagagccagccttgagaaacctctgcagtttgatggaatgattttgtgtctgttgagtcccaataaattaggcttgtgttttgtctttttaaattgctttttgcccccttgttctatttttttatgtaattaaaaaaaaaaagacatttgtaacagatggaaaatttaaaaggggaaaaacaaccaagcagaaaactgctcctcatctgtgatagatgaagctctgtgattgtcggaatatccccgtcaccctaactgccccccacttcattgtcccatgtgaagatcctgcctctgggcttctggtctgtcatgacttatatagaggcaggcagttggttgcaaaaaagctctctttgttccccatgacgtagagatagtggcattgcctgatcccaccctcccccttattttttaaaaaataacattagggaatttctgttaaacttgattcacttcctgctgttgccttgttaatgtgactgtttcatatcagttattcctgggttctaaagtgctttttgggacaggcatcatggctcatgcatgtaatcccaacactttgggaggccaaggcaggagataggcttgaggccaggagttcaagaccagcctgggcaacatggggagaccctgtctttatcaaaaaaaaaaacccagcaacagcaacaagccaaaaacagctgggtgtggtggcacataccagtagtcccagcatttagcaaggctgaggtgggaagatctcctgagcccaggaatttgaggctgtagtgagctatgatagcgtcactgcactccagcctgggtgcagtgagacccagtttcagtaaaaaggttaaaaataaaaaaaaaaagtgctctgaatgacctacattgtttgtagattttttttaaggactatagattacccactaagtagttggagtcacactttgtccgttttggtggattgtcagtttgtatcaggaatattattagacggtggtgttttcgatggtcataggggagacaagagtagacactgcttaggacatacaagggaatttaaggttaaaatgagattggaaattcctcataacattgtagtactttatatttcgggagtgtggaggatttatgaggttaaatttaaaggtattagttttgatgaagtaggcaatcattgtgtattttcttgtaggaatttgttaaatagtataatttttttttaaatgttacagcattttgagcatcaacagtttaagataaatgcttactattttatataatccactcccaaccatgtctttaagggaatacatctgctctcttttacttacttagttttttttattcgttattatttttgagacggagtttcgctcttgttgcccaggctggagtgcagtggcgtgatcttggctcactgcaatcttcacctcccgggttccagcgattctcctgcctcagcctcctgagtagctgggattacaggcacgtgtcaccacaccaggctaatttttgtatttttagtagagacggggtttcaccaccttggccaggctggtctggaactcctgacctcagatgatccacccacatcggcctcccaaagtgctaggattacagggatgaaccactgcgcccggcacttatttagttttattagttaattgtcttgagtggcattgcattatccatcctacgtagtgtttgggattctgatgaggtctatttcaatccctgtactgtgtggctgtttcttggttctttttgttgttgttttcctgccctcaaagaatgtttttcaaatacctctctgagcaggtctaggtgaacagtttaaagtagggcccagtttctcatccttgcaagtgctcactattgcgtgagtggagacctttacgattagaggaggagggactattaggcaattgacgatacatatcaagttgattgtatgtaaagcaaaaatatgttcgtgtatttattggtggagagaaagggaaatttcttattggctactgtgttaaaaaagaacaaactgggctgggtgtggtggctcacgcctgtaatcccaacactttggaaggtcaagactggggaggctaaggcgggtggatcacctgaggtcaggagttcaagactagcctggccaacatagtgaaacctcacctctacaaaaaataccaaaattagctgggcgtggtggtgcacgcctgtaatcccagctactcaggaggctgaggtaggagaatcgcttgaacctgggaggtggaggttgcagtgagctgaggtggcaacacagcaagactccatctcaaacaaacaaacaaagaaacaaacaaaacactgttccaagatctattaggatttgttttgatagaaaggaatttctacgtaagatattcaggtgaaaggaattgaaatgtactctgtagttaacaaatggtaagttagggagttagcataggattgtaatgggaaagaagcctgaagagtagattagggctattttctgttttaatgtctaccaaatagttgcaatttgaccttgttggcagagggtaacccagaatttgggattggagggggcgtagatagactagagacatacctttttttctgtagtacaaacttgaattgttgtagtgaacttttcgtggccgaatttagaagtggcgacagggacactgatggctaaataggcaaaggtgacctggatgtaatgacacagaagagatgtgggtatggatttgtgaccccgttagatggacgtataggatgtatataaatacagcaggataatgtagtgttttcttctttactgtcagtggaaataaatgaataccattaagctgatgatgtcagataccgtgtgtagtttttaaatactcaggcaaacatagtgtgtacataggcatgtatttctacacacatgtatacacatgtccatgacacacattttatatccatgtacaaaacatagtcctttaaccaaatttattgcgcttgaaagtaggcctgtggtttatgagagtgtgagagatatagaaccttaattaggaagagtttgcttgaaataggatcttttttccccttatgtgtcatgattttattgccgcacgtaggcctatatcctccagtctctgcttaatttatttttaattttcttttgcttttgcaggcccaggctgcaagcacaaaggaagtttgctcagtctcagccgaatagtcccagcacaactccagtaaagatagtggagccattgctaccccctccagctactcagatatcagacctctctaaaaggaagcctaagacagaagattttcttacctttctctgccttcgaggtaagactttgcaaccatcggcggaggtctacgtggaatctacatgtaagcctgaggtctacgtggagtaaccttagctttactctctgccatgttcatttttctgtccccaacctgggttgagggggaattgaaagtgagaaatcccaccgagagagtgtgtgctgggtgtggcttttgaaccatcagttaagttttatttcctttttaatatgactcttaacaccctacttcctggcttctcaatgcacaattatgcagtttctaactttgacttctaatttgatttctctgcaccataccaccaccttgacacacacacattgctgacttgttttgtaaggcagtttttttttgatgcaggactttggggctgtgaaggcccctttctttgtgcttcctaaggcctgtcaataagccatggtgatgagggacttacggttctctcagccctatattacgttaaggaaaacagtactggtactttcagagtctaattgacagtgcaaatactggtccatgtttcaactcggaccagttaacggaggccaggtggatttgggatctgctgaatagagttatttgtgaaagtgtttgttgcagtttccttattactaagttttctaatagctgtgaggaaagaacacagaagattgagagaataaggagtcatttctggaggaatgatagaaaatttaggaagtcctgaatgcagagagttccttgggtgaggttatttgagagaaaatgagcagaaggagagggcctttgctattggacatctgtgggaaaaccttgaggttcatagtcacttttatttgataaatattttgataatttattattacagacagattttaagttaaccttaaaaagtttccacccatcatccctcactcaatacattagtgtgtctttccttcaaataagtacattttcctataactgtcaaagttaagaagttcacagtgatacgtggcccccatgcagtcctcaaacctctgtttcacatttgttctgaaggtgctttgtaatgtccaagtttagagcaaaaggacccagttcagaattaggcgatgccattaattgtctgtagtctgcttaatctggaagagttcctcattgtttgtctttgacctcaacacttgaaaattacaggtcaattattttttagaatgtcccttaatttgggtgcctggtgtttcctcatgattacattctggtttgtgttcttggcaggaatgccacaagggaagtgattcctcctccttgttgttgggtcctctgtggggatacacagttcagtccttccctttccacactcgtgttcatgctgatcattcgactgtggtgggcctgttaggagtaaagttgcccgtctcagcctttgcagtgtataagtgttaagagaggatattctttgaaactagtacatacttctcatcatctttatcataattgtatgcgtatgggcttcctattttattcaaagggttataatctgttactcctattatgtattctgatgttcagattgtcccagatcaccgcctcatccgtggatcctcatcaggctggctttttattccatttgacatgtccctgtcatccttccagccttgcttctggcacaacaaaatgttccaggctcatggtgtactttcccgccctcagtcctggaattggccatgtcttcaaggagcactgctttcttatagggataagtgctgttgaggagccaagatctgggcactagggatgctgggaactatgggaatgtcatttctcccaggtgctcttagtagactgaggttgcatgtttataagggtctatccgaagttctgtgtatattaaaatccgtgagttagcagccatacctccaatttcaatttaacactaagggaggttcatgtgcattcatccctgaggaacttggctcctgtaatccttaatatacttacttgctctgtcttttcagtgtaatccacctcccatctctgcttctctgctgcccccacgatgggaaactcagccctgacaccccatatggttgctcctcaccccctctccttgcccaattgccctgccttactaattggctttgggactgaattgttgggggggaaattttgacattataggatagttcttggtgattcttaacacataagaaaggagagttattaatgtatttgttagaaattttgtagcccttgtcggttgttgagccttgaaaacagggagatacgaggtaggtggggttcccaccagtttatctccattagcttttttgtttgtttttggagacagggtcttgtctcatatcaaaataagaagttgtccacttctggagtgcagtggcacagtcatggctctaagcagcctcgacctcctgggctcaagccatccttctgcctcaacctctccaatagctagacctacaggcgcaggcaaccacacccagcaattttttttttttttttttggtagagaaggagtcttgctgtgttccccaggctggtcttgaagtcctgggctcatgcaattctcatgccatcttggcctcccaaagtgctgggatgacaggcatgagccaacatgccttagtttttacatagattttggctgaaagattctcctgatcttgcatgttgagtatgaagatggaaaggaagctgtgagaactaaatatgacagaatcttgtgctggattggctgtatatagagagaagaacatggccactagactgtgaggctggtagagtgtggtgtgatgatcaggaatggagaacgagtgggatgtgtactcagaaggatgtatttgccctaaaggaatctttgaaggatcagcagcaatgtgattcaggtatatctagccgcgcttggttgtgccgtctatagtccatctctgtggaggctgacacggtggaatccttgacacctggagtttgaggctgcagtgagacatgattgtgcctcagcactgccgccttggcaattaagtggcactttgtctcaaaaaaaaaaaaaaaacaatggtgatatgggactcttaatttgtgactttggtcttgcgtggcttaaaatttttttttttaaatgacaaataataattgtacatatttatgggtcacatgatgattttgtgatacatgtaagtgatcagatgagggtaatcagcatatctcatctcaaacatttataatttcttagtgttgggaacattcaacatcctccttctgggtgttgctaactgtaggcatcctacagtgggatataacactagaacttattcctcctatctaaccataatttggtatccttttctaaatatgcatggcttttaaacgtaattggagccaggtgtgttttttgagacagagtctcactctgtcgcccaggctggagtgcaacagcgcgatcttggctcactgcaacctctgcatcctgagttcaagtgattctcctgcctcagcctcccgagtagctgggattacaggcgcccaccactacgcctggctaatttttgtatttttagtagagacggggtttcaccatgttaggctgatctcgaactcctgacctcaggtgatctgcctgcctcggcctcccaaagtgctgggattacaggcatgagtcaccatgcccggcgaagccaggttctttaaagagtaactatgacttaactagtttggctacttttgggaaaggaattttgatgtctaaaattgctgtcggcattttgcttagtaaataatgaaataatagtttctgcctccaccagtccaccaatcccgtttcattaggatgtctgaagattgctctgttgattatggaatttagttatgcaggtctttactatggcgcaattgtgactgttgtgtttagttctcaaaggtagagaaggagagaaacccatcagggaatgtctcagtgattctgtgtagagaggaatatgtgtgtttgtgctacatgtacttgtgcgtgcactatcttataacattatattttctgaggttctgggaaacctggagagtcttttagttgcggaggcatgcttatttattgttcaaataaatgccatctagagaaaacattaccaagtaagtacctggctttgaagtttcaggattccagacagaagagaatcatcttttcatagataaaatttacttcttttagatgtcaaatacaaaaaaggcttaaataattaaagcctaggagatgtttaaaacaaatttaaaaaaatgctctgaacctttggaaatgaatttcatatatgagctaggcaataaaaataggctttgttatttgtttttctgttcgtatacaatattgtactgttttgctatttcttttatactttttttagatctgaggtattaaaaatgagtcatcctagctttaaaataccatttttttttcccgggaggataagtgtgtttacctgatctgactctacaaaccccaaatgacagatgatgcttattatagcttcatgaccctgaaaatctgatggatttggtggccttagatagcatcttttctatctaggatatctagatagcatcaagataggtagtttcttgagctaattaaaacctgtatttcagtgtgtacaaaggttacatagtgatccctgttgttgtggtactttaataattttatttccattttaatttaagaaaaacaggatgttaagctttttttttttttttttttttttacaatcataaaagtagttcctgttcatcttgggaatattgacagaagaaaggtaaagaagtaggcaaaagaatgcattcaaaatagcatctccaccatctcccagagacgaccgctgttaattaccttgtttgtgactattttactgagcattctgtgtgcatgtataatacatatttttcctgaaatgatattgcattatactttcgtttttgcagtctgattttcctacttaacactgtcacaaaaatgcctgtcatttcattttaatagcttatgttccatttggtgaatgtctcataatttatctaattcctgatgcacatttagagagatttccacctttttgatatccactgctaatgacgcatatccttagttaaatcttcaccttgttgaagccctttcaggcaaagttgacagttgggaatgcgattaaccttcttacacctgcatcctaattctgttcttttttcgtgctgattccaaagcaaacatagcttgtcacatccccaagcctctagtgttcaccataaagagctcagtcagcccatcacccttgggtgacagcgagcactgtgaggggtaaagaaggcagtctttaatatgctcattatttatagggaagaaagtctggctgcagaaataatgaaggaagcaaatcaaacacctggaagtgatgtttgttgctaaggatccaggtcttttttttttttttttttcccttctccagtcctcaattattacctttaatattctcggcacttctttgggatttggaagagaataaatcgtgaggccaagggaaagacagcgagtggagttctttaaaccttgtttgttatctgttaatgacagtgagaaatctttgagatggggaggaaaaaccctatactattaatactgggattagtatagatatgtaaacacccagctagtcattctgaggttaaaagctttagaaatctaaaacaaatttgttttaagacactaccagctaagtctgcaaggctctttcatttcctatttaatattgtgacctaaaatttctacaggaaaggaggatgggatgaatagtgcagccggcccgaggtatttgcccgcagtgtatttatctttaaatagctgctttgaaggggtccacatgtctcttgccagaggcataattagtatctttcactggcacacgcggggaagagggttttgcgcttgctgcatgcagtgattcgtaccatcgccgtattccctgtcaccactctggttattcttaatgagttctgtcgtctcctctttgttctgactatgattattaacagattaaaaagagcttaatgtagcagagcactggcaggttaaatgattctcttatttacattttcctctttacggggcactgcaaacaaggggattcccaaaggggactcctgaagcatgcaaacctacatacacagttcattcctatgaccgtgggcatcacagttcagcgtcacggctcggcacagtgaagagagtgttattatggggagttcctcgtaaatatccttactgtcagccgttgtgaagcaatgctgtcttgttttggaactgcctgccttttgtttcttctgtcttacagaatctttagtgatcagctgtcattcagttgctaattaattcagcaaacctttattaaactctttttgtatgctagacacctagaaaacagattagacacaggaaagcagtattggtggtgggtgaaattgaggatataacaataaatgcgtgaaaatgctgggatagaagtgtgtacccattaaagcaggaagggagaggccctgggatggctgcaaaggaatgctgacatttgctgcgggtctccgcgttacagtgcattaggaatctttgcagaaagaggatagtgctgggaaggggttctgcagaagcaactgccaaggcatggattgatgttggaggtcctggagttaaagcaagaaagttaggataagcctcagattctgcatgccctgggctagttactggagtatcccttggcgttcttcaagtcaggggtgacatcataatacacctatgaggttaggaagatgttactggcagctctgcagaaaatcgattgaggctgcagggagttctttctaggggcattggcagaaggctggcatgtcttgggcagatgatttaaatatttctcagcctgagcttcctcatctgcgaaatggatattctagagtctatagcacatagttgttgcagagctaatgggtatgaaatagcccagaattgatacctgaggcgatcatccacatataggcatcctttgataactcagaggactgatttatggacctccttttgataccaaaattcatggatactcaagtccattatgtaacatggcacatggtatttgcatgtatgcacatcctcctgtatactttaaatcatctcttgattacttataatacctaatacaatgtaaatgctgtgtaaatttgttagataatattgtttagagaataattacaaggaaaaaaagagtctgtatgtgttcagtagagatggcaaccgtccctttttttacctgaatgtttttgatcgacagttggttgattccatgggtgcagaagtgtctgatacagaggtccaactgtacatttatttaccattttttccagtgaattgaggcagaggtagtggagaggaagattattagattttggatttaggtggaactgtctaaaagaccagctgaatcggccacaggtaatagaagagacagccaacctgtggtgttttttctaaagagcgttgctggcctcattggcaaggaacacatattttgatgtggtcctagccttgagtattgaggactaggatttctaagtagggcaaatgcaaaagcctggggtgatttagaggtcacagaatgaaaggggattaacctgccagaaagcaattaagtaatcccccaattgcaaggaacactatggtgctaataatgagcttccttgagcaaaatgggaatactttacattatgtaaactctttggggaggaaatcacactgtctccagtggtacacaactttttttgagggtctccgggagttgttgcatcttagtttttgagagcagcagtagtgaaagtgtatgtttgagaacggtgtcatcactgcctaggggctttcagtggccttaacgttctgcatatgcttggttttctcctagagtcagttacctgtttcatttgttgggatagtttatcagttaataatgaagaaatctgaaaccctgaaatttttgaggtctgaggaggggaaggatggatcacttttattggccctgtgacgttgatcagatgttattaataagactgtaggtcattttgctgtgaggattctccctgctacaggccagctggcctctgaccatgttgtgccctccctgaagataaggcaggcttcctttttgctgccagtgagtactggcacagattcagtagtacttctcagagtcatctctggccttctccttactttctagagagtccttgagtctttctgaaatccacttagagaacatggaaataagactttaagtatggcagtgctgttttgttggccaagcaccttgctgactgaaggggtttcatttatagcactaaagtccctggtgtctgtgtcccgcagggaagttgagtattcagcttctctattgggaactgaggaaggcctcacatgattcgcacaaagactgttgtctgtagtggctgttagaatgctcattttgttgttgttgttgttgttgttgttttgttttttgagacgaagtctcccaccctgtgtcacccaggctggagtgcagtggcgtgatctcggctcactgcaacctccgcctcccatgttcaaggtattctcctgtctcagcatcctgagtagttgggaatacagacgtgccccaccacacccagctaatttttgtatttttagtagagacggggtttcaccatgttgaccagactggtcttgaactcctgacctcagggtatctgcccaccttggcctcccaaagtgctgggattacaggcgtgagccactgcacccagccagaatgttcactttcttactggtttcttcttctccacttgagataataccgtgatggcttgagcaccatcatggctgctgctatgtggtatgatttctatattcagtgagatgaagcgaaccatagatagaccttgtggcatttgactgggtgtgtatttgaatgtgttttaaattgccagtgcagacaacaatgtaggaagggttgtaaggggaacgttacagttttcaatgacaaagatgctagattagcgtgggaataggagattgggagggaaggtggtatgataaccattgtattctccttgtgaagtcccacatgttaattgcacttgcagatagaatactaccctaatgtcgggaatttcctatttgtgggattagataggcacacctgggtgcttgtttgcactagttcttgagagctgtaatccaggaggaggagggagggttgctgaaggaaagactggccatgcatctaggaggtcattgcgtcatccctccttgttccttaacaaagaccaaaggttcagcttattctaaccattgagttcattttgcattttcatcccctgtctcccagattctggtcaccaaccaatctagttactttcctatttgggaaagaagatatgctgtcacctatggaaagaatgacagtatgattttatacctatgagcataataatatcaccttactgtgagtcactcagcttgcttttgcctatgtttggagccataaaaatgtttcgactgaagacattatgctctgtatacagttgagtaacctcgagtctcatggcaagtaagcatctcccagagccatggcctcatcctggagtcttggatcccatgtagagtcccttcagtgatggtatctttttttttttttggaaatacctatttaaaaagaagtacattcccaagatgagcatgattggataggcacctccgtattcagtaaggaatagggattccctttgtgttttgctcatgctattgagggctgcttccctatctctgctacacaaatccctcttcataccagaaaggacattaagtgaacgttttacattcattttaattttaaccattacctttcctttagggcaattgatagtaattttgtcttgatacaatggagataaattatttaagacatgaatgcaagtcaccttacagataataatagcacatggagcatctggatctggcaaatacttttaggatggtaggcaaatgaatgcgaattgggaaattctgttttaatttcttccctaataagttgtaaagtcagaccaggaatgggcagagattggcactggacatgttatatttgtcccaaagtcttttagggaagtttgtgtttacatgttgtgcatgcatgaacatgtgagatgaatgtagacagctgccctgtttgagtctctggtgctttgaacagtgctgatacatacatacgtagattgatgcactagggtatttgggtgcaactgctttcttctgtgacttctttcatcttctatccgttgcccaagtccctgccagctcactttgaagttttgtttcttaatttgatagtcggggttgattacttttcattctgtttatgtatcccgaagatgaaacacaaactcagtgggccagccccatggtaattgggtcaagcaatagaatttgactctgcagctaaatgacagtgcacagggaatccctctagggtctttccaaaatacagccaagcgatgtttcgctgcttaagatcaagaactgatcgagggagggaagataatgggcaggagggcttgtctgtgtacatgattcatagagaagaatccaattttatagaaaccacagcctaaattagagaaagcaagcttttggattaaaatgatctctgttgttgttgtaacataccacagtttgatttttgtccagatgaaaacatttggtttgcacttcagtaaatattgtggagacattgccagctaattctgaaaagtaatgaaatacggctttggcaaagagcagatgcattccgtactctgattgctcttatctgatccaagttcagattttttttacatttgctaatgcacttgaataatcgggagagaaaatctgcctgtaattttaataggaaactgtctatattgactatacttttataatgaccacccataaagtcttcccctgctccccctgaaaaaaatcccacacaattcccaaacctctaaaacatacagcttttgttggttacttttctaaaatgagagtttgtaaaggagtgatatgatgtggtgttccatgtgaggagtcagcctctctcacttgctaaataatgtgaacagagcttgtgtttttgccatgcagagtccacccctgagaacgcaaggtcatgtggggttgtggagccctttccttttttttttttttttttttcgaggtggagttgccctcttgttgcccaagctggagggcaatggcacagtttcagctcattgcaacctctgcctgctgggttcaagtgattctcctgcttcagcctccctagtagctgggattacaggcatctgtcaccatgcccagctaatttttatattttttagtagagatggagtttcgccacgtgggcctggctagtctcgaactcctgacctcaggtgatccttctgccttgacctcccaaagtgctgggattacaggtgtgagccaccctgcccagcctgttctgttttcaaatacgtctgctagatacgaagtttctaccgactcagcacaatataattacgtaatgcatccattcacccatttcatactgagaaatatgcaatagttttctccagtgataaacaccctgggctgctatctgacttgaggggtttgaaatatcctttctttcatcctgtttgtattgagcagattcttcctcctctgcatttatttctaaatgagataatcaagctggtatgtaggtaaagaggaaataaatgctctttatataaatgtcttaattaattttagtttcttagatgctttgtgtcttatgcatttgaggttgttatttagctattttctagatattagtccttttctatcgctgtgaccatttttactttggcatgaaataagagatgatcttactgcatttgtctcgaggagaaaaaaagaacctactttggcttcatttttaccaattctgtggcttctctgggtctggaatgccagtttgacccctctgtgattttacaagtggacattccagcagaattcttagagggatttacagcaatcacgtggtgacagagcaatggcatgtgcagcgttagactctgttggctttattcttttgtacctacttctgtttgtctatgacgttgatgagatggacaggtatgagggtgcccgaccaaattctggaggtctgttccttctaggggagatgccagttgttcatgagtgctccccctggtggatgggtgatggattggccgtggcccttggaggatgatgccaaggaggacagtcaggccatatccaggcttggggagacagtgttgtccttgtggggtaccccccagtgagaagaaggggtacaagcttaacctctgaactaagggtactctggtggtggttaactgacctcctcccctggagttcatttttattctgcttcaatccctttcctacactttcccttttcccagtcttccttccattcaacatattacctcctgattccccatctgatttacgaatccttcattacccatttttctttgttgattctttacctttagatccagaccaacatgccaattacctgaatagaagcagaatcatcttctaggttgaaaacaatccttttttcctgtgtccccatgtgtagaagaaattgtgttctttctcacctctgacttcagggccagttccatcagagggacttactactattataaggttttactttgagagcaagttcctcagaattgcccttattcctcactggtcttctatttctaatctttcttccattttagcccctcactttctttcccagcactcagcaggtcacatcacatattcgtatttgccgaggagccattaaaacaaatccattcataatgttggttgttttctgcttttgttaaaaaattatcgtctatgggccgggcatggtggctcactcctgtaatcccagtgctatgggagatcaggtgggaagatcacttgaggtcaggagtttgagacaagcctcggcaatgtagcgagatcctgttcctacaaaaaatgaaaaaattatctgggtttggtggtgtgcacctgtagtcccagctacaggaggctgaggtgggaggatcacttgtggccaggaggtcgaggctgtagtgagtcatgatcacaccactgcattccagcctgggcgacagagtgatttcttgtctcaaacaatatcttatcctttgtagatatcaacaaagtctggatgctgaactgagcgtctagatattttctccattttagttctttgcaacataaactcaatcctcaccctaacataaactcaatcctcaccctttctctcaacatcttgagtgcaaggaatgtgatatttgcttcatgctgcttctctaatgtttgagtttttaaaaaaatcctcaacagatcctgttaagtggaagttaattccttatttctaatgtgcttcacatggatttttacctgattctctttgaatcttagaatatttttattggatcttactgctgtattttttttgttgctgtttgtttgtttgtttgtttgtttttttttttgagacggagtcttgttctgtcgcccagcctggagtgcagtggcatgatctcggctcactgcaaccttcgcctcccgggttcaagtgattctcctgtctcagcctcccgagtagctgggattacagacatgcatcaccatgcccagctagtttttgtatttttagtagagacggggtttcaccatattggccaggctggtctcgaactcctgacctcaggtgcaccacccgccttggcttcccaaagtgctgggattacaggcgtgagccaccacgcccagccttattgctgtatttttatattgctctcacatggcctcatttgtggagtttatttcctttgcaacagaggggagagaggaaggctggaggggtgatggccctcctcttgaaatacatgcctgtaacagctttccctcctgcttctcctgtttccttctgaaaaatggttgaattggctgcagaagtttctattagaaagatctacacaagaacctgctgtttttataccaatccatcgtttggatttcagctgctagtcattgcctccaagatacagtataggaaggttgttctttaaaagaaattaagcatggatatttttatctgggaggaactatttaacctatcccatctccttttagaagagggaaatttaatggcagagtctaaaacttacaagttctctcctaatggtatgactgacagcatgtgttagatcgatagtaaaataatttgaatattttttgagtgctgtagttactcttgttttttcataaatacttataaaggtagatttagggaagagggatcaacaacattgttgtatttgattagataacctgtctgtacccatgaatggtgatactgtactgaaaactatgctaattagcctcctgttttccttgtcagtcttgtaccaattgtaaaaccatttagattgagtatatattttggtccagtggaaatgtggatagatatttttttctctttctcttttaactcctgactgtttattttactccctcttctatttgattttccccaaagtctgtgtcaggtttaagaaccttctttctgtccagaatctacttctaaatggagacaatcaaggggaggggaacaaaacatcaaaatggcttttgtaagaccaagttgaaatcttctgtctacagagggtctttttgccgactgtatccctttgcagttgcatatccactcagtaatgtggttcacataatttggggggtttttgaacattgataggtcatgaagatgcctgtaggaaaaggaaggggttgaaggtcccacatagtctttgcattttggggagatgggtgcttggtttgccatctcagctcctgatactgctcattttccatttccttgtcactgagcatatatagttccgaagctggacagaaatggttttaactgtgtgtttaaaccttgagatctttgagatctctatttaggtaggagagtgaattggtgatctatctcttcggtgatgttactggagtgtttttagctcattcataggcaggcaagagaagacatgaattttgtatttactagttcttttactattagactgaaggggattttgtttgtgttttagaagcctctggttccaaacaacgtacaaatgacttgattgtatttcctgaattgcctttgtttgataaagaggaactatattgtgcttttttttttttttttaagaatattgagcctaagggtgggcatgggggctcatgcctgcagtcccagcactttgggaggccaaggcaggaggattgcttgagtccagaaatttcagaccaacctgggcaacatagcaagactccatctccccacaaaaaattagctgggtgtggtggtgcgcacctgtagctccagctacaggattgcttggcccagtaaagggtgcagtgagctgtgatcgcgccactgcactcagcttgggcaacagagtgagaccctttctagaaaaataatgatattgagcttatttttttgttactttaaaatccggaatgagaacctttgaggatgagaggttaagatgtaaaagggtaaaggtgaggagatcggttcccccgttgggaggtttatttctttattttttatttcaaattcagcacttttacttagtgcagcgtgggaatttatttgggtgatttttgcatccagttaacctaatcaggacatcaaagtaacttccaaaactattggaatttggggaattcatatccaccataaggaatgaatattccttatgaatacaacacagtgattttatataatgaaatgttatattctgtttttacttctgtcttctctgtcttttttttttttttttttaagtctattaatttagagtaatctctcttcctcagcagtgggtaggtgtttttattttattatttttttgttccatccttggaggtgtttgttttttttctcaagagatattcagatgagattttaaaaatccttatttgttctattttgcatcttcttcctgctgggggattttgcttgaaatacgttcaaaaggcacagatgatcttgggagtatttgaaaaataaatttaaaatggcagtagagatcagttgctttgttttttctcctcggttttgtttcattgtggtgttccttctggaaagggtgagggtcaaggcctgtgtttatgagctgtttttcttattccaccaggttctcctgcgctgcccaacagcatggtgtattttggaagctctcaggatgaggaggaagtcgaggaggaagatgatgagacagaagacgtcaaaacagccaccaacaatgcttcatcttcatgccagtcgacccccaggaaaggaaaaacccacaaacatgttcacaacgggcatggtaggtccaccgttgaacttggataagaaaaaatctaaagctttgggtgagagctggaagagagcctctgctgagaagagatgagatgaaggcaaagctcgttctgggtacttctccagggccagacacttcatgggcaaagggattattagtgtagcttagtgtagtccagggtgttctaggtgagtgcagatactctgatgatgtggagatgatggtaaattctataagagctgtagataaacaggcatcagaacaggaaaagaccagatctacatggggatggtcaagaagatttggtgaaacaacatctgtgcccccctttaattactaatgtgattttagcaggtggatatggtataggaagaaaattatcattcctcctatggaattgcacatacattctgaagtggactgattttccccttgcgtgtatagtgtggaggaggaggataaaaggcaggaacaatagcttgagtatcacagcaaagaaactcatcttatgtggataagttggctatagaaagtgcctagtggtcttttctctctgtctctctgtctctctgtctctgtctctctgtctctgtctctctctctgtctctctctctctctctcctgtctctctctctctctctctctcctccccttctccccctctccccctctccccctttccccctctccccctctccgcttctccgcttttcctttctttcctttctttcttttgtgacggagtctcgctctgtcgcccaggctggagtgcagtggcgcgatctcggctcactgccagctctacctcccgggttcacgccattatcctgcctcatcctcctgagtagctgggactacaggcccccacgtattacagacatgagccaccacgcccagccgcctagtggtttttcaatagagaagtgacttaaatggagttgtgccctgaaaacatgaagccggcatcgatgatgaggacttcttaaagggaaataacttgaaggggaaatgcacagcgaggttgtaattgtaggcaattccctgaccgaaggttgtccagtagacattggaagatgtagaataggtataaaaaggagtgatttcagaggcagcacagaggtagtcctgaaccaattggaattgcactgagtgggggaatgagagtaagaaaagaggaaagaggctgggcgaggtggctcacacctgtaatcccaggactttgggaggctgaggtgggcagatcacgaggtcaagagatcaagaccatcctggccaacatggtgaaaccccgtctctactaaaaatacataaattagccgggcatggtggtgtgctgctgtagtcccagctactcgagaggctgaggcaggagaatggcgtgaacccgggaggcggaggttgcagtgagcagagatcgtgccactgcactccagcttgggcgacagagcgagactctgtctcaaaaaaaaaaaaaaaagtaggaaagaaagaggagggaagcaaagagaatgggagtcaggagatatggctgttttctgttgtcctcctatcagctactccactagacatactttacttaggacccactgagaccctgtaagataaagaagccttgtctacaaatggcggaaaatcagtgctgtctgtaagtgattgaggcaaaggagagctgctcatttttctccttggtgcctatgcactgagctaccatttgcctttctggattcaccgggaaatagaggctcaggacaagcatagcttagacatgattgaaatctctgtctagctttcattgttgttgggcatttctgctctgtccacttaataattgttcatctggcttgcctcttgcttttgattgtgtttaggtgacacatctgcatagtagagggtgcaatctctttttagggacttgtggtttaattggggagatggggtaaatacaaaatgtaactacattttaacctttcgggaaaaggttgttacctgcagctgtggtcatcggcatctgggtggttggaagagagctgcatatgtgaattggaatgcaggtattagtgtacggatgtaatttctaaggaggaagaacatcgcaaacagagcgatgcggaataatgcctgtttttgggactgttgcctgttgttccaccagtgtggaggtctactgtttggtgacctggaaagacctgggcacgagaaagaattctaataacagaataggaacctgttgatgattttagatgtgggagtaagaggaaatgcgtcaagttctgaacgattcctttggtagcagactagtctgaaataaaggaaaaaattattgtattcagagagttccatccaggcaacagctgatgtgaacctgaacttgagaagctacagtggcatagcttttcccaggggcctgcagaggcgggggtgacggtaattgaataggaattaggaatgggttgatttgtggaaaggtaataactttataatcttttgagtttgtgttgatggtgagagacaaccgaattattgagaatacaccaggaatttatcattttggagctgctgcttgaagcctcctgaataagtaaagtttttgaaatataatatggatagaaaggaaacctctggagaactttttcttgtgaaggaatttaattttctaggtttctttttggtttaatagagattgaagagtgaagaaatatgaacaaaacatggaattaccctcatctgttgtcttctgcatggctgtatgatagaaatctgtttcatcagtgtagtatcggattgggtccttttcataagttgtttttcacccttttatgctgattgggcaggtgaatttatctgacgtcttgatcagttgagttaatcccatgtatactagtgcagttgtactggggttgctaactcctttgttttccagagtgtttgagcttgatttagagacattggattcacatgctgatttttctcatggattcagtttttaatgttaagaatcatcatctgcatggatcttaggtatgtgcaggggcagtgactatctggcagcatgttacatggagcatatgaaagaaggggatggaatgagggtgaagggataggctgagctctcacctaaaggagggcataatgattctacattgaccactgtcattgccactaggagtcaaggaaagtgtaactatctatagatacatatctctgtgcatttacacagatgaacttctgagtttcaaaaatcttaggagattctactttttcattttttattgtttaaaatttaaaattttatttaaaaatttttttaattttaaaattaaaaatttaatgcctgttaattcagatatttccaggaacagtgttgggatttttttgtcccctcatgaattttgatgtctctcggtgaggggctggtaggatagtgtgaatcctggctccaggctgggaagactaggtggaatgagtggtcttgggtaagcaccgacacacccacctcctactgctgtttctgagttgtgcccttgccctccttgctgtccctcttccgccctgtctcttctgtcatcctttcttttacaatagagtcacagcatcagatagaggagctgcaggaagcatacccaaaccagctgagcttagtaaggggactaacttcactgaaatgtacaaacctttctgtgcttccttttctgagacttgtagataaccaaactgaaaggcccttctcacatccctgagcagctggcttataattttaattagattgatgtcatctgtgattaggcctgcccccaacctccaagtgtctaccattttgattatgtcgtatttgaattgtgaatgggttttctttgatttcaacccagcagagtcccagaactaccatcttgggagaagccatggggctgtgcagtctgtttgcctgcacctgaacttcaggggaagtttggtggggggattgttgcaggcccaagagacctgtatttagatctgtccagactgcagtccttcttgctgtcccattctgttgtccagagtcaccagccatttccctgttctgtctgtgttaggcctgcccgttcctgagcaggcactcacttcctgggcatgtccctctgcaatttaattcattgctcttcagcagcgtcatagggaagtttgaatcttatttagtctgaggttttctttctattgctatgcctgggcattttttagatcttaacctggtcagaaaaattccatttcctgtgcaagtcaaagagacaagcacgaaaccaactccactagaatttttcctacagaatttgtgagtttttagcaaatgtgaatacccgtaagtgttaggaaagatttcatatttacatgttcccgaaattgctgtatttgtggaggatttggagagagctcaaactcattttattgtgataagtgctgaaacataatcatagaatctttgccatgttaacagtggtgaatgatattaaccatttatggagttaccttttctctcctaaatcaaataagattaacttctgtataaatgagaaaaatgtaagcccctgtgctgacgtaagcgctctgaaagatagcacagatgaacacggcaataggatctacccacaaggagctaatgggagatgatgtctcctggcacatctgtcagaaacgtcagaagacattcaggtctttacgtgtgtttctcctgatgaaacaggtttcagtgtctcattcatctttgtcattccctgtcacttggtgatgctacctgggtgacttgtctcccttgtcttctgatgtgcgtgccccccccccccccccgctttgtgtcctgccacccacctcacacccatataccaaggtccttaagaggggggtggtgtgatcgttggggctccattaagacattttgtagtttttgtgtatatttatgggttttatgtatttgttgtccctttgtaggcatccgagtaccaagtcttttgtgaagtcatatgaaaagaaaaaatccccacaagccactacctgggatataggtctctgcagagtccttcctgctgttgccacatggcttgaatggccttggaagccaaagagtaacaatccacaggatgtcagtgcttccttatgacgccagtggagggaatggaataaagccagcttagtaatatacaggccacttggaatgctcctccgatttcaaatgacccgggggaacatggtggtttcgtgaaaccaaagtcagctttgaagaaagctaatgtcagcctcaggttcaggcagtactgtagaagaacactgagctctcagtagctggctagctgtgctgccttccccagtctatttcacatccgcttttatatcaaggcagatgacaaggaaacaaactgacgtcagtttattaaaggaaacacttgtgatattgggagtaatccctcaggcaagaggtgctaattgaacctaagagtatttctgaagttactattttcaacagtagagaaggaaattattgatcatctcatccaaaattgataaaaacctaagtgtagcagtctttcaaaattaaatattctcagctgtggaatattctcatgcccaacattgctacttcctcaaccatttctagatgattaaaattacactgtaatgccatgttgctcaatatgcatatttgttgtcatttttgtctgttcatttcttaggaatgtctttgccaccatcgaacagtcatcaggaacttagttgcatgccttttttttttttttagctactcgttagcttgtgtgttcttgggcaaggtatttacttagcttctctgattcttaatttctacttctgtgaaatcagcatgatagagtagattagcattaatttgtccagtcattgattcatttatatcccagcataaggaaacaatgaggctgtatcatgggtagcagtagagccattcagatctctaatggtggatgccagccattgttatatgttcaaggaaaatgacatttccaagatcactattcagctgggtgaaggttcccaactaaaattttgtccctgtaatccattcttctttccctgagataatagtgacttgtccagattaaaacatttatatcccaccgtgtcttcaaccccatttacattgctatctatactttgttttcttcattcttttataacccttaggaaaactggtgtactgttgcatcctccaagcaaaggctgagttgctgaaagtcagtaataatcccggttgacaccagtcgtttacacaagaatcctccaagtggtcagactgctgggatcacctagagctttgttttcatgtgtaataaatacagatcaaatgttggcaacagttcccatggcagctaaaagttctttcctgcaaaatttcactgaggtccatttctctgtaagtttagagcggaattcctagaaatttcttataatgggatttcattatgagtatccatcagtcatcaaagggagtatttatttaaatgtgacataatataaaatgaaacagatcttcctatagagggttccttgcaataaaaaggcaatcaggcaccagtgccttgcaaatctaatgaagcttggagctctgcaggtgcaggtgctgtcagaaaagaggttagcaattttctgaacctgaagaaggcctcttctgaactgcagacagaggaaagagtcctggagagcaccacatctcaggccacatcaggtgctgtggaactgccagggaggcccaggtccttgcttcgccgtgcaactagcattttctcttgcataatcgcctaccacctgttcttcaacataaacccactagccccacattgtgccatgagacaaggcacctgagccaggccgtgctgcacctgcgacctcaggaagctgtgatgctctgcccttacccctgttccctgattttggagtgccttggtgaatagaagcaaaacacgagctgtgcttttagatgaaaataagttctatggctgcatggaaagaacggtttggatatagttagttaagaaggtgagagctcagtcttccctcctcacacctcagttttactccctcattttttgaaaacattcaaatgtagaggcagatgatcttcgtgtccttttggtttctgacttgggtgaagaaggcacaggtcttaaaataggttttcttgcagggagaacctgggtgagggcatcacgattgtgtattcaagcaactgctcagaattgttaatctttcacaagcgaaaggggagagcaagctggttgttttgtgacttttccattacagggtatttctcttatcagatttgtgcttttccctattttgtatgctcgagctgttgaggcgtgtcaggaaatctagcaacatctgtatcctccccagagggatcacccctgctgaaatgtggggagataaacacacagaaaacaaaagtatggaaaactgatgctttaccactggggtgggtttggccaatattttaattaggccacatttcaaggagaacagctttatttcagcagctagctgaagaacctagaacccagactgccaggggtgtcctgtttcatcttgtttctccacaaaagagcagagtggctctggtcatggagccgggacctctggcctcatggcagaggtggcagtagaggacacacacgccatccacagtgtcctgccatcagcttccacatgggcctgagactgtacccttcttcctccgagcaggagtcctgatgccagtagtttcctgcaagagcctgctgtccccaggcagatgttttgttttgcaaacattacacaggactctaatgtgctcatttgtaatccactgaacatcctaatggaaatggatttattaaaatatataatctgaaatgatttggacagcatcacatgagcttttaaccttgggttagcactcaagggttacaataacaatgcttccagcaacttctatttcaatagcacatcagagtttccaaaatactcttccatatacagaatctcaaatgattctaaaaatggagcccttaggtaatgactatttggaaaccaaataacacaatcaaaacactgcttcatgggtatttatattacaagttgatatttgagatgcctagatttttcttaagctctcataattggttattttttccagggggtaagtgaggtagactagaggaattaataaatgcctttggaatgagtttaccttggctttttgagtgctttgaggaggagaccttggtgaaggcttgttgctaggtcagctgcatgtgtatcttttaaatgctttttataacttaaaaacggaaggaagaagagtggctgttgtttcttttgtgcatatcgttttctgaagagggatatttctcagaagactttttaaacagcatgtcattggactcccagctggaatgacttaattgcttttagattcataccgggggcatgttgtgtaagggccaaaaagcaatcatttggacgagtttatcacatttctgctctgtggttgcctttgaggggcattgagccctctctttgtctgggcggtggggtgttggggtgtcggtcatgcatcagggtcaggagcttgccatagccctgctatgttcagtggggacagacactctgtaacagacaaatgccgcctccccgcccccgagagaacatgtgatattctctttacctctttttaacctctggtagctccatttttcctgttgagacaagtgactattccaaaaagttggaatatgggatgggagtgttggtttttttttttttttttaagagctgtaatacatgtagagagaccagttatacaatgtatgtttctaaccaccccctttacgcatttggggcggtgttccttagaggccgttgggtaggatggttcagagcatcatgattacagcactgacacacttatggctgcaaccttaggatttttctgttttagttttcttatctctgaagaagagatcataggttttggcaataactaaatgaattgatacatgttacaacagttaatgttagaaactgctgtgttgcatattatcattaacataatgtgattgaaaagatctggtgcctggaacaaccttataattgctaggaaaactcaagaaagtttatgtatctcaaatgcctggggcacgatgaggactgtcaaagagtcagccattacccttgagtgttgtgacatcatcagcctcgccagaactatgttgtgggctgtttcagtgtggtagaaggtcttggtaattcctgtgtcaggattatcatcctttccctgtttcttcttgctttgctaaagtatttatttgttccactggcctcatagggccttagtgggggatataggtacacacttcgggatagttggcccatgccccatgagtttggtgttgttaccttcgtaactctttctgtgacaggcagctagaagatggtgtatctggtggtggaagagaagctcctggctctgatccctctttttagcctggtgtcagggctaaaaagattatttagcctctttaagctttagttttcctcctttgtaaaattatattactaatacctgactcgcaatgctgcttggggttgtgggggaggatatgtgagggtggggtcactactctcaggtatggatgcagaacccacagatagagagggccgactgtatttagttttttcgtgctaatgtttttactttgaaaatgaccaagttgcctataacttgtatagtcaattgtgtcaatgggatgcgttctggtctaactcgcatgtgcatatttaagggtgtttctctctcggtgtgtagtaaacagtttacaaattccttactcaaatccaaaggtgagccagaattcttatcactgacttcagatgtggttggcctgttttaaatcattatttttggaatttaggttttttgttttgttttgagatggagtctcactcttgtcacctaggctggagtgcaatggcgcgatctcggctcactgcagtctccacctcccgggttcaagcgattctcctgcctcagcctcctgagtagctgggattacaggtgcccgccaccatgcccggctaatttttctacttttagtagagatggggtttttactgtgttggccaggatgctctcccgagctcaggtgatccgcctgcctcggcttcccaaagtgttgagattacaggtgtgagccaccgtgcccggccggatttagggttttatgaaacccaaaaccgcagaaacattttattcgtgtgttctttacgagttaacgccatccttttctgagtgtaacctgcagttctgtgctcttgccttgattcttgccagtgataaagcacgagagccttgcagaccaactgcctgttgccccataaggccatttgtccagctgttcctcccttaccattaacgcaaacattttagagtgactgatgcccacacaggccgcggggctagtaatcatcaggtctgccatcctttcctcagcacttttgggggccaagagggccaagaagccatttttcaatgacaaaaaccattcatcctgatttatggtctttctgttgtcctgacctttatattctcataaaagtcttttaattttagtgtcgtatgttagcaggaatatatgtaagaaatttgtgtaaagggcagatatatccaagtctgttattttatcattgcacataatgcattcacacttggagatcatgatgagagtggcaaccaagtggtaattggtgggaaaaatattacagaatttaagttcttctatagaaaaggaagaagatgtgattggcttcaaacattctatttccagatatctgttataattgtgatcaaagtgaaagagatttcattgtgtgaaagttccagaagcgttttacaaagcctgtaaaccagtagaatttgcttatgatactggagtttcggagtacagaggcagcatcccaggttgacgtttgttccctgtgcgagtgagctgctggctggatgcaaggtgataatgggggttttgctcacctaagctgtgttcttgcagctttccctagttttacacgtggatggtggagctgttttggcccagggcaaaccgggttacagcactcacacatgctacattaaaatccatttgaactgttggcacaggttggcagacattccattgttttcagacaatagtgactcaaagttgaactggctccagggagcaagtgtggcttttgtacagtaacagggatttaatgccagccaattgacggagtctgtgtcttgcccaaggaagggatgccttgtaatgacatgaagcgtacatttaaatatctggcttgagatcagaaacttgcggtggatctcttttcccttgcttaacacatttcttctttatttacagtgattcttttttttgcccctttcgtttgttttggggtgtggacaggaagaaggtattttaatttgggggttagttcggtcccatcttcagggtcttcttttcctttgttgccttgctagcagatgtttcggctgactttctgtaatggtccttgtctggatttttctctttcaaggaggttaggccttctgaactgtattatttcaggtcatacactgcataattccaggatatcttataacttttgctggatgccaagtaaggactcctgtttcatacacatctaataatctaataatacacatcaggattccgtcttgtgtttggatgaggtgcctttattagcatgggtaattggcaagataggggcgtctggttctgggaggcgcttggagacaggtaaaagtagaaggccagctttgtcagctttctctaaaaattatatttttcacatgtggatctttgccattgcagcaagagctttcgaaaagatcattcttcttatatttgcgtaactcctttctctgaagaacgcaaagcacttatatactttattcaaaatacttcagcaagtcctggagggcggataagaggaagcagccagctggtctgtagttcagggaattgaggcccaaacggggttggtgagcagaactagacatcaaaatcaagagtctgtgcatggagtgagggtattaaaaaccttgagatcagtttttcatagggctgccttccttgagggtctcttccaggaaacttgtgtcagcatctaaatatgcgaacaaagcttttggggaacattgtttaggacaagctccctggaggtatagttgtgaattcccctaggaaagtgtatctctctgcctttcaaattgttacaggattgctattaaatatgtttctaaagtaacttcttttgcccatatctttttcatccctcattgggagcaaatcttaccttctcagggatgaggtgaccctaaatcaaaataacagcctttggatttaaagattttgcctgccgtggtgtgaaaacacttttctataggccgtttaactttcagagtatgtgtatacaaatcaatatatttgtctctgttcgttaatgtaaagctatttgtatctgagtacaatacaatttcctaatatggttcacagtgatgaatgctttttttctctccttaaagaaactagtccaattatttcttttaattggggacagtgtgtggaggacttctatacattgaactttctgtctttctctctcttatgttcacagggtttaatctttccctgtgagagtgaatattttttttcctttcctcttctctccctttctcaaatcttacaaattaagacaaaagataattacttggaggagtaaaactggcaggttcccacgacacttaaaattaatgagctgttgagtacaaaatataccttgtctttggctctgtcggtgttgcccagtcctccccctgccccctttacttcccgtttaacacatgatttgactttctggctatgtttgccatttgggtatatcgctgctctaaaacagcatgatggttacaaaaagtgggtttggttggaaaccttctctttgtttgcaaatgaaagttaatttgattcagtttttaatttccgtatgtttgaaaactcttccatttccagatatctcatcaaaatattctttagtagagtaccttgctgaagtcttcagggcagccagtttatggttcactatgttaatttcacctgcctccctctcgtctccgtttcccctttcctataatcctggtactcaccgctttgctgtccatagtattttcctgagcagtaggttttgtgacctcaaaatacaatcaaagagttgtgcatctggtttcaggtacggatactgcaatgaaggatctgtttttttcagataagaaagatactgctgactaaccacagtcacactcttcaagtgtctgtgaaagtcccagcttagcaactggccttgccctgccaagtgatttatcaccgaacaggtgactcctgtcagtttttatgcgacacatcaagcttcttgaaatcatcatgtaaggagtaatggaacagatgatctggccccagggtttcaggcattttgaattccagacccctttctacttttagaagttattgagggaccccaaaaggcttttattaatgtggattatatttattaatatcagctttaattctcatatctaccatattagaattaaaagttaagacactttaagatatttattcatttaaaaaatgacacaaaccagttacgtgttaaacacatatagcattttttaatgaaaaataatcatagtccaaaaccaaaaacttattaagagttacattatttgacctttttgttaatcccgttaatgtcttactaagtaggatacagccatattatgattgcttctgtattcatctcttgagtgttgcagtacatagtttggttgatgtatatgaagaaaatcagctttggataaatatgtatgtacatgggaaacggtctttgtagatgatttcagtacttgataggatagtaggctctactggtagtttcctacaggtcagttgctctgggaacctgtacctgtatcagtgaacttttcatactgttacattaatatccattggtttgtctttttctttgaatggacctttaacccatgcactgttttgtagcatcctatgttgttcatttgaaaataatggttcagtgagttcttgttagcacctttggtaatgaacaagggtacatcatcaaagaatttctgtcgaactcatgatggcagatactggttttctgaaattctaatttttgcctgaaagcatgaattctgtcattggcagcaacgactattagttactttccttgaatagacaggcttgctttgttcatttttgaaaaaaatcgagtaactaagtaaaaactacaaataactaagtccgaagaactatagtgtgttggtccttcttgaaataaaaacaacatcctatgaaaaaggggctagcccaaaacttgcacaatcacacaagtgcttttccctagagatgatcattgtatttctgtatatagcagaagtgctttatgtgtaatagcatcttgtcacacaaagtatgtgtgctcaggggccatgattcagtcatactcactgtttgtatgactttatcaaggtcattcttaagtgaaactggctgtttttttttttttaactgctactaatccatggtagggatgaaatgcatattagactagtgtatagtagtttggtgccattgcctttgtttatgctaaagtacccgtgatttcacccatattttaaaaatatattttgttgagataaaattcacacattatagaatatacccattaaatgtactgtagcatgtatcaatacttgatttcctttttatggctaatacttcattgtatggatataccactttatctaaataaatatcagttggatcttcggtgatttcccccaatttttaacgattagtaataattctgctgtgaatatttgtgtgcaagtttttatgtggacatattttttatttcccttgtgtacattcctggaaatggaattggtgggtcatatgggaactcctacgtttctccttttgaggagctatctgaaaaggagaaaccattttgcatttccgccagtagtgtgtgagggttacagtttctccacatccttgcaatcagtcatcattatccatctttatgatatgactttacatcctagtcgatgtaaagtggtgtatctcattatggttttgatttgcatttcccttatagttaacctaccatttttcgtgccatcagtgcagatgtctatccattgtaaaggcaaataatgtctttgtattattatgaaatagtttcgaccctagcacatctcctgcaagggtttctaggtccttgaagggtctgtaaatctcctttgagatccactgatctgaccatacgtcgctagtggaaaattgggatgtgttttcagtgttgtgtatttctttttgctcaggcaggtgattagctactcctctttttcccatgaaagtgatactggcaagtgttaggaggcacctggctctgctggactttgtccacagactctcagtcatggtctggcatgagtaggagacgtaacaggcatggtcagtgtggacaaattaatgacccagaggagtaggaggttgtattgggtcttgctgagaccagtgtttgtctgcattgaagcccttctttatactctgtctgcagggagggatatgaggcaaaaagagatttgcccacaatctgattgtacagtaacctgagatggcccttttaaacatgcagtgatagtgtctcccaaatactgtgtacctactgaaccccagacattgtggtagatgttctacctaccggaacatctgctattccccagtctatagatgggaaaactgatgattaaataacttgcccagctgcaaacaacagagctgggaatgagctgcagataatgttttgaagggcgggaaacccatatagtaatattttgttaagtgaataaagagaagtaattatagaactggtgcttctttgtagcaggcctcaccatgagacatgtcttaatggcaggaaaaagcacagagaagtttggaggagtattggagattaaaaaaaaagcaactacttcctatgttttaataagctgtgttcactgctttagaaaattggtgaacagtcaagaattgcctagattcatgttcccttggcttgatttttaatcacattgaagtatgacttcttacggatgttgcttttaatttgtcttgaaagctagcacagatactgccagcttgggcatgattgatggtttctgacaatgggtagttacttagaataaatgccagccatttgaaactctccattttctgtgttaactgagagtatccagtagaatcttgtgcaacgtcggattgtatcccatattttgacgtggcctggtctttccttcagtattttaaaatctattaatcactggtgttggaaggaactttgagataaaggctcacaaccgataatccagatggggataatggagatctccatcttataccatgacaattggactaaagaattaaatccaagcagtttaattagaaaacaattagaaggaaacttagaagattattttaccgtttgaaagcatgggtggtggaatggagaaatgttgatgaaagggtgcatgcaaagttggtttgaagggagagagaaaatctggagatctactggacagccttgtgactagtcactaataatgtagtgtatactcaagttgcttatcttacatattcttagcacaaaagtatataaggggattgggtgtggtaattagcttgattaatcactttatacatgtattaaaacatgtcatactgtaaacgtaccattttaattgttatactttcataaaactgggagaagatatacggaagggtacgttaagcacgaaagcaagaaacaaagaaatttgttagcagatttggcaccacagcaaatgaaaaagtaaacggcaaaagaggacagtatttgcaatttataagacattaatataatttaaaggactcttaaaattccatgtgagattgaatgttggggaaaagggagttttcagaaaggacagacaggtaagatgtttagaggaggaaagatttgatttccccttctgcaagccaataggaagagatttacaactcaaaggaggaataattttcactttcatctgctgctgtgggggtgagggaattctacctgaagttctgccagtcctggttggggtggggatggcctggagctgctcaagtgccagatgcatgagtggacacagtaaccttttgaaaactccctctggcaggatgatggctaaaagatcactatagcttccccttgctgatctgcctaaaggcaacccaggaacagggtgtgcttcctccttccctgaagaaacaggccctgtttggactgtttgtggggagacaaggcctgtgggttccagagaaatggatgtgaaagtctcgtttattccatggggagggactgtaaagcagaaggataaacccataacgttggtgtttctggttttctgtagaaaccccaagcatccctgttctcttttgaagtctctgcctcatgggtaggaagcaccatgctcactggaaattctcacttgtagccacctggggtttggggtggatggggtgggcttgggaggcaggctgacttcatgtgccagggataggtggcatggcctgtgccaggcacgtaccccctccatctgtaagtgtcctgtccagtagggttgttctgaggattcagaggctcaatgtacttcaggactttagcatagttcccctggcttataggaagcacttaagaaatactagctattagctattgctgtttttgaatttaggaacagaaaatgggtctggctcaaagttccatcatccctttcttcatctctgttgtcactgataggtcagataaagcagctgcgccccgaactcatgcatgtcagtagctctctggcctcaaaatgcatctcttttaaatctgagaatagacttttttttttttttttttgagacagagtctcgctctgacatttgatggttgattctttctgacttcagggagtagaggtgtattagtccattctcacactgctataaagatactacctgagactgggtaatttataaagaaaagaggttaagtggactcacaggtccgcatggctggggaggcctcaggaaacttacaatcattgtggaagtcgaaggggaagcaaagcacttcttatatggcagcaggaaaggtagagcgtgaggtgggaaacacttttaaaccatcagatctcatgagaacgcacttgttatcacgagaacagcataggggaaactgcctccatgatccagtcacctcccaccagttccctcgctaacacatggggattacagttggacatgagatttgggtggggacacagagccaaaccatatcagtagtttgcgtggtagtggtcaaggtagtgatttcattcttgttttctccttcctttctagttttcaatggttccagcaggtcaacacgggagaaggaacctgttcaaaaacacaaaagcaaagaggccactcccgcaaaggagaagcacagcgatcaccgggctgacagccgccgggagcaggcttcagctaaccaccccgcagcggccccctccacgggttcctcggccaaggggcttgctgccacccatcaccacccccctctgcatcggtcggctcaggacttacggaaacaggtaaagtcgagcaggggtgcctacatgtgtgccagaccccagtttcccacttcacttcaccaagctaaaaattcatcttcagagggctcaagaagcaggaggtgatgcccagaagcaagacagggacagacagagcgcacctttgcatgagctgcaggcgcctgcaccttttgtcctgcgaagatccatcagttggatttgcattcatccctgggtgccactgcattcaccaagaaagtgaactcacttttttacttaagccttctcccacccacccaccctgggctccagatgagcggtagagtggcagggaacatgtttttctcagggtaggttttgaaacacacctgcaaatgggatagttctgttaatggatgatcctggtctacttttctgttctttttgatgtgacaagttaacatttcaccacctggcctttgaagcagaatatgtgcatgctgtgtgcactgccgagcagtctgtggaactgggtgtggctgggtggcacctcttccactgaaggcatttgagtcccaggctgtagcatccacagagtgtaggtggctgccaccctgaccacctcctgcccctgcctgtcctgcgctgtccccccacccgctatcccccaacagggccacagataatgccggttctggtgaggcagttttgaagaatccctcagggcttggccattattgctgtccagatgttcccattcctggacattgatttctcacaaccctagggatgagtagtggggataagggcaggttcctgcaggcacacagctgagggcttgtccccggacaggtggcatttcactgatgcctcgtgctcctgttcccccctccattttaacatccgctaagtcatgggatcattgatgagctttcctcacagagttaaaaatagagggttaaaatcttccctagaagagactggaggctatgatccttaaaggtagcttcagaggaagttgtagaggggacggaagagatttcctggctggcagtgttgcagagtgacttacatggttattgtggtgtgaaaatactcgatttcgtcttgcggtagaggtggcctttctcattcttggtgacgttgtggatatttctctctgaacgtgaacatgtgactatagtcacacataggcagacaggtatgtatgcatgcacatgtgaacctttacctagcaaatagtatgcagttgggggggtgggcatggcaagaatcaccacatttacatttccacagtccacacacacctagcacatattaaacactggccactgttggccaaaacagacctcagttttcccagagacaacagccacggtgtggaattgggccacaccatgtgctcacctggcgtctcttaaccattgggccccggattgtcagcactggaggcacaaagcccagggaggcaccgagctttggtcctgggtctgtgattcttcactcccccgctgttcccaatgctgttggtctgatggagaattgtacagaactctccaatgtgtaaggtttttgctcatgaaagagaacagaattagaagcaacccagggagaaagacagaaagacagtgattacaccatgtgactgcatcctgtctcctttcccagaatcctagagtagggttaagttgtttttgtttatcttctattcatcccactatgcttttttgagtttttttagtttacttgtggtaaaattctcatgggccacatcagaactggaggccatatccaggtgagcttccagatcttgcctttctgccctgagaacccatccttgggatggcgaggcaggaatgaagggtggcagaggacctgagtcatgtacatgtgactgttcatgttctcatgcacggacagacacgggtgcgcacatcctcttgcacggtcacgaatagggatgcgtgggatacgcctgtcatctcagctggtcagagctcactctcagcacttggccttcattcagttcaaggttttcatttgtaaggggatgagaggaattagtacagttggacagaggaaagagctgaggaggaacagaaagtactgccttagcctgggatggccctgcctgcccccatgctccatggcgtgttcgtgtgacctgttccctgtgcaggatcttaggtgcaggaaagaggtcctggggtgcccctcacacagcaggcctctgtcctctgagttagtgcaggagtttcagctgcttccggggctcagggtagagtccttgcagggagcgccatgtgctcatgcagggcatcctgcaggtgttgacggggatcctctcctgtcaccctttccccactttctccctcttccctctcctcctccttccctgttccagtctaaccagcccagatgggttgacccatggctccagattctaatttggctctgactctgaccttcaatgagacttgagatgtgatatttaaccttcctgggccctattattcctttggagccagtctggccaactccttataccagggacattgtgagaaataaaaggaaaattttcaaaccctcagatcctattagttaagtactctgaaaataaggtcagtaaaagcaaattgtagattcccttgtgactgcttgatacaagtgattagactgtgacctttcatcttttcaactgcatgaaagatatgggcccagaggatactctgatctttcatttcaaatatgatatgtggatttttttttgttattgttcagcttaaaagcataaatgtgactgtattgaaatgtggagggatgtaatttttagggggtgctgccgagaagtgcctttgctctgcttgctataatgaactgtgtgggtgcatgcacctgtcttccaagtctaaaaccacttcccctcgtgcgaactgggcaatgccatttgatagtgtgtgcgatttatggagtccctagaacccgagagttagaacacaccagtgcgtacttcacctaagcctttttcttggtgagagggctctggccccggccgtttactctcgattataccaaatgagctgtctttgtcatggaatgcacatgcctgtataacattgcattgtcatggggctgggagtgcccctgggtaataatttggttgtatggtaagggtctcaccaaggagcaaatggtgtttttctgttgctttcctgcagtagtacttctgcttacatgcagtgacagaaagtaacaagtttaggatagtccaacagacgagctttatttctagcaagggttttgaagtattagttttccaagagagtcatgagcaggttttgtacttgtgtagaaatttgtgtggtttgtaagccaggatattgaaccagatgtggccacatgtgattctcatttcttacgctgaggctgagtgtgagaagaaaatgatcaactggctaatcccactggttttgcaggaccttccattgagctataggctactgtcactgaagaggttttcatatgaaaatgtacaagccttgcagaaaaatcctgccctagtaagattcagagagggccaaggaattgagaatattcttttaaagttctggaaaatacggctattgagaaggaaacatagaaaatcatattagtttttaaaaaagttaaaggttttcttctcatgacattattttgtcatttgaattgcacttgctggtggtggggtatttgtgactcagttacattgccttcagtgggaggagaggttataggtacatctagattgcccagtggaacccaggcatctcttttagagcacatttgccttggccttggccttggctaggaggctcctgcccatctgctgctgcggtcagtgtttgagcaggctgctcctccccttccataactcactgtctgtccagtgcatttcgcttctgtttaggctctttgtttttgattcaagttttaaagtgcaaatggactacccccagccaccaactgtttctctctctgggcctctggttctgttttgaaaggctggcagaggcctcggctcaacggctccctctcgtggagaagaagaacttgccagtgaatctgaggttgaactgaggacagcgtcataatcttgaacgactaaaacatttttgcttagttaaccaaaaacatcagagtcatttctcatcttctgctctgccttggaagtgcatgtttctccttttcatctgtcatcatactgagttgatttaaatattgtgtgtgtcggtggtggggtggagaaaaacccataaggatggaggggagagattttatattcttaaagcaagcacacagagtgtggattgggtacagtttttaagatggaatttctgttattaagaacaaagtcaggtaggaacgtttgatgtcctggactttcatatctctcaccttatatcccttctgcaagaagaatgaggtattgttgccagtactcatctggccgaacgtaacttgaaaatgctctcaaccttgcctgttaaattgaaaccattctcttatgactaggagggattgctttaatatctcatggccgtgtgcctgggatcacctgagatacaggtgacggatggctgtgggccaaggagcacacgctgcagacacctcactttctgcagagctgggttgggggctgggggcaatgggctgagaagccagaaatccacaacagagctgagagaaggagtaacttcaagcacttatgtataaagctgctcagctgaaatgtattgtcattcaatggagggtcctgctgtagcccacgtcggcgctaattcttcagtgagttcagatgacttcctgtgtgtgctcttctgtggaatccctcaggacgtgcagcggtggccttccttgtagtgcactggctgcataactggggctgtgtggttttaattgatacagaggtgggttgagggagaccttcggtagcaaggtaagacaatgccttcctccattcttctgtttccttttgtactgattaagtgttggctccttatagacaagtccaggccaggaaaaggggtgtccttttgttagattggtgggtcccaggtttccccacaatggtggtgctggctgggttgttggttctgttttatttctcccttttaggacacatggagcagcttaaggggcttcctatgttagcttttcagctcccctgtggcctctcgtggtgggcatagaacacggaccctctgggtttcgaggaggaagatggccagtgacacttgcctttttcagtcttcgtaattgattgaacttcgctggtctgtgttgtgggtgagatccatctagtctttgagcttgttatatgggcatgcgtgtgtgatatctgggtggatactgttgaagataactcctataataagaaggaaaatattgcaactcatttctctcataaagcaagttatttgaatgtataccttgccagtaattcagtatttaggttttcagaaagatgtaaacaaggtgttccttttgccattgaagatagtgatatatagaattcagctgtgttgaaaatttacttccctgtagcattgctagccatgaactcaggtgcccccgagaagccagaatggatggaaccaaaggccttacactcttatttgagatagaatatgagagacatagcactctggtatttggacagcggtgttagggaagggtagggtccacggatttgtgggaacactgagacatctgaggcttttaaacactgattccctttcttgatcctcaccaattagcacagaatctagagggaagggatttacattattttgaagctcccctaagggttttaggggtgccaggtttggaaaacactgaactaaacctcagcaagtagtggtggctgatgcctgaacctcacaggagttgggttatgtccggcaccatctggagtttgccattttgattagcgatatacgaagccgcactgtgtccgtctccttaaggagactcttgtgctgggagtagggctgaaacagattgcacccctacaggttaaaaggagattgagccaactgtagaggtgttgtcttttgctgtctgaacctgagatagagcccttccccaaggtcctggattccctgaggcccattcccccacccccacccagccccaccagcctttgttgctggaaataaagatcagccccagctggagtttactgtttgcttttgtttttctaaatgttttgtcttgttttggttttagtggaagcatttgaaagaacaattaaaactaagagatttgcattcctcactatacctcctcttgcagattaacagtacttaccacggaatatttctgtttgtccttacccctggttttataaatctgttttaaatttatcattgccaggtgctttttttcctctccaaaagggtttcgcattatttattccagaccgtctgtcagtcccactttttttatgggtgactcatggtttaagagccagagtgtgattcctgggtcttcgcttctgcctcttcatggggcctgaggtctggctctaggaatgaggcctccatgggcctggctcctaagagatgatgtcctaccaagaatttgtggctttgattggactgcacttaattggtggcatatagagaaatacaggtctcagtggcttctttcctttttgatttttataaacttcactgatacttcattcagtggttccaagcgcggtccccaggtcagcacacagcatcacctgggacttggttagaaatgcacattctcagtcccatcccagaccctctgacttggacactctgccggtagggcccagtgatgtgtttacatcagccctctaggggatgctgagagccactggtttggatgtttttggcaagtctttttttttttttttttttttttttttgagacaagagtctcgcccaggctggagtgcagtggcatgatctcggttcactgcaaactccacctcctgggttcacgccgttcttctgcctcagcctcccaagtagctgggactacaggcgcacaccgccacacccagctaattttttgtatttttagtagagacggggtttcaccgtgttagccagtatggtgtcaatctcctgaccttgtgatccacccgcctcggcctcccaaagtgctgggattacaggcgcctttgggaagtttcattccatgccccacccccacttaaggggggtcctgggccaggcctaggtttagtacaaaggtcactaagactcattacccgccatctggggaccttcgtccccatgtgacagcagcctgcacagccttgtggtggcactggtgtttcagtaccctctgggccatcactgcatgtggccagctctcctgaccaggaagtgcaggctcccccgaccctgccaccttcctctcgggctgttggggagaagagggggctagtattctgtgtttctcagtaattttgtgatttttaggcttcttcctttggagatggtggtggttataaaaccctgaagtccctgactttaacctcatatcatagacgaaaagtaatgcccaaggtgttaagtgatggggcagtggccacattgtgacgcagagaagacatcttctcgaaaccagcatgtctggcagcagcccattggggtcccttcattattcttgtttgaagcttgtgcatttctagtgtctgccattgtcgctccccattttcgctgacgtttgtgtgtcccaagattaccacggcgtccaagctgtaagactgtctctgtttgcccaggtcccatagaacctgatgggaaagtttgtccagggtggaagatacatgggacagtttgtaaacggtgggaaaatataggaagcgcgtgtgcagacgagggttggcatgtgttgcttcaccagtgaggtcggggcatccctcttccatccagcctggccctgtccagggctcgtctccacaaggaaagcagacagcagctgctgacagtttgcagccacacctctgggcctggcctgccacccggagccaaaccacatgagcactgctgttcttttgcttccatagtatttttgttttccttctttttttagccatagatttctaaatcctgtgggcaggtcatgctgctatgtggagcacagaaatagcagacatgacttttcttggaacagggatatgtgtgtgtgtctgtctccacttcccccaaggaagcaggatcttgctgtcatcaactctgagaagctcaggacaggtgattgcatggcacgtggggaggtcttcattgtgaaacaccaaatttcctggaagagcaatgggaacgtgaaaatgcacccaggaaaccccgctaggaagcgcctggggcagtttgcatacttctgtgacgaaggataggtatatagtggattctgaaagtggacatcgctgcttaattcttggatgtgtattttgcttctctttgctggtatttccacatctcttcttatcacactacaggctgctggctctgttcatccccagcatccagggtcctttctcacgggtgggccggtcattttagtggcaggtactaattctgcgtttttttccacctctgcttctgctgctccacaggtttctaaggtaaacggagtcactcgaatgtcatctctgggtgcaggtgtaaccagtgccaaaaagatgcgcgaggtcagaccttcaccatccaaaactgtgaagtacactgccacggtgacgaagggggctgtcacatacaccaaagccaagagagaactggtcaaggacaccaaacccaatcaccacaagcccagttccgctgtcaaccacacaatctcagggaaaactgaaagtagcaatgcaaaaacccgcaaacaggtgctatccctcgggggggcgtccaagtccactgggcctgccgtcaatggcctcaaggtcagtggcaggttgaacccaaagtcatgcactaaggaggtgggggggcggcagctgcgggagggcctgcagctgcgggaggggctgcggaactccaagaggagactggaagaggcacaccaggcggagaagccgcagtcgccccccaagaagatgaaaggggcggctggccccgccgaaggccctggcaagaaggccccggccgagagaggtctgctgaacggacacgtgaagaaggaagtgccggagcgcagtctggagaggaatcggccgaagcgggccacggccgggaagagcacgccaggcagacaagcacatggcaaggcggacagcgcctcctgtgaaaatcgttctacctcgcaaccggagtccgtgcacaagccgcaggactcgggcaaggccgagaagggcggcggcaaggccgggtgggcggccatggacgagatccccgtcctcaggccctccgccaaggagttccacgatccgctcatctacatcgagtcggtccgcgctcaggtggagaagttcgggatgtgcagggtgatcccccctccggactggcggcccgagtgcaagctcaacgatgagatgcggtttgtcacgcagattcagcacatccacaagctgggccggcgctggggccccaacgtgcagcggctggcctgcatcaagaagcacctcaaatctcagggcatcaccatggacgagctcccgctcataggtaggtctgggcggggggtcagggggtggtgcctgccctcctgcccccagatccctgcagttccctcacagtcttcacgttctcttcccttgcgaaagctccagttccgcttccctgtctcgggagtagtgggcttctcagctcattccccctgcagcccttcttcccaggtcctgggcgttggtggcaggataagaatggtattgagctgccgggcgcggtggctcacgcttgtaatcccagcactctgggaggctgaggcgggcagatcatgaggtcaggagatcgagatcacggtgaaaccccgtctctactaaaaatacaaaaaaattagccgggcgtggtggcgggggcctgtagtcccagctacttggagaggctgaggcaggagaatggcgtgaacccaggaggcggagcttgcagtgagccgagatcacaccactgcactccagcctgggtgacagagtgagattccgtctcaaaaaaaaaaaaaaaaagtattgagcttggatctggggtgagcccccactctgggtctgggccccttgcttcccctgggctgtcacctcctacccacaactgctggagttaaagcaggggccggggggccagtggggagcgctgcccctctggattccacactggattatagaggctggaagcccaaggtctaggggccagcagggttggtttctcccgaaaccaacaagacctccctccttggcttgtgcatggctgttttctccctgtgtcctcacagggtcctacctctatgtgtgtctgtgtcttcatctcctctccttagaaggacattggattagggcccatcctactgacctctttctaacataattacccttttgaagaccctgtctccaaattcattcatgtcctgaggtactggaggtcagggcttcaacatatgaatttggagggatcaccatgcagcccatagccctctagggtcctgtaggccattttttatcctgctcagccttgtctcttcttcctctgagcttcagtttctctggcgattttgtcaaggccacaggtcaagggatctgttgaccttttttctgagaccaggttttttctgagaccttttttctgagctctggctggggctgttggaaacttgtcacagtggatccttagtgaatgcatatctgggctgtcatgcagacccttgctcctcagggtgggttgcaggcagatcctcctcttgggttcccctgtagccctccttccctgtcatcctctcttcagtcctgccactggggacacagggtgaggatgaacttgccttgttaaggctaagtggattctgtggagtgaggtgcatccaggtaaggttgcaaccccatcagtctagacccatgggaggaaacaggccacacctccattttggagatcctcaattttcaaaggcatggagacgtgtagccatcatttaagtgtcagggatttggcagcaagataggcttccaggcaggatggaggtttcgtggttcccctcagcaggtgcctgccaggactgatgcctgagtgacagtcaccttaacttgcaagagttcttggtttgtgctctgctgttgggaatagcacgtgataggaagcagtgcagggagcaggctctgcacacgcgtgcacccacgcccgctgaccacgccccatgactacttgggacacaggatgactgagtcagtgatggaaccgcaccaagtcctcctgcctttggagacctgcagacaggagggaaacattccaagtttccctcctctgctaggtggatgatggagcctcgagagcacacttgacatcgtagtgacagcgccttttgtttagagtaggtttttctttaccctcgactcccttaccctgggacaaaagccatactgtgcctccctgtggtgtgcttatgcttgttgccgtcacccagaagtctaaggcgtctgacattctgtcccaggggtactgacctgtctgtgacccagcaaggcctcagggctggggtctgagttcagccatctgacagtggtagaaacttaataactttgaagtaatagcctaaaatccaccccagcagatgtgccttctgcctctgtgtaggttcacttccaccgcaggtcccagggagccgccgtgccgctggcgggagttgggtggggaaggggctcggccacgtagcagcctcaaggccctgagtgggagtgatcgcagcggatgaggattccatgaagaattcttgcaagcgctgtgtgattttcaggtgctcttgcgttataatctacttagagtgaaatatgaaagtgtggatttcctcccttctgtgacctgtgttctgagtcactcggacggtggaggacttgttttggttgggggactcgttttggtgcctacctctgtaagttgagacagtacccacctgccctcggaggaagaactcccgattgtcagccagagccaccgtgagtcccacctgtgactctgggagtctgtgagacctggagtttgttgtggagtctcagttcttaggtccctcctgtcgaggctggggacagttccctcatggatgttaccccaacccccctgttctccacaaccacatcagtccactgtcctgccatttagtgtgagtggaattcaggctgctgtgtccccatccctggtcttgctggtgtgctgggaactcgctctctgtgtgtgctgtgtctgccgaggtggttcagacgcttcacctagtgggtcccgtcatgcttggtatgtgcagcgaccctgcctggactggatccgtgcacactttaccttttattacttaaaaacaatatatccccacactctaaagatttaaaacgttgttaatttgtactttgtttagtattttgttgatggttattttggaaaatctcccctaccccccttcctttatttggcccgagggaggttgctttctccattcccatctagaaaagccactgggcgcgcgttaaaacctgcccaggtttgatgtgcatttgcgctgctctgtggcctgatcaggaggggcactgagcaccagcttatgcactgagaagcagcccgctgtctggatgggcgagggacgaggcatagatgtgctgccctgtgtcctcacgcaggtgttgctctttgctctggaaatccagcaggatggaaaatagacttcctttgtgtgagtgagtgggtggatgggtgaagttgagtgagtgagtgggtgggcattgggaattatagaaggggaattgggagttggtaacaagcatgtgtcaaagctattctaggtgacgctgggccgtgggtgcagccaggacccctacccactcctcaccagggagctagtcttctcatgacacctgcctccatgtgacaacacatgtaccagtacatggtacactgggatgttcctccctgtatgtctgtctggccagctcgcatccttttccagccaagccccagcttaaatgctgcctcctcagacgctccccacctaaaatggtagtccctcgttccacctgctcttcgtagcaagtggtcatgacccatcattttgtaacgcccttctctctgtggaccgggagtctactgttcaccactctcaccccagagcctgtcagagtcctggctcatagtaggagttcaagaagtacaggttgaatgaggaacatcttgttcgtgtctctttcactaactgtcccgtttttttccccttcgctgtcccagggggctgtgagctcgacctggcctgctttttccggctgattaatgagatgggcggcatgcagcaagtgactgacctcaaaaaatggaacaaactagcagacatgctgcgcatccccagaactgcccaggaccggctggccaagctgcaggaggcctactgccagtacctactctcctacgactccctgtccccagaggagcaccggcggctggagaaggaggtgctgatggagaaggagatcctggagaagcgcaaggggccgctggaaggccacacagagaacgaccaccacaagttccaccctctgccccgcttcgagcccaagaatgggctcatccacggcgtggcccccaggaacggcttccgcagcaagctcaaggaggtgggccaggcccagttgaagactggccggcggcgactcttcgctcaggaaaaagaagtggtcaaggaagaggaggaggacaaaggcgtcctcaatgacttccacaagtgcatctataaggtaggggcctccgcagagcagccactcccagctgcaggagtgcgggaggaatgagagaggaagtggagcgtgctatgcactggacggtgtgttctctgattccctggggtgatgaaggagggggcgggccactgtgctgggtgatagcgctgtattagtcctctcgtgttgctgaaatactacagactggggaattcataataaacagaaatgtactggctcctggttgtggagcctgggaagtccaatatcgaggaacctagtgagggccttgtgggtgcgttgatggggcagcaggagacccagtgagggaggggaagtccactccacgaagataccacgagtccattccgcctgcctagggcctcgggtttccttttcattaactggcttgcgtgtgcgtgttgcatgcacgtgcacacatctccatatgccagggataagtacctgggctgcatgcttcgtttcccctgcttctccagttccgtttcatcctggtgctcgacagctgcccagatccagctgaacttctcactggctggaccgtcagtggactctgtgcgcttgttttctctgttttctatccgctcacctcactgccagcccagcgttgccaggtcctctctgtggagggctttccctgataaagccatcaaaatgaatctcaccattcacacgctgtggagggaagagctggggagaaaccagcaaactgaaacatgcagcgtttccctgtctccgccaggtctcccggcagcacagtcatcctgaggagactcgcccctccaagaagcaggggaggcagagtccgtggctctcctcttggcagctctcccagctgtcctggctctgaagcaaggcttggggtttcctcccttctccagcctgccagtgggtagcggggcacccggggcccagctggccgagctcagctaagttgaagtctctgctgagtttcccggcacagacttgtcctctgtggtcccagttctggattcactggaagggaagcgttctctgctccagccctcgtgagcctggtgggagtgtgtggctagtgggtttcggcagcattgggaattggctgttggttatcactaaacaccaccataccctcaggtgcccacggctgcctgactgcaggctctggcctggccttgtagttgaggcaatgcgggcttctgattccatcacacatcttagaaatacggaggaagggttgacttgactcctggcgttgctgcttcactttaagtccaggccctgcagacccgcctcaggctgcatctcatgtccttgcacacttctctggaaagaggtacccagtttttctggcctgagaccctgagagggtttggctcccttttatctgagtctgctctcccattgcccaaggctgcctggtggggatgcggtgtgggggttgctggatgcagcctgccaagtgtgacccagagactgtaagctctgaggaactttatttggtgtttcctgaatgttttactgagaagcctttgtcaagtaaagccactcagtgaatcctgtgactgaatagccaactggtgaaatgagaaactgtcaacgtttttactttttactgaaggaggccaattctgtgagcgtatgtttgattcaaataagaggtttggatttgtttaaatccaccccgtcaagggtatttctagatttcatcacggaaatatagtggagctctgcgtggtggccatggcgaagcccccagcagccgtgtgcccacgggtagggaccgtgagcacgcaactctctgtggcaccggtgtcctggctgctgactttggtctgctggtgtcatcctcacctccactcattgcactctgccttggtgcagaattcagtccctccttttttatatttacaagaaacagactatcgggagcggcttggaatttgcatggaagtatgttcctgtagttagaaccccatctagttcctttgctgcaggagagaaaggcacaagccaatgtctccatgccgactacgactgtggacccaatggcagaaagcatctgctgctccctgttctggccctatcacttctagggggacgctgcggtgtccagtgctccgcagggaagccttccctgaccaccctcccccactctacatgacacctggcacctcctcccatcccatatttgtgtgtttgaggcctgtgtcttccccagactgaatggaagctcctcgaggttttgtgtgtttcatgcactgctctgtctccagcccctaggatttgacctagtacacaataggtgctcaggagatatttctggactcaagcaacaaatgtgcccggtcaagtaagaaagaaatagcaagggtcttagatggattccctctgaaaaacgcaccacatttcgtgtggtaggtaaaagaaggtgctgactccggattcccaaactgactcagctgttttatcaaagcaagcaaatcattctggaagttattgggaacagggcaacagaggggcatcgaagaagaggcgcagaggggacagcaggtggttctgtggagagaaggcgaccaggtcgcaacctcagtgaaggctgctgccctggcaggtgttaatatggcaaggactctcagggtgtagatgtcgcaccagtttctgtctctccagcttctctcctgtgggatccctggtcacgagttccatcaggtcatagctgctgatagcttctccgctggcccgcagcagcctttgtcagctgagggattctgcctccagcacaagctgctttttcagcagagccttggaggggccttccgcgcttctgctgtgcgtccgctcagggcctctgggcggcagcctctgttcctggcagaacaatttggccctcatggggttgatccttggtggagtcttcccactcctcttggcactgcgggttcttagagaatatatttcttccttctccgcctgtcattaactcagaatacaaggtggcccacagccgcagggacgccaaggggcagcggcccatgacaggtgtctggcctcatttgcagtagggttcagctttgcttctgaagctttactgttttttgttttgtttcagggaaggtctgtttctctaacaactttttatcgaacagcgaggaatatcatgagcatgtgtttcagcaaggagcctgccccagccgaaatcgaggtgagagaaggggcccctcacgctgcctctcatggtgtgggaacccctcggcgagctggaggacatcctgtcctgccctgacccctgcagctcggtgaacggaaaggactcagatggggctgagttcgtcctctgtgttgagcgtgcaccagggcagccaaatgttttaacttaggttgatctaaacttgttcacaagccaaaaacactataatgaaggtggggagctgccgagtgcaggggacgggttctgggcacgtcccctgctccccgtcactgtctcctcctgcttgctcacccggctgcttctcaccccatcctctgtgtgtctgttatgcaagagaatgtttggaatcccttgaaaccacagttgtgctttttcttctcttctattttttatttaatgggattggcagattgccatttttgtgcttctgccaactctcttctttgagttagtatgaggttggaaagacagtgagcacttctgtgcccagaccaattagggggagtttttgtgtgcggcgctgcaggacagagaccggatctgtttatttacctcccctcggccagtgcccagctgagtccgtgtgaacttccagctgctgacgtcggtgggctctcagcagcgcttggtcgtggaaagggaaagaaaccaaacccggactgctggttcagggcagctgccggccggggaacaggaggtatttgctgaccacagcctcatcttttagtgtgtgacaggcttttgctgtgttttttttttttttttttccccttaatgccacctgtttcaaataaaatccaaggtcggtttgccccgtgtatacatgctgaccactgggggttcaggtatcttgttttgcccaggttttagacctgtgaccttcaaacctgctcaaaccaggacagctggtcaccctccctgggtggcgtttggtgccccacctcctgatagcaattgtcagagcttaggatgtccagccctgtggcccacccctcccttcctagtgtggggaatagaggtttacctttcacgccattttcatcgtcttaggacctaggtctctgcttacgtgcaggggctgcctacactgtgtaccctgggtgcggctgttgaatgccacgcagtggcctgacacccggcctgtggtcatgattaccgtgctgcagccgccactgcctcacccaccaccagccacgatgtcagctgaaccgtggtctaggacacgtgtggcttccgcagctgcttccagagcacgcgttgcgtttgtggtagagatgtcaggcggaggacacttggctttctggggctgagcgttggacctgggaagaggcctttattgccaaacaacacgtgtcctgtgggcatctccccagaggtgcagaagtttattatccatgatgcgcaagaaaacttagctcattttacagcctcttattcaggaattaattccctctgaaagtctggattttgctctagcagttgtgtaaatatttaaacacaaaggggagatttgctagaatttaaacttcaggcctggattgcctagcttcttgtgctctgtattccaaaaaaggctggtggacagcccctggagttggccaccacctgggagcagtcccttgcttcccttcccatgtctttacaggcgcaccagacgctggttgccctcagtttcagcaaatacgcagcaggcttgggcactcagggagtctgttgagggaatccagtcatttaatgtggaattcgttcttgatttgtggagcttgactccgccaggtcggccccctctttgtggaagtcacacagcattgaggaaagtggttttggtgttgctagtagcgctttgtggagcttaactggaccctatgatgctgggggcttatgagttaggcttcttccctaaatgtggttccagctttaccaaggcttgtgagacgagggaagaggacttagtgcttctggagtgatcactgagaacaaagtggaaggtgactgcgtggggaggcttgtctcaagggagcctgggcaccgctgcttgcctgtagtcaaagcatgttctgacccattctttgcccccatatttgtttagatgggacatattaaaagtcacttcggaagctttatataattggcggttaccgtgcttagcataatgtcctccaggttcatctatgttgtagcatgtgtcagaactgacatccttttacaagttgagtaataggccatggtatggacggagtagattttgttcatccatctgtggatgggatactttggtggcttcaccttttggctgttgggaataacactgcataacatgggtgagaccctgctttctggcattctgaggatatgcctggaggtgacctgtcattgctttctgcattagcgtcctgctggagacactctgcaaagagagcgtctgttctgaggggtgtgtgcaccaggcattcgtgtcccagttttgttgggttgaactgtgctctgtggctgcagcaccttaggggtgctgaccagccctttcctgttccctgcagcaagagtactggaggctagtggaagagaaggactgccacgtggcagtgcactgcggcaaggtggacaccaacactcacggcagtggattcccagtaggaaaatcagaacccttttcgaggtaacctgggattctctcgtccaggttcttggggatgtgactgcatcctttccccgccagtttgtaacgtccctcgtcttcccctttgcaggcatggatggaacctcaccgtcctccccaataacacagggtccatcctgcgtcacctcggtgctgtgcctggtaagcctgactgtggccgcctgcctgtggcagctgtgtccatgagtcctacttgctgagaaccagggctgggaaatcccttctaagcactgccggggagggatggcgtcttcaggcttacaggacatacagtgaaaattgatttttagaaaagaaaggagtaacataatgattggtgaagtcagtagaaaaggtggaaaggtgaaccgcatggcagagtctggagctgggagaagcttaggggccaactttgaaccttgaaattgctgctttcaaagctgaagtcacaattccttaaggctactgcaggcttgaaatcatgaattctcaggatggtcagtaggctcgtaagggacggatggatgctttgcaaacttcagggaaagccaaggggtcatggaggttgtggtcaccatgaatgtgaaggcccaggccttggcgaaagtggctaggaacctgtccaggtcctggaacctgactcatttctgagctgagccaaggagccctgtgccctactcaccctgctcagaggccttaccaacaaaggggctttcttgctttctgcctctggccctgatgggggtttttgggtttggcgcctctggtcctcagccttgaggcttgggggcttcggcccgtgggcggccggttcctcggcattcctcaccaggtcaggttcctgcggccacctccctcatgaggccgacgtgctcctgatgttttgaagcggtgttcatattctcccacttctgtagagcaagcaggaaagagtaggtaccttctgctcactgtcttttgtctggctttgagtcccatttcttttccttcttgttttagcggaagaaagagatttttacttactgttcctttgagaccttgttgcctagcttttaaaaatgcccttttcactctttctgttttaggagtgactattccctggctaaatattggcatggtcttttctacctcatgctggtctcgagaccaaaatcaccttccatacattgactacttacacactggtgctgactgcatttggtgagtactggccccaggcgggaagggagggactgcagaaactactattaccacatgaagtggggcctgtgggtaacttcttgtccaggtggttccacgtgcttgagaacttgcttctctgtgttcaggcctgtcctgcgttccctgccgaagcctgggcctgggatcacctacctctgttggaagagttggggtgctggagaatgttgtaacactgtctgatgatgagcaaatcttttcatatgcttagtggccatttaagttccccttagttccttaagttcccttaagaattacctacttacgtctgtttttgttttgttttgtttcgttttgttttgttatggattagtcactttttcttgtggatttccaagagttattttcaccttagggttaaggaacagtagtaaaagtgccacacaaagctaaccagtagtagtgaccgtgtcatcagccctctagtaactgaatataaaccgtggtatttcatgattggttattttcagcctctctgtagagccagtgtttcctcatctatcggtggctgtggggagtagagttgacttgggaatctcgttcctgccatgtggagacacgcgcgttatgtaccctgtggagtctgttgcctggcgaggtgttctgggtccccgcctgtaatctgactctcactgtagccatccctgattgaggctgggtccccgcctgtaatcctgactctcactgcacccatccctgatcgaggctggactctttggtgtctttgtttacggcggcagatgggaaatgactacaaataatcagatgtcttgtcgtctgatcgtttaccggcatgctgttcatgccatgctgactgtgtttattgccctaatggggtgattaaacattctttattaaaataaacaaagtcttaggactcgtgttctccctctttggagccagcgtcggctgcagcctcctcattttggctgttctggtgagtggtgctgtggacatgagggagccctcccttcccacatgggtctgtgtgccatggacggtgatcatggtgtcctgcagtgggtccagagtgatgggcccgggaagcccaggctgttgcctgtggagcggggactgacaggagccttggggcttagccgggccaggccaccagctggggaggggacagccaggactattccgagaggtgcctttgcctccggaagaagagcgtggccatttcctgtggaggagttacactggctgtggcatggcctgtgttctggggtcatccccaggccagtgacctcaggcccgagtttcttccgtgtgggtttgcttatggcttgacgttgagtcacagatagcaaaatgtgataccctgtgtgggctttttgaagactcactcctggaacctcattgacaggagagaaagaaaaggcagggataggatcagagaacatgatggtgtgtagtttttcttaaaacatgtgatttaggttagaaaccctgtatttaaattaccaatcagtaacagaatatgttggcattgaaaataacatgagcattaaaaaaaatacttccttcactgagcaactgaaaccaggatttggcctcagagagaaatgctttcatcacagacacataggggctgcagagttgctgcccgcctggacctggggggcgggggctgtggggaggggctggcggtgttgccctgagctgctggcccacatctttgtgtttaatggtggttgatggcttcactggcttagcatcctgaagacctgtcaggcccctctccacactgatgtcctcctcttgcctggggaggagcccctcagacagcctgagacacccaggggcagggcagccatccctgcacccctgccttgcggggggcctcccctcacatccccctcattcatgctgtgagcctgacaccaggggcgtcacacgttgtgagtggaagtgtggccctggtgggctccaaggacatgggcaaaacctcctcccctccctgtgattgccgtgaggaggccgtgtaggttactttctacctgtacctcccaccttttcttacacttgaggacccctgccatggttataccctggagggtctgtgagccaccacttccccaggccaccctctgacagaggcctatgagcccttgatcctcctgtgtgtcttgctgtatgtgcctgatgccgggtaggctgggtcctaacacgtaaaactctccagtggggagcagagctgggggcccctagctatcccctgacccctacttcaccacagcatctgccaaggagttggccttgaggtggcacatgtgcatgagcctggctccttccccaactctctgtgcatttgtagagggcagggtttactgttcctgtctggagggccgagggagccacgtattccttgtgaggacattatcaggtgctgctcctgcagtggcctctgttaacagaaggagggtgcagtgctggagcctcagaagaggctcgtggaggccgcagtgtgtctggttctgatttctaggggtttgtgaacatctgtttgtggtttgaaggctttttggctcaccaggtgggtcagatctccataaaagatgagcatctcgcaacgcggatgcactgtggtttggctgtgtgctaggtggacgtggcactgctgccatgggaaatgggagccagcagtgaccaggcacccagccaggccagtgcgccatccctgccggcgtggagcagagcctctcccatgtgtgctcgggtccctgagggtgacgggggtggcccagtacatgcaggaggcccttgtcaagtctctgcttgtctcttgtgtctctcaatgacccaggtattgcattcctgctgaggaggagaacaagctggaagatgtggtccacaccctgctgcaagccaatggcaccccagggctgcagatgctggaaagcaacgtcatggtgcgtccactcagccaccgcctccagcaggagctgtaggacctcctaggcacttgaacatggtttcccatgaacccgcctttcaaaggcaatgaggacacagcaaaacaaatccccagggtgcaaagggaaaggtcctctgacacaaaagccaaactgaccttccatcagattgcacagggcgctggggttttgcacggcctttgcatctgttttggggcttgtttgtgttgtgggctgctgtgggccctgggatttcttgtgcccgccgctcctaccttctgggcatgtgagaggaatgagcacaaaggcttcttcacctgttttcaggaagtcatggggctggtgagttcctgggaagtgctgctttgagctgagttctgaccagcttctctggcctctgctgaccctgccggtcccgcctgtccatcttagagaagagatggacgggggactcctttgtaagcccagcctgtgggcctgtggcctacttggctctggagatgagcccggcagcctcctggttgtgtaaccttgtcctgtttccagccctggcattgccacgtggggacagaggggcctgtgtggtcatcatgtcctcagctgtgcatgaacctgtcatcactcttggaccagtgcagtttagaagctccttcttgtgttatgaatgacgtctttttattttccacataaaacaatcttatctccttgagagcaggcctcttagggtgcgcatacgtcacctgaagactgcaggtgtccctgcgcacagggaggggtgcctcagcctggccctgtctccccagatctccccggaggtgctgtgcaaagaggggatcaaggtgcacaggaccgtgcagcagagtggccagtttgtcgtctgcttcccgggatcctttgtgtccaaagtgtgctgtgggtacagcgtgtctgaaaccgtgcactttgctaccacccagtggacaagtatgggctttgagaccgccaaggtgagcagagccggcctcctcccgcttgctgcccccgcatccctgtgagtgccgtgcgtgagcgcacacagaagcatccctgcgtgtgcgtgtctatttgtcaatagttccttttggaatatgtctttgaaattcttaagacgtggttgaaaggtcttctaggaatgaaaagttgttagggatttgtttgtatcacaaagagttttgatcagaccgttactgacagacccctccagtattggaaaactgttgaagatgctcaaggtaattgcttagaatggacagagaacctccacccatcgtgagggagtggcagctgcctctgggtagcggcgaagtgctatgacttttcctggtatgtggtgcctttctcacagggaggcaaagttttgaagagtttttaatctaaatgcaattcaagatttagaaattcagacagcctgcctgccccctccaccaagaagaaccttgacagctgcctagtaatgaaaatccaccctaaagggatgtgactcctctttcaggaaatgaagcgtcgccatatagctaagccattctccatggagaagttactctaccagattgcacaagcagaagcaaaaaaagaaaacggtcccactctcagtaccatctcagccctcctggatgagctcaggtaacagacccccagagcccacgccagagagctggacccggctgcccttcgggggctcaccccccgagcaggcctcacttcctgacaggagggtgtgtctgcagggaggccggtgtggggtgcgtgtcccctctgctggtgagcatggcaggccgtcactaaaggtgcgggccgtctcccgtgtctggcagggatacagagctacggcagcgcaggcagctgttcgaggctggcctccactcctccgcacgctatggcagccacgatggcagcagcacggtggcggacgggaagaaaaagcctcgaaagtggctgcagttggagacgtcagagaggaggtgtcagatctgccagcacctgtgctacctgtccatggtgagcccgcctggccctgccggcgccctcgcatgtagtgcttggcctgagagctccggggttgcccccagaagagggagggcgctctctgcccaggagacctgctgtgctcccatctctggagccggctgtgggacctcggcggagcttctggccgccggaggtggctgcctcacccacagtgaccaggccacacagaggctgtccctctgttctgcccacgcgtggccctccctcggtcctgcagtgcgtccttcctccctggggagcaggtggcctccctctccgccctactttgtcactccagcccccacgcactctgctcttacccattctttctgaggcagtgaggggcgggtttccagtactgggcagcgtctgccattccctgtggcctgtgcctggtgcacctgggcccatggcctctgccctttggctctgttcttggtttcctggtcctgctcagctacatgatctgcctcagcccccgaggacttcagaatctatccttggtgaaagctgatgttcctcctgtcccatctgggatcagagatgcttttctggcacagccactccaggccacagcaggctgcattcctcttgccttctcgactgtgccctgctggcttcctcgtgcccacctgcctgcctcagctttggggttaataccaaacacctcctccccctgctcacccctgttccagcccagaggtgggctcagaaaagcccttccatggcgactggatggctgtggccctcgccatgcttcttccagtctccccttgacctctcaccagagagctgccctgacacactctgggtagggacgcccagctggcactgcagatggctccacagcactacacaccttagcctggaacagagagcatgcccgaagggcctgacctgcctccccgggcctcgtccctttccacagtgcctcacatctccagtacagaagcctagcttaggaggtgcccaccccatatgctgtgtggtgcctgtgtcccacaggtgcccccttcggctgcacactcgctgagaggccagtgcctctgcgtccctctgcttgtccatggtgggccaggactgagacccgggtcgactctccttggcctcccagtgtgactgtgtcatgccgtctcaccccgagtcctggcgtgccctgtagaagagggaggacacagcctctcccggatgagtcagatcgtcagatcgtcagatcagggctttgtaacatttgaaagagctaaaaactcggtgtgtcctcatctcctccttacctaaggacgcaaatcacattgtatcagataggcccaccctcatggcctcatttgagctgatttacctctttagaggccctacccccaactgcagtcacagctgagatcctggaggttcaacgtttgcatttgatgggggacaaatgcagtccgtgaccgccctgcctcctgtcctgtagatttccttctgtctggttttttcccccagacttctcaaaatgtattacctagagccatttggttcttaaaagaaaatgatgataagcattttcccagatcttcaaagtatcttataaacatcactgataaaagctgcatagcttggtgtgctctctctctgttcttttttttttgtttgtttgagacagtcttgctctgttgcctaggatggaatgcgtgctgtgatcctgtctcactgtagcctcaacctcctggtcatcctcccacctcagcctcctgagtagctgggacagcaggtgtaccaccacgcctggttaactttttttttttttgtggtagagatggggttttgctgttacccataggctgcctacttcagcctcccagagccccaggattataggcatgggccactgcgcccagctgtccatcctcttgctggaacacgctattcatttccatgcactgagggctgtatggtagttacacctgggggtgaagctggtctgtccctgtgaggtggcaccaggtggcctcattttcaagccatccttcagaaacttcagagttgtcacctggcatttcctgtcagcctgaaagttattttaagaagaatgtattgtgaggccgggcatggtaggccaatcccagtgcttcgggaggcaacggtgggcagatcactcgaggccaggagtgcgagaccagcctgggtgacagagggagactaatctctacaaaaaatacaaaaaattaactgggtgtggtggcgggggtatcacttgagcccagaagttcaaggctacagtgagccatgatcacaccactgtactccagcctgggtgacagagtgacaacctgtctctttaaaaaaaaaaaacaaaaacaaaaaccaggcacggtggcttatgcttgtaatcccagcactttgggaggctgaggcgggccaatcacagcctggccgacatggtgaaacaccatctctactaaaaatagaaaaaattagccgtgcatgatgttgagcgcctgtagtcccagctactcgggaggtggaggttgcagtgagccgagatcgcgccatcgcccaggtgacagtgcgagactccatctcaaaaaaaaaaaaaaaacccgttataaatccataggcaaaaattggggtttgacttatacgttgacagtttgcattgcttggattactaatacatttgtgaatttaaatttgatgtgtttcctgttcttcctgtccttggccccgtgtctctccaaggtcttgtttctgtcagtaggtggcattcccacactcctacaacgtgttctctgttccttgcttagaaacaccgcagacgaaaacaagtccttcccctcaagctttctgagaaaggcctatgactcttctcctcttgagtgttaagactgaatttttccttattttcaaactcagaattagaataggacttggagtcagcgtgaagtatgggagccctccggcagaagccaggtggctgtttcctttcatccggcccctctcaaccctagacaggcccccagtgagggtctctgtcccagcactctcctgtggcctcaggcagcagggcgtccactggcgggacagctgtgggctttgtggacagcccgcccaagggggccggggctggtgggtgaggtcatcggcgtcacagcggtcaggaatctgtgatgttgagggttttgggggagtttgcatggggtcgttggacgccgcttgctctgttgactgtgagccactcatggaccaccatgagaacctgttttgctgctggaaagtcaagggtgcgttccccgggtggccgcctaagttggagtcctccatgttccacatctattccagcactagggtggtttcaaacacaggatctcaggagccctcagaactcaagagatgagaaatacgcacccctcactgtctttagcagcctggtggtgactgaacctctcccaggaaactccagcagaaatctggaggggacttgagggccactcccaggtctaactcagaggtggtcagttactcaccttcctagttgaagaccatgttccaggtgtttggtcagttttcgttttagtccatttccagcatttccagtcctcaaagcccttggcccgggtggtgggtgctggggctactctggcgcgggcagtgggtgtggtggctgcccggccgggcgtgctcctaccttaccctcccagggcgctgtggagctgcctcctgaccttcgggtgtcctgctcttgcttgcaggtggtacaagagaacgaaaacgtcgtgttctgtctggagtgtgctctgcgccacgtggagaaacagaagtcctgccgagggctgaagttgatgtaccgctacgatgaggtcagtccctgcccgcggggtagggcagggcggcagcgtggcgccttccctgctcccggctggatgtaggcactccggcctggcagttctgtgcctggcgggtagtcagggctctgcaggcctgaggtgccctgttcttaggccctaaacccattcaggccccatgttaggatcccagggggagcggggttcctgcacgggcatttggatttgagcaatgggctcttaacagggctgaggctcttcctgcagccgcccccccggctttcccaagggctgcaccactgtggtttagacccagacccttttttgtgacctgtcccaggcacagtgggatggttggcagtggcctctccaatctgcactaacttgacaccagccccttcaggctgagagagctggaagtgtctgcggacactggggcaggacgggccccatgatgtgaaatcccggtgccttcctgcaggtgccacgctcttctggagaggggggtcataacaacacacagcctgtgcagctgggggccgctctgagtggcggaactcctggcagcagtgcctctcccctgctctgcccgccttccccacgtgtgcttcccacagactctgatgaggctggttacgaggaaggtcgccacattgtggtcattgcacatttgaggccactgagtggggtgggtgctgcgggtatgactgtgaggggcctggtgtgtctgggggcccaggcagtggggccaagtggtgggtctcactggataagccttgagctaaatgatcggagagctggaagaagaactctttgcatctgttttgtttcaaagagcatgctgggtgaaggcagtaagcacctgctgtgtccctccttcaccttagcagcaaatgtccaggcacagttgcaaataacgaagcctttgcggctgagcacgagcatggctctggcaccttgtgggggtgcaggcggcggcacggggaggcttcctctggctgcctggaaagcgctctgtgaatcatgggttgtacctctcaccagcagcctgtttctgtagtcggatgtgtgacgtgaccagatcctgggaaaagaatggcattcaggggctgtctgagacctaatggttggttttgatgaattaggagcaaaggtatttggaaactgcatactctgtagtggctgagtagttcagtaagcatgtctgtgcctctgtcccctgttgagctgtgcatttttttgtttttaagacggagtctcgctctgtcgccaggctggagtgcagtggcgtgatctcggcccactgcaagctccgcctcccaggttcacgccattctcctgcttcagtttctggagtagctgggattacaggtgcccgccactacgcacccggctaatttttctttttagtagagacagggttttaccatgttggtcaggctggtctcaaactcctgacctcaggtgatcagcttgcttcagcctcccaaagtgctgggattacaggcgtgagccaccacacctggcccattcttttaaataggaaatttctaccttgtaaacagagaccattgcaaaatcttctcaacctcccagtgtgcccagtacacaaatcacccatgtctgggcctgctgacccgggacagtctgctttaaacacccacccttgctggggtggggggtgcacctagattgcaaatccctgaattcatggcttgggttctcatggatggtgaagctctctggggagtttggagccatttgtgtctctggcccttgcaggctggctgagcagggtgttgggccgcctgccgccgagcctagtgtgagagcactggtctggggcaggtgctgcccacctgtcgagctgcacgcaggggagggaacggtgtcctcctgtaaccgcacactgccgctcctcctcacttgtccttatggtaaggtagcagtagccgcctaaatgggttttatggcagctcatccacttatcctttatcagtgtttatcatcagtacctcaagcagccatgactatggtgttattacagatacgtgtggaccgccccgccttccgaaggcacctttaacttgtgatgggagccagctgtcactttctcaccctcatcttgagggcttttcagaggactagagatcaggccctcagatgtttcattccatggctggcttcctctcctgccagggtcagcatggttcccagccacccgtggcccagagagatgctcataagatgcacgtttgctactcctccccatgttgtttttaaaaatgatatgattataggatgtactgtgtgaaagttacaaacacagtttttggtgccgacagataaatgattctcttgagtgaattacaaggatatgtataggttgagaagtgtttgtatttacttgcatggccaggttcagtggctggtagctaaagtgagtcaagtagcttgggtatttgtgtcaccatccaggatgtaacaaagcccctgggtctctttgctgagtgctccgtggtagaggcagtgctctgggctcccctgccagccctgcccttatgagcaggcaaagcatggtggaccagggtgttgatgaggatgaaacggccatgcctgctatgtggcatcaggaggagctgggaaagggagactcactgcatctgagcctctcggggttattttaaaacctgttggttggtgtggtgaaggggaccgctgccctctgccctaaacttgcccctgcatggctctcagggacagagctcttgttaatacggtatgttaactgtgtcttcctttcacccccaaacaggaacagattatcagtctggtcaatcagatctgcggcaaagtgtctggtaaaaacggcagcattgagaactgtctcagtaaacccacaccaaaaagaggtccccgcaagagagcgacagtggacgtgcccccctcccgtctgtcagcctccagttcatccaaaagtgcttcgagctcatcatgaagatgccaacgcccgtggtcgatttatatatatttttttgtaattattatattctagtttggagtacttgctgtaggattcaagctgtctttgcactagctctaaagaagattttcttctggttttagagaactaattttgttttagcattaaactgttgaacttttttttgtacttagaaaacctagatactgcagtcagattttggaaactgccgtatagtcactgttttaaaaaccccggaggggctgtattaatttgtattgccccatggctgacaaaagccttttttttttgttttgatttttttttttttgtaactgttggggggaaaaaggctttttaacccatttttgaagagggtgaagtttggagaacaaatttaaaaaccatcagtcatgtgagcagattttttagaagggataggagacacacgcgcacacacacacacacacacgaaacttgaaatggctttgctttggctgtcgtcttctgccgtgtgccagatgagcttgtgatctgggaagccggggcacccccgttttgtttctctgggcggttgtggcagctgaaggcggacgttgtttcctaaccataggtggaacgaggagacgggagcgagtgggctctccaccagcacatcactatgcatctgttccaggaaagaagaaaagcgagcgaggaagacggaaaagactgcctgccttggaggggtcacatgagggagacctgtgcctgatttcattaggaaatccattctgttattttttggtgctgttggctactttatcaaaaaacccttcaatagcatccttaagatttaaaaaaaaaaaaaaaaaaaaggaaaaaaaagtgatggaagccgtaagtgcttctttgtcatcgacgtgcaatctttctaacattccatctccatctcaccgcttcttgtttgacaccttcacaagtcagcattaatctttcttttaaaacttgtttcatttatgatcatgtagagagccactaggaggcctgcagttatttttgaatgtgaaaatgcatttgcgttcatcttgtctattttttctcttcatgttgtaacaaaaaggaaaaaagaaaaaaaaatcccatcccttttgtacatatgcctgtaaattgttttaaatacttgagcctttttctcggtggggggtggggaggggggtgagaagacaagatgaagaaaagccttacatttcagtttcttcatcggttggattggatgcttacagggtttttcttgtaacatttataagtgctgcttacatcactgaacaacaacaaaaaaataataatggagtagctgttgcccttctccggttgtgtgtacagtatgtgtggaataaaaaagggaaactgttttcacaagctgttctttgtttcataattggattcatcaatcccgtagctacccatattgcactgagcttgccagtggtgactgccaggaacgtcctatgatccactttgttggttgttgttgcagaagactgaactgttttggaatatttaacaattacagaaacagtcaagtgttttccaatgtggttgtccggtttctatggccttgctgtgtactttccctctttttgacagtaaacttctgcctatggcttacagtttgacatttaatttattagcgctgctctgcacccctcccttgggagggagacttcatgtggtttattgcgagttttttgtttacttttcaggtttgtactacaaggtttaataataaaaacaaagttttttggacatttgtctgtcttgtggaagatgactgaatggaatgagctctttcttttctcgtccacgggcagggggcagaggattccccccagccagggagcagagccaccccccacactgcagtcctgctcccacctgccactgggtccccttcagcctaacctaatggtttccatgtggcctgcggccgtccccctcatttcccatcgagctgcgcccccctgctgagcttgctttcatgatgagacgacactgggtgcattcagggtggtatggctgcagacagacagaccccctcatcccggcggggagtctgtcccctctctctcattgggctggaggagtgatggcaggaacacatctccaggggaccagtttcttttcataaagaatggaggattgctttgggcttgtttctgttcttttgggcccaggagtgtgaaaaagtaggggttggactggctggctactggactaatgatacttacttacttctgtaatgatcaacggaaaaccccaagctttgccagagtggtttggctacagtcagctcttctacaggaagtggcattttccacttgtgaaacggtaggtcattccctgcctcatgcagaactcagccctgtggagcctccaccacctggcccaggccctgcccacatgcaacctcccggggtggccctcaatgacctgcacgtcccttcactctaaggaaccctgagttacagtggccttaaggacatgtgtatttagaagcctttgtgtacaaactagctctgtgcgctctcagtttaccgtcctcacactttattgttagctgttctttaagtttctcacacattattggcaattatgtaaaaatcaagaacctctataaaacaacctggctttccaggtggaattccgcatacagccaaaactggattccagtgtggccagacaacgcccatgtcccaatttaagagtcgctgtcctcaccaccatccggagtggcctctctgtcagtgtgtgatgtggccagggcagtgtccacctgaacttcctcctcatcggactgaacaacgggggactccccaccctcactgatgtcccgggtggccgagtcggtgcaggtggaggaagaagaaggtggcttggctcttaattctgagggatttggaacctggagggtaatctcattctgacaggtactggattcaggccctgcaaaataacgtagggaagaaaaagccctgtcataaaaatattgtgaatcagaattgccgccaacagctgtggaatgtgcccgtcatgaaaggggggtgtggtttttgttccaggcacctggggcctgcagaacttgggaactgccctggaagacactgagctgagcgatgccagaggcagcctcaggccctgcggtgacccttctgtcccctaaggagtcagccacatgtgacacagatcaagtgctcctaaggctgtaatacgcgtgtaatagaggcccaaaggcaagtgctgcctatctttgaggagcagtccttgtaaccttgataatctagatttcttttttttttttttaccctttgcagtaattcagagacaccactgctgagaaagtcggaattactgaccttcagcagttctccaattttatggaactaaataggctcttcaaggaatcaaaattctatatgcaggtgtcactgtttctaaatcttcccctgactctgggtgagggttcacgctggtctccagtattctggccttctcaggatgagggcaaatgcacccaagctccttctcttccccaggatgacaccgttctgacagattgccaggagaagcgggtgagaagtttagaggaagctgaaaccgtggtaatggtagaaccttctacagatggctgaggtgctgctgggacgactgagctttgccttgacccagcccaaagaactggtctgaaatttgaaacgcaccaagcccaggtacaggtctggcacctcagcccatatttgctgcatgaatgtgaaacaaaattttgtgaagggatgaaaggaactgaagtgcaactaagtttacaacacaggccaagagctgaacacacaccatggctttgcccatggcaggcacgcccctaaatgcctgtcgcacgaagagggaagagtttcccgtgagccccgcaggagagtccgcacctccctgcaaacgccagtccttaaccacaaggagcagactcaaatggatttctgggtggtaaaggagggaaaacaaacaagaaagctctcaactcaccaaagttaccggagtggagcatgtcaaatctttgagaagaattcatgacggaaccacaccactgttgcagctgccacacagccgtgtggaaccgtggggttagggagccaggagctggctgtgagcttgggggtttatgcgtaagtgactggcagatggttctcacgtctcacctttggaggggagtggcatcgatactgccctggttcagctaatgcaagtttgtcaaccctacctaaggcgggggacagcacagtgttctcttctcctccagagttcaggaagacgtccagggcctcctggtccgatatgtccatcaggtccatctgctccagcatgtccacgttcacttccatggatgacatgctgcctatgggctctgcggatagatcaacacgagaaaggacacgctgtctttaatattactttaaaaggtgaacttccattggcattaggctaactacattgcatttcctaagcttccttcaaaatggaatttgaagcaacgtattagtagatgacatatgccagtctggcactttaaatgcatcctaaatcacccttggcaactattattaccttttacacttccttaatctgttcatccccagccctttgggacgctgaagactaatctctgcattaagtgagtcccggctgttttgagtaggacgctcagcctgtctcaaagaggccaacattcctgcagcaacagttagcgaccttcctccctgccagccacagctctgcttcctgcctacaggtgccctgaaccttcccggcaggcgcactcctctaattgcaagtggagtttccactggccttggaacatttctcgggcctaacggcagaaggggtttgacctacatctgtaagctgtaagagctccctgcagtggaagcacagactaggagaaaacaaaacccagcccaccagcagacggcgaccccatgaaacagcacatgcctagttggcctctgcccgggcactgagcacgggatgccccacaggtctttactcataggcaaacgacctctatggtccagaaaaccacaagccacgtaagttatcctagccatggggaatgcctggcagaagcaaatgcaaattatttctggaaggactctcccttaaccttggtttaaacaaagtcaatcccaacccaatctggcatttgtaacacacatgaaatgagccactccgagtgaagggcagcagaaacaaacatcatcctcgctgaagaatatgagatggctgttcatacaccacagtcacaggaaaggtgaagtcaaaaacaaggtgtcaaaaataaggacagacatttgaaagccaaataatgactaggtagaagagactgaaatctcaaactcggggcacagtcacagcccaatagaaaattaataaactagaaggcaggatgagtaaatctgccataatgcagcatagaagaacaaagaaaggaaatacaagagagcataaaaggtacgaaagatgcagaagcgtagcatctggtcacatttccccgaagccaagaaggggagataactctattcaaagaagctgatgagtttcccaaatcgatgaaagacctcaggacccagatttaaaaagcaaaacattccaagcaagatcaaagcaatcttcacctacaccaattgctttgaagttgaagaacatcaaaagacaaaggctctctaaaaggcagccagagagagagggcaggctaagaaagagaaggaaataattaggatgacaggcaactcatgaacaacaataataaaagccagaagactgcggagtaagttcaaagaggagagagaaatgtcatctctaaaatggtgtaacattaggtatcgtttaagatccaggagaaaagcagagaccaagaagaaacacgtcattatgagcctgctctcgctagaggcatagtgaaggaagggctgagtgcaagaaagcatgttaagcaaagagacgtgtgagtgtgtgagttaatgtaaaacctggaatggaacagtcataacgaggagtcaccaaggccaaattaccctcctgaacaaagacacgggggtggagaggagggtgcttagagccacagcgacgtgagattgcggcttcatctgggaggaaagtgagtctcattatcctcaggctcagaaaatcactaaagttcagcacttgaatgagaggtaagagtaattcctatttttagttggggaaaagtattatggtttagatgatcccatgcttggcggcatcaccctcgccaactgagccagcctgctctgcctcggacttggccgggggttgagcccagccgcacagggacagcagttcgctgggctggatcttcaaggctgagtggtcaggggaatttgaaggcacgctggtcaggcttgttctttttgggggcacgcttctgagggtttcctttctgacctacggaagcctttcgccaaggcctgtcttttagatcgtggcttctgacttcagttttgaaagtttgtctgtgccatcttcttgaaaagggcaggagagaaaaaactggactaagaagcataagaaaagctttcaggaaaattctgtagcaacaaataagatggtaatgggtgtgtcagtgatcacaggaaatgtcaatgagccaaacttgtcagttaagagattatacaactaaactaaaataaaatctagctaccttctgtttacaggagacaaatatggagacacagaaacatgcaaatgtttcttaaaaaatgaaaagatataatgaggaaacaaataattaagaagaaagctgatacagctgtattaatatcaaaatagattttaatgggaaacaaaagtaatattgggataaagagtagtacttaatgacttttaaatggttcaattcaccaggaagataatctaaaacttctatttttggttacgtttttaaagtaaaaatatggcagaatgacaatgaaaacataatatccataatcttgggggcatgtcactatacctatttgatgactgacatcagcagtcccaaagttagtaagagaaatcgaaatcccattctccaatcacaatgaaatttagttagaaattggtaactgctaggaaaactttcacacatctaattatttttaaaaaacatttataaacagttcacaaatcaaatatgaaatgctaatgataaaatttacccagaaattatgaatgtcaaaatttgtaggattcagctaaaatggtacccctgcaagaaatccatagctttgaatgccttactagagaggaacgctgaaaatcaagcctgaatattcaacttgggttagaaaaaaacaatagcccaaagaaagcgacactgaagagaagttaatgaaacagtagaaagaacaaagaagctggttctttaggggaaaaaagcttaaaaatggttatgttctgggtaagactcatcgtaaatagagatgaaaggaataaaaggcacatgaacaattttaaacatgcaaaagcaagcctaaccaggaacacagctaagggggagacgcacaccatggacaacgttatgctgacatatctgacaactaaagacaattccatggaaaacttgccaaaattaacgagaaatagtaaatctctataactatcagaaaaaaagaataggtaactcttcaaatagagtagtcactggtaacagcattggaggcaagttctactcaacactcaggaatgcatgagacacgtgcacttgcagaaagatccaataccactaagaggtccagtgtgtctccgtgcagaaacttactgcaattccgctcaaactgtagacaaggttcgtcaacaaacttgaaactgtaacacttataccaacggacaagaccccaagaagagtcatggcaactatgaagaaaataaatgcacacagatgtgcagagcaggtcaggaatggctccagcagactcaagcttcactagaaaacattttctcagctccagcactcctgacactttgtgccagatcgttcttggttgtggggtgtcctgggtagtgtggggtgtttaactgcatccctggcctctgcccactagatgccaatagcacacccttaccaccccaggcacgacaaccaaaatgggtctccagacattgccaaatgtccccttgggggcaaaagtgtccccagctgagaaccaacacttgatgactaagtagactacagtatggttttggctcagggacgggcggcagaagaatggagccgaaaagagaggcttgaagattcctgaatatacagaaactgccaaaggtgtcgtttcattccaacagattagcaaaaatttaaaaatctgatgctaccaagtgccggcgaagatgtaatcagaatgtgcatatgtggctgaggagactataaactggtgcaaatgttttggcaagaaatttgacagcatctagtgaaatgaaagacagccatgtcattgtgaccagtaattcctctcctagttatataccctaaagaaatggtttccaaagtgtggtcccctcagcatcacctggtaacttggttataatgcaaatcctcaggccccacctcacacctgcagtgggcccaggaatccatgtttgaacagccctccaggggactgtgggactgctcaagcctgagaacagctggtcttaaagcaactcttacgtatatgtacagagagagaaattataagaatgtccaaggccgggtgtggtggctcacgcctgtaatcccagcactctgggaggcccaggtgggaggatcactcgggccaaggagttcgagaccagcctgggccacacagtgagaccctgtctctccaaaaaaataaaaaattagcccggcatggtggtgcacacctgtcgtctcagctactcgggagtctgaggtgggagaaccacttgaacccaggagttccagactgcaatgagctatgaccacgccactgcactccagcctgggtgacagtgagactccatcctaaaacaaacaaaagtccatgccggcattgtttttattaaataagaaaactggaaacacccatcaatacatcaatgaataaattacatttattcaatggaaataaatatttaaggatggaaatcaaattagaggtgaatatatcagtatggatgattctcaaaatcatagcacttaggtgcactgttgcctgttaattctatcttttctaactttattgtaattttatcattagccccaaacctcgttctcttcccagggcactgggtccacgctggagcatcccagagctgatcaatccctctggaagcagggacacccctggctccataggattccattttgctgaactactggttcagaaacacaagagcctgacatctatgggaacacagagccagaaaacccaggcacagaccaggacatctccgaggtgatttattaataagtaactgcaggatatcctgacactcagcaataaaatcaaagcaataaaaatgcttttctaagaaaatggcagtcatgtcaggcagaagatcaaacctgggctagggccttacaaaacatctaattatatcctaacggcatggagaggcctgtggggcatgtggtggggcccaggccccctctgctgctcagccctcccggcaccgccttcagtcctcaagcctgagagcctctgtgcttggggggccacctggcctcagcaccatccaagtgggcacatatgtgccttcaccccttcctctgatgattctctggataaaactttccatggccttgtcttaattaagaaatgatgcttctgaaagtgaaattccaactgctatttctgatttagtggaatgagtccaaaacaccatgttcgctgtagagtttttaaaattttgattgattctcctaaattaatactaatccttggagatgaagattcctccctaagaaaggtgctgtggctcatcaggctgggaagtctgagccggctctgcacagacgtgcgatgagatgcccgattcccgtgtgtggctgtctctcagctctagctcaagagaaagctaaaaagcccagggccgccaattttcttcttcaaagctttcaaaaccatatattggcgacatgtgcctgatttttaccttaaaaaaatgagcccagcattttcttgaaacttaatctttgagatactcaaaaccacaaaaatttaaccacttcatatttccttgcaggtatttccagcaggtatctgctagacgcgttctctctgccagcccgctgacttgctagctgtggagcaactgcagtacgtgcccgtccctgtcaccaggggctggccatcaacagaagctgctccttccaagccggccacgcgtctactacttcatcatcctctcgggggtgcatccacggctctccctacaatgggagcttcctgagaggcactttcatttctctgtgcttcctctgggctcaccagcaagtgctaaactgaaggaagatagagttaaattgtttagcaatcagagtttctatgactgtccatcatcactgcatctcttctatgacatgagacattggtgcgatgtgtcattatgttcaaatgtgtgggtcggccagggtgtatctgtatggactgaatgtgtccccataaaatttgtatgttgaagccctaacccccaatatgaggatatttggagctggggcctttgggaggtaattaagttagatgaggtcagatggacatggcccctgtggttgagattagccctaataccaagagatagcagagagctccaccctactgttggccacgtgcacacatagggagaagggggccgtctataagcaaggaagagagccctcatcagaaaccgatcgcgccagcatgctgatcttggatctgaggcctccagaactgagggaaaataaatgtctgctgttgaagtcacccagtccatattgttttgttatggcagctggggtaagacagtgtccttctcggtttctacccttaacaggataaaaatccctggagcaaaccctctccttcctcccaaaggagccatgggaagccactctctacaatttgcagcaaacacggaagcaccagaatcctgcacgtatgctcggaggaaacgcacagaggacaaatgcagggtcgcaggatacaagaatggcaaaggctgactccagagaacgttgttaagcttcaaatctatactgtgcattggaaggtaaacaagcatcatccacacaactaactgactgcattcaccagcacactctgaagtcttcaactactgctattaatctatttttctcaacattattttctttcctcattcttggatttctttttatttatgtatttattttttgagatggagtcttgctctgtcgccaggctggagtgcagtggcgcgatctcagctcactgcaacctctgcctcccgggttcaagtgattctcctgcctcagcctcctgagtagctgggactacaggcacatgtcaccacgcccagctaatttttgtattttcagtagagacgaggtttcaccatgttggccaggatggtctccatctcttgacctcgtgatccacccacttcggcctcccaaagtgctgggattataggcgtatgccactgcgcctggcctcattctcggatttctttaacctctccttggaggggacacagaactggatgacaaggaagaaacactcctgggagatgtggttgggggcaggatagagagaa

SEQ ID NO: 411 - DNA, 5796 bp, Homo sapiens
tttcgggggaaattttccattatgagtgttttactaaagtgaatttttttttgtttgcttcgttcgtctttggctctttttttttccttcccaatttcggatttatttcaaggcgaatctggctttgggggaagaggaagaaaagtcggattacaagatcaaccaccaccaacaacaataaaaaccaccaggatatttttttgcaaatttctgacggctttaaattcatgaagcaattgtccccttttgcaatcagcatttggatctcagaatgagcaaggaaagacccaagaggaatatcattcagaagaaatacgatgacagtgatgggattccgtggtcagaagaacgggtggtacgtaaagtcctttatttgtctctgaaggagttcaagaattcccagaagaggcagcatgcggaaggcattgctgggagcctgaaaactgtgaatgggctccttggtaatgaccagtctaagggattaggaccagcatcagaacagtcagagaatgaaaaggacgatgcatcccaagtgtcctccactagcaacgatgttagttcttcagattttgaagaagggccgtcgaggaaaaggcccaggctgcaagcacaaaggaagtttgctcagtctcagccgaatagtcccagcacaactccagtaaagatagtggagccattgctaccccctccagctactcagatatcagacctctctaaaaggaagcctaagacagaagattttcttacctttctctgccttcgaggttctcctgcgctgcccaacagcatggtgtattttggaagctctcaggatgaggaggaagtcgaggaggaagatgatgagacagaagacgtcaaaacagccaccaacaatgcttcatcttcatgccagtcgacccccaggaaaggaaaaacccacaaacatgttcacaacgggcatgttttcaatggttccagcaggtcaacacgggagaaggaacctgttcaaaaacacaaaagcaaagaggccactcccgcaaaggagaagcacagcgatcaccgggctgacagccgccgggagcaggcttcagctaaccaccccgcagcggccccctccacgggttcctcggccaaggggcttgctgccacccatcaccacccccctctgcatcggtcggctcaggacttacggaaacaggtttctaaggtaaacggagtcactcgaatgtcatctctgggtgcaggtgtaaccagtgccaaaaagatgcgcgaggtcagaccttcaccatccaaaactgtgaagtacactgccacggtgacgaagggggctgtcacatacaccaaagccaagagagaactggtcaaggacaccaaacccaatcaccacaagcccagttccgctgtcaaccacacaatctcagggaaaactgaaagtagcaatgcaaaaacccgcaaacaggtgctatccctcgggggggcgtccaagtccactgggcctgccgtcaatggcctcaaggtcagtggcaggttgaacccaaagtcatgcactaaggaggtgggggggcggcagctgcgggagggcctgcagctgcgggaggggctgcggaactccaagaggagactggaagaggcacaccaggcggagaagccgcagtcgccccccaagaagatgaaaggggcggctggccccgccgaaggccctggcaagaaggccccggccgagagaggtctgctgaacggacacgtgaagaaggaagtgccggagcgcagtctggagaggaatcggccgaagcgggccacggccgggaagagcacgccaggcagacaagcacatggcaaggcggacagcgcctcctgtgaaaatcgttctacctcgcaaccggagtccgtgcacaagccgcaggactcgggcaaggccgagaagggcggcggcaaggccgggtgggcggccatggacgagatccccgtcctcaggccctccgccaaggagttccacgatccgctcatctacatcgagtcggtccgcgctcaggtggagaagttcgggatgtgcagggtgatcccccctccggactggcggcccgagtgcaagctcaacgatgagatgcggtttgtcacgcagattcagcacatccacaagctgggccggcgctggggccccaacgtgcagcggctggcctgcatcaagaagcacctcaaatctcagggcatcaccatggacgagctcccgctcatagggggctgtgagctcgacctggcctgctttttccggctgattaatgagatgggcggcatgcagcaagtgactgacctcaaaaaatggaacaaactagcagacatgctgcgcatccccagaactgcccaggaccggctggccaagctgcaggaggcctactgccagtacctactctcctacgactccctgtccccagaggagcaccggcggctggagaaggaggtgctgatggagaaggagatcctggagaagcgcaaggggccgctggaaggccacacagagaacgaccaccacaagttccaccctctgccccgcttcgagcccaagaatgggctcatccacggcgtggcccccaggaacggcttccgcagcaagctcaaggaggtgggccaggcccagttgaagactggccggcggcgactcttcgctcaggaaaaagaagtggtcaaggaagaggaggaggacaaaggcgtcctcaatgacttccacaagtgcatctataagggaaggtctgtttctctaacaactttttatcgaacagcgaggaatatcatgagcatgtgtttcagcaaggagcctgccccagccgaaatcgagcaagagtactggaggctagtggaagagaaggactgccacgtggcagtgcactgcggcaaggtggacaccaacactcacggcagtggattcccagtaggaaaatcagaacccttttcgaggcatggatggaacctcaccgtcctccccaataacacagggtccatcctgcgtcacctcggtgctgtgcctggagtgactattccctggctaaatattggcatggtcttttctacctcatgctggtctcgagaccaaaatcaccttccatacattgactacttacacactggtgctgactgcatttggtattgcattcctgctgaggaggagaacaagctggaagatgtggtccacaccctgctgcaagccaatggcaccccagggctgcagatgctggaaagcaacgtcatgatctccccggaggtgctgtgcaaagaggggatcaaggtgcacaggaccgtgcagcagagtggccagtttgtcgtctgcttcccgggatcctttgtgtccaaagtgtgctgtgggtacagcgtgtctgaaaccgtgcactttgctaccacccagtggacaagtatgggctttgagaccgccaaggaaatgaagcgtcgccatatagctaagccattctccatggagaagttactctaccagattgcacaagcagaagcaaaaaaagaaaacggtcccactctcagtaccatctcagccctcctggatgagctcagggatacagagctacggcagcgcaggcagctgttcgaggctggcctccactcctccgcacgctatggcagccacgatggcagcagcacggtggcggacgggaagaaaaagcctcgaaagtggctgcagttggagacgtcagagaggaggtgtcagatctgccagcacctgtgctacctgtccatggtggtacaagagaacgaaaacgtcgtgttctgtctggagtgtgctctgcgccacgtggagaaacagaagtcctgccgagggctgaagttgatgtaccgctacgatgaggaacagattatcagtctggtcaatcagatctgcggcaaagtgtctggtaaaaacggcagcattgagaactgtctcagtaaacccacaccaaaaagaggtccccgcaagagagcgacagtggacgtgcccccctcccgtctgtcagcctccagttcatccaaaagtgcttcgagctcatcatgaagatgccaacgcccgtggtcgatttatatatatttttttgtaattattatattctagtttggagtacttgctgtaggattcaagctgtctttgcactagctctaaagaagattttcttctggttttagagaactaattttgttttagcattaaactgttgaacttttttttgtacttagaaaacctagatactgcagtcagattttggaaactgccgtatagtcactgttttaaaaaccccggaggggctgtattaatttgtattgccccatggctgacaaaagccttttttttttgttttgatttttttttttttgtaactgttggggggaaaaaggctttttaacccatttttgaagagggtgaagtttggagaacaaatttaaaaaccatcagtcatgtgagcagattttttagaagggataggagacacacgcgcacacacacacacacacacgaaacttgaaatggctttgctttggctgtcgtcttctgccgtgtgccagatgagcttgtgatctgggaagccggggcacccccgttttgtttctctgggcggttgtggcagctgaaggcggacgttgtttcctaaccataggtggaacgaggagacgggagcgagtgggctctccaccagcacatcactatgcatctgttccaggaaagaagaaaagcgagcgaggaagacggaaaagactgcctgccttggaggggtcacatgagggagacctgtgcctgatttcattaggaaatccattctgttattttttggtgctgttggctactttatcaaaaaacccttcaatagcatccttaagatttaaaaaaaaaaaaaaaaaaaaggaaaaaaaagtgatggaagccgtaagtgcttctttgtcatcgacgtgcaatctttctaacattccatctccatctcaccgcttcttgtttgacaccttcacaagtcagcattaatctttcttttaaaacttgtttcatttatgatcatgtagagagccactaggaggcctgcagttatttttgaatgtgaaaatgcatttgcgttcatcttgtctattttttctcttcatgttgtaacaaaaaggaaaaaagaaaaaaaaatcccatcccttttgtacatatgcctgtaaattgttttaaatacttgagcctttttctcggtggggggtggggaggggggtgagaagacaagatgaagaaaagccttacatttcagtttcttcatcggttggattggatgcttacagggtttttcttgtaacatttataagtgctgcttacatcactgaacaacaacaaaaaaataataatggagtagctgttgcccttctccggttgtgtgtacagtatgtgtggaataaaaaagggaaactgttttcacaagctgttctttgtttcataattggattcatcaatcccgtagctacccatattgcactgagcttgccagtggtgactgccaggaacgtcctatgatccactttgttggttgttgttgcagaagactgaactgttttggaatatttaacaattacagaaacagtcaagtgttttccaatgtggttgtccggtttctatggccttgctgtgtactttccctctttttgacagtaaacttctgcctatggcttacagtttgacatttaatttattagcgctgctctgcacccctcccttgggagggagacttcatgtggtttattgcgagttttttgtttacttttcaggtttgtactacaaggtttaataataaaaacaaagttttttggacatttgtctgt

SEQ ID NO: 412 - protein, 1242 aa, Homo sapiens
MSKERPKRNIIQKKYDDSDGIPWSEERVVRKVLYLSLKEFKNSQKRQHAEGIAGSLKTVNGLLGNDQSKGLGPASEQSENEKDDASQVSSTSNDVSSSDFEEGPSRKRPRLQAQRKFAQSQPNSPSTTPVKIVEPLLPPPATQISDLSKRKPKTEDFLTFLCLRGSPALPNSMVYFGSSQDEEEVEEEDDETEDVKTATNNASSSCQSTPRKGKTHKHVHNGHVFNGSSRSTREKEPVQKHKSKEATPAKEKHSDHRADSRREQASANHPAAAPSTGSSAKGLAATHHHPPLHRSAQDLRKQVSKVNGVTRMSSLGAGVTSAKKMREVRPSPSKTVKYTATVTKGAVTYTKAKRELVKDTKPNHHKPSSAVNHTISGKTESSNAKTRKQVLSLGGASKSTGPAVNGLKVSGRLNPKSCTKEVGGRQLREGLQLREGLRNSKRRLEEAHQAEKPQSPPKKMKGAAGPAEGPGKKAPAERGLLNGHVKKEVPERSLERNRPKRATAGKSTPGRQAHGKADSASCENRSTSQPESVHKPQDSGKAEKGGGKAGWAAMDEIPVLRPSAKEFHDPLIYIESVRAQVEKFGMCRVIPPPDWRPECKLNDEMRFVTQIQHIHKLGRRWGPNVQRLACIKKHLKSQGITMDELPLIGGCELDLACFFRLINEMGGMQQVTDLKKWNKLADMLRIPRTAQDRLAKLQEAYCQYLLSYDSLSPEEHRRLEKEVLMEKEIKRKGPLEGHTENDHHKFHPLPRFEPKNGLIHGVAPRNGFRSKLKEVGQAQLKTGRRRLFAQEKEVVKEEEEDKGVLNDFHKCIYKGRSVSLTTFYRTARNIMSMCFSKEPAPAEIEQEYWRLVEEKDCHVAVHCGKVDTNTHGSGFPVGKSEPFSRHGWNLTVLPNNTGSILRHLGAVPGVTIPWLNIGMVFSTSCWSRDQNHLPYIDYLHTGADCIWYCIPAEEENKLEDVVHTLLQANGTPGLQMLESNVMISPEVLCKEGIKVHRTVQQSGQFVVCFPGSFVSKVCCGYSVSETVHFATTQWTSMGFETAKEMKRRHIAKPFSMEKLLYQIAQAEAKKENGPTLSTISALLDELRDTELRQRRQLFEAGLHSSARYGSHDGSSTVADGKKKPRKWLQLETSRCQICQHLCYLSMVVQENENVVFCLECALRHVEKQKSCRGLKLMYRYDEEQIISLVNQICGKVSGKNGSIENCLSKPTPKRGPRKRATVDVPPSRLSASSSSKSASSSS

SEQ ID NO: 413 - DNA, 70549 bp, Mus musculus
  misc_feature (1)...(70549): n = A,T,C or G
nnnnnnnnnnnnnnnnnnnnnnnnnnnnnnnnnnnnnnnnnnnnnnnnnnnnnnnnnnnnnnnnnnnnnnnnnnnnnnnnnnnnnnnnnnnnnnnnnnnnnnnnnnnnnnnnnnnnnnnnnnnnnnnnnnnnnnnnnnnnnnnnnnnnnnnnnnnnnnnnnnnnnnnnnnnnnnnnnnnnnnnnnnnnnnnnnnnnnnnnnnnnnnnnnnnnnnnnnnnnnacatctgtaactccagttacaggggatcagatgccctcttccaacctccacgtttactaggcgcataagtggggggaatataaatatacaagcaaaacactcgtacacacagaataaatgagccttatttatttatttatttatttatttatttatttatttatttatttaagccagcacttcactgtgctactacttatgcatgctatcatatcatctgcaaatatgagactttgatttctttctttccaacttgtatctccttaatctcctcagtcgtcttattgttctaactaaaacttcaagtattatattgagtagctatgaagagaatataaaaccttgttctgtctctggattttaatggatttctttgatttctctccatttaatttgaggttgactataggcttgctatcaattgcctttattatgtttatgtatatcctttgtatccctaatatctctagacctttatcatgaaggggtgttggattttgttaaaggtgatttttgttttttgttttttgttttggtttggtttggttcttttgcttctaatgagatgatcctgggttttttttcctttcaatttgtctatattgtagattacagtgatggatttttgtatattgaaccatccctgcattttgggatgaagaccacttgatcatggtggatgttttgatatgtttttaaacttggtttatgagtattttattgagtatttttgcatcaatgttcatgaatggaattggtctgtaattctttttctttgttgagtctttgtgtggtttcagtttcagggtaactgtggcctcataaaatttgacaatgttccattggtttctattttgtggaataatttaaggagtgttggtattagccttctttgaaagtttggtggaattctgagctaaaaccatctatcactgggatttttttttcttggttgtgagattttttaatgtcttcttctgtttccttgggagttataggtctatttaaattgtttgtctggttttgattttgataagtggtacctactgaggaaattattcatttcttttagatttttccaatttggtgcagtataggtttttaaagtatgtctttgtgcttttctgaatttcctcagtgtctgttattatatctcctttttgtttctgacataaattcacacatctatggccacctgatcttttatgaagaagccaaaaatatacagtgagaaacaagaaagcatcttcaacaagttgagctggtcaaattggttttctacatgtggaagaatgcaaatagatccatatttatcaacctgaagaaagttcaagtggatcaaagatctcagcataaaaccagacacactgaacctgataggagagaaagtgggaaagacccttgaatacattggcacaggagacaactttttgaacagaacattattagtgcacatgctaagataaacaatcaataaatggtacctcatggaactagcaagcttctgtagcaaagggcacggtcaatcagacagagcaggagcctacagagatctctaccaactccacatctggtagatattcaatatccaaaatatataatgaactcaagaaactagaaattaaaaaaccaaataatccaactttaaaaatggggtacagatctaaacagaaacttctcaatagaggaatctcaaatgcctgagaaacacttaaagaaatgttcaacatccttagccatcacggaaatacaaatcaaaatgactttaagatctcatcttacatctgtcagaatggccaagatcagtaacacaatggtagctcatgctagtggatcaagggaacactcctacattgctggtgtgtatgcacatttttacagtcactatggaaatcaatatggtggttcctcagaaaagggcatatgcccaatggatgctgcattctaccacaacacttgctgaaatatgttcattgtggctttatttataatacccagaatctggaaacaatctagatgtccctcaactgaagaatatataaagaaattgtggtacatttacacagtggagaattactttatggattaaaaaaaatgactgtttcgggaaatattaaaaaaaaaaaaaagcggcacgttcctgctcttgtgccagcaactctctgccctgtggggctggctgaccatgcactggcgggcaatggccaacctgtcgttatctcgtgaagactctctggcctggagctcctgaaatgtccccacccagctctctaggttcccactggtgggtcaataccacaccagccccatgctccaaaacgcccatgacctttgtggtgcacctcaggcaaacccatgctttgccaccacacctttctctcttgaacccggacgagccaccaggtaaagggaaatgcaacccaaacttagttcagaaataatggtaactcaattgctgggcacaacaactaaaatcctaccttgaagccttattaaatctaaactctccagtgaggaagcctgacggatccaccattgaagccaggtgacactcgttgctacatctggtcttcacgctatccccatctcaaaggaccccactctctcctgcttcctctcttcctccatccaacctggaagtcccacctactcacccagtgattggctcctttattcattagggaattggttcacaagaagtcacctgagtatgactcactccttgtccacaacccctcccaggagagtggagttagcattgacctacaaacagcaccaggcctattcataacaaatgacatcatgaaatttgcaggcaaatggatgcaattagaaaaaaaaatcatcctgagtgaggaaaaccagacccagaaagacaaatatggtatatgttcacttatatgtgaatattagctgttaagtaaatgataatcatggaacaatccacagactctgagagattaggtaaggaatgggtttgggaggaagcatggatatacctaggagagggaaatagaatagaatctaagggtggcctgtgcgggaaggtgggaataggattggaaggatcaggtgggcaggagtgatgggggtagggggtgtagggagaaatagctggaatggggtggcatttggaaagtggagtggagacctcctggaatctataaagatggccctagtgaagactcctcgtaagggaggatatggactctgaacatctttagcagccaggcaaggccttccattgatggttctaggctacatttggttgagttgttggctgaagaggtcctgtgaagacccaaaacaaccgagactgattctaggacagatagccatcctctaaaactgacagtgagtccccactgctgaggacaacatccacacagctcactgaacatagaaaggtccagttggggaggacttggagtcttctgtcactatgttctagtctctgagagctccggaaagagaaacctggacaccaacccagccgcaaaaccctccaccttcaatctgttctaactgtatgatgtcacagaaattatggaagtggccaaccaatgtttggtttaatttgaggcccagtccctgagagggaacccatgtcctatactgcctggatggcaggaggaagagactggatagctcagagacttaaggtagaagaaccaatcacaactggaaagagtcaatgaaatgattcctaatgatattctgctatactcataggtcggtgctctgtccagttgtcaagaggcctccactggcagcagatgggagtgggtaaagagactcacagccccacattatacaaagaaagtgtgtagattggaggtctccattgggtctctcccctcagagatcggggaaccatgtggaagcaggggagaaaagatggtaggagtcaaaggggatgcaggacaccaggagaacatgacccactgagtcaaccaagcagggctcacacaggctcacagaggatgaatcagcaagcatggggtatgcatgggtatacaccaggtcttctacatgaatatatgctatggctgttagcttggtgttcttgtgagtctcctcacagtgggagtgagtgtgtctttgactcttttgccagctcttgggacttttcctcctatttggttgtttatctagccttgatatgatggcttatgtcttgtattattgtatcttgttttgtcctgtctggctgtcatctcttggagacctgcttctcttttctgaagagggaacaggggaaatggatctgggttagaggggaggtggcaaggagctaggaggactggaagcagggggtggaggtggggtgggctgttactgaggttggataagcgaagcatgtattttcaatttttaaaagttcaaaaataaacttgtattggaggactgtgacagcaagtaattgtgatgagtaactgaagaatctggtacacttccggagtgctacaagagagaaacacggtaaggatggagagagacaagggaagaagcagctgctgggtcagaccttgctctctcacagatagctcacttctggcttgatcccaagccccagcctcagtactcaggaggctggaggcaggaaaactgctgggagtttgaggccctcctgggctaccacagtgagtcccaggccagcctgagctagagtgtgaccctgtctcaagacaaacaaacaataaatgggcttagagtgtagctaggtgataagaatgctggcctgcctgacttctgcacctcccagcacaacaaaggagaggagaggatggggaagaaagagtaaatggggttcagagggggctgcgatggaacatgacctttgagcagaaataaaaaagacaaagaggatatgacatacatatccaaaggaagattgaaacagcagagaaagatgggaaattgtagaacatgagaaagaaacatcttacttgtcagctgaaagtcagtaactgtaatgcaactcacaacaacaacaacaacaacaacaaaatagttctgaacaccagagagccacttaaggtcaaaatccataagacttttgagtttagctgtttcctttcttctataagcctgcactcttctttgaacctctcaagcaagattataatccacattaacagtcaaatccctttttaaaactttcttttcttttgagataggatcttgatataaagtcctgcatatcctgatacttgctatatagaccaaacagtcctgaacttgtggtaatcctcctgcctcaagcactggaattacactttctctccccctcccccttcctcctcccccccccccccgggtgtatgtgtgtgtgtgtgtgtgtgtgtgtgtacccaggatgtcctcaagctcacagaattctcctgcctcagctttctgactatataggaatgcaccatgaaacctggcttaacacatcttaatctctctgtgaccaacttggaataaaactcttttgacctttttacctgctttcatcttatcaacttgtaaagaaaagcaaaagaaggcaggaaccaaagatccaatacatgtcaagttttaccttcaggaaaaatagtaaatgtgtgtctgaaggtaaacaaagttgtgtgcacactttaagaacctgtgttcacccttagaagcaacaagaacttaagacaagcttaactctctggaagctactgactgtggcaagccagccaagccaggctgattggcagctggcaccaagttgcagcctagagaagtggtaagaagtcactggactttggacatgtttatctttctttcttttctcaggagtatttaaagaaagagtcaaaataacttactaacaaagtggacaaagaaaagcattgagagaaagagaaaaacacttagctgataaaactatgaggacaattttactttacagacttctgatttctccgacctacagaacaaaggatagagtttgttacaaatgtaacctggtaacaacttctatcccctacagaagatacattgtaacatgaagagcagtgtctcgagtctgcaacatctattgcctcctgtccccatgtttgtgctccaggttactgaagcaatgccacagacattttaagaagctgtcttcctcttaaggacttccaagcaaatccaaagcaaacgtttcaactgcaatagaattttcatgaccaatataaatctccaatatattctgacaggtttattttgcagtcagtagtttttttattagtactaggtcctcagtatgattttttttcagtcctggagagggaatccaaagcattcttccaaatgagctgcatcctcaaatgaataatatttcaaacatttcttatttttattatgtgtgtgcatgtgtgtgtgtgagtacagttgccctaagtagccagaagcatttgtatcctcctggagctggagtgacaggtggttctaagcaacctaaaatggatgactagaactgaacttgagtcttctgcaagagcagccactgctcttaaccactgagtcacttctacagcccctgaagatgcatatctctctctatttgggatttatttttaatgtgtatgagtgttttgctaacatattgtctatacacatgtgtatctgttgccccatagaggtcagaagagggccatggaacccctggaactgaaattatgatcagtagtgaactagtatgttggggcaagagtaataaattctcaaaaacaactgagccatatctccagcactcaacatgaaccttaagagcaactatttaaaataggaaaagactacggatatatattgaagagaatgcatataaaatattctaaatccttagaacagtgtgtgctgtgtacttcctctagggttctaggaaccaaggacttacctaagccaggacttcagagattactcacctgggtgtggtgacgcggctttggcccatcataaatataatgatgcatcgtcagctccctttggactcgatgaaatgccactgtctgcctggcaaacagattattagtttggctccgatgaattttcagaacaaaagacatctacataagaggctatcacaaatgttttaagagtatgtttcaagtcacacagagctgctaagaacacatgcttcccgctggtgaaggtttggatttcaatcaggtctccttaagggccaagctttgccattggtttttcccctagagtactttctaatgtaccttcgtcctttctgaagggtgtgtgtgtgtccttgtgtgtgtgtgtgtctgtgtgtgggcatgcaggtgctggtggagtccactcgtgtcagatcccctaggagaccagttatagacagctgtgagcaaccaccttgggtgatgggaagtgaaatttgctcctctgtaaaagtagcaaatcttctcacccattccctcagccccctcattctcttaatacgtctacattgcttggtggtcagagtctgatacatggaacttttactgtcagtgacaggaactctcaagttatattcagaacagctactagctgtgggaccctagagaaagatggctttctgggaaggcttgtctggcctcagtgggagaggatgtgccttatgataccagggttgggcaatgaagtgggggggggacaccctctcagaggtgaaaggaggggtcctggggaaaggaagggggaggggggaaccaggatgcagcatttggaatgtaaatacttttttttttttccgagacagggtttctctgtgtagccctggctgtcttggaactcactctgtagaccaggctagccttgaactcagaaatccccaaacccacacagcaagaggaaactgacaaaacaagttggttgtagaatatcaaccatttagctatgtctcttttgctttttaaatttcaattgtattcctttcttcctgaactagtaggattgagttagtatttatttacagttttaaagacagtttcttggaatagcaaaggctgtatgcattcttcactttaagactgttggctaaagaacccaatggatttaaatttatactttgtagaggtagaaatgaaaactgccttattttttccagcacttctattcattagttgcttgaggctttcaaggcatgtaggacactttagataacaatgaatgttcaattagaaaaaaaaaaagcaactctgtgttgtttgctaagtttttgttttttgtttttttgagacagggtttctctgtgtagacgtagctgtcctggaactcactctgtagaccaggctggcctcgaactcagaaatctgcctccctccaagtgggattaaaggcatgtgccaccactctccggctgtttgctagttcttaaagaaaaaaaaaagttgaatctctttctacccccaggtcgagcttaatccagaggtttaggccgctgaacttccttcaaggtcgttcacaaggccctcactgaaacttggagccactcggaattataaaaagacccagcttcccgagcagccacagaggggcgtcgggggaacccgaaagcactgggcgacggatctcgcaggtagctagggagcaaccccggacctctgcgcccgcacccgcggcgcgcccccggcgctgggaggaacctgggcggcgcgcgcttccggtgcgcgcttccggccagccgcggagcgcggggcggggacaccgcagtcttccaatcgcgcacaatgagacggcgctgagcgccggaagtggggctgaaggaaaacacggtgaggagccgggcccggacaggaagcggcgggggaccgcagcggcgctggtgagtgctccggggcgccgtctcgtcgcgtccctccgggactcgcctccgggctgggcccgtgggttccccccgcccccagaagcgtatctgcccggccccgaggtacgttggcgccgtccttctccggccgcctcggcccggctgtgcgcccggagccctcgggttcgagtccgcgtcttcactttgtgtcggggctccggccctggtccggggaaccccggaaccctgtcaatggccgggcgcttcctgcttcctattccccacggcggcttcgtggccagtagcgcggaaccgcctcctccttcgcctggggactccgctggtggaaactgaggcacacaggggtggggcagccgaatggggaaggaaaaggagtgtcatcctgcggaggattgtggttggtgacgaaactggacttgtctggggctggggactgagaagtcgggtaagtcagctggcgttgtcccttggtcggaagcctggacccttagagcggtaccttagtgggaagtgctgtcccttcgcccagcggtcgcgccgggttgaaaagcgaagcttagagtgggggctgatcgaaactgaaatctgctcacatagtttcggctactttgatacctaaaagtaattgccaactttaaaaaaaagaaatagatttgggagttttgtaacagtgttgacttaggatgtttactttgaagagaggtgctttcgttacatagaagttacttctttagtttctgagactatagaagtgtcttcagatttagtctttgtattaaataaggaccagtttttatgaacactgtaacttctggaatgcattaattattaggaatgtggtaacaatttaatttttaaatgggggaagataaaggcttcagggcacccgtgtgttactttgagtatttggtatgatattattttacaattttgttttgttcccccctcccccaatgccttctttcaggtacaaagtaagaaagttgaagtcaaagaccatgggagatacagcaaaaccttactttgtgaagcgcactaaagaccgtggaattattgatgatgatgatttcagaaggggccatccccaacaagattatttaataatggatgattatgctaaaggccatagcagtaaaatggaaaagggccttccaaaaaagaagatatcacccgggaactatgggaacacccccaggaaaggactgtatggggtttccagcaatccatatgcatttaaaaacccaatttacagtcagcctgcttggatgaatgataaccacaaagatcaaaataaaaaatggctatctgatgaactcgctggtaatgcagacagctggagagagttcaagcccggacctaggattcctgtcataagccgctcaaggaaggaatcctttcaggaaagtgacgatgcctacaggtggcaggaggggagaggctgcagagctgtgagaaggctgtttcagaaagacctcagcagcctagaagccatgtcagaaatggaagcaggaagtcctggtatgcctcaagtctctagactgtgtgtctgtgctattttcttcatccaaataagtgttgttcttttcagtcatgagccctttaatgtgagtgtgttagtgtttgcagtataattgcgcagcctcaacatatttcatgcattggaccatcacaagctccaaggcaggtgcagtactgtcccctaaaaactaagcagaaaagccaggctcattttactttagtaaacaccttatgggagaggaggagggtggccacttaacctcagagatcatactctaatttccatagtcggcattatttttgtgtacatgattttaattttaaaataggttcaacatgcacatgacagtataaaactgaaaatatttactgttaagacagagtataggctgtgtatattacaaagagggagggaggcaggagggatggagagaagtagtgacagggaaagaggaagttgtgggggaaaaaagaaaccaagtttccgtttaaccaaactaactggcacaggaccccgagtagttggaatacaagcttgacaacaaaatttgggaaatagaaatttagagaatcgtaatgcagagaaaagcagtgctgttccctttcagaagaatcaaaatctgctgctgcttcatgtagtcagggctagccttaactagattcacttgcttggacctcccagtgctaaaacttcatttctaatacattttttaatattgatacaaagtgattgtatttttccaaaatgtgcacatagatgttgtaataacaattatttgaaaaaaacaggaaaaagttatttctatctagtcagtatatttgctgaagtgaaataaagtcgtgagttggatggaaagcatgaaaactgtttatagtatgaaattagacttggaaaaattgcccccttttggagacagtgtctcactgtgtggtgccctggtgtggaatttgctctgtagaccagactggcttcacagtgatccttaatgctttttcttctgaattaaggtttaaaaggaccctgtctcaaaagaaaataaataaaataaaatgaaccgtagctttacaaatctttgagctcggcagactagaaaggctgttgtgtgggattctggggtgatgtggagccacatttttgtgagttgggcagctgcagtttggagaggatgcaattgtccagacttatttatgcagtgctggatgggagagtgggacagaaatcgaaactgaaattggggatgcatcctgtcaccctggccattacctcagtctgcaggacctggcatcctgacaagggaacagtgttcattggtggtttctgggctttggatttctctattacttcttaacgttttatgcagaccttaagtgtttctattatggcattcatgtaggtgtggacattgttacctatatttgtcttatggaaataaaaaattaagatatgtgtgtgttacatgcctgcaacccagaaagaactagggaggttaaggcgggagggtggaaggtttgagggcagcctagactacctagcaagtcattcaggaggtggagcaggagggtcaggagagctccctagtgagctctcagccagtctggattttgtgaataaaacaaaacaaaaattaaaaaaaagaaagggggaaggggggtactgacctaactaagtggctggggtactttaaatggtacttttaagataaggtgtaagccaggctgagaggtacaccgttagtcccagagtgcaagaggcagagaccgacagacagacttgtggatttgaggccaacctggtctacttagagatttccaggctaaccagggctacttaatgagaccttgtctaaaatcaccactactagtataataatgaattatagatcaatgttttacagctagaagtattaaaggaaccagttgtagagcaaaaacctcttctacatgttcttcctcagttttaggaatgactggaaaggtgtctcagcaggaagtacattggctctgtgtttacacttaatatttctgtatagagcagagtttcaggttgccaaatgaagaaattgatagtatcccttgaaaatcattataaaggaaaccttaagattttgtataagattgcatacaatagagaggagtttaatttgatgtgtaaatttgcagtgcgtggaaatggctctaagaaaaatcattaaagggaataaaatatcttaattttttccccttgggacagggtctcattgtgtagctctggtgggcctcaaattctgcatgtcgatgaggtcacctcacaccctgagtttcctctgcttctgcctctcttgttctgggagtaaagggtgcattaccctggcctgcgataataagtatcactcaaactgagaagatgtgataaaattatattaaagttgatttttaaagcttttaaaagacggttttgtttttctttttttcattttggcattattgtccctccctcaaccctcaaatgtccaaggttgtaggtgtaaagtcttgggggcaatgtcattaataggctggcaggaaatgtccattcaaatgtcctctgtgactggagtgatgttctatttgcaaataagatgtgaggacttggaacactcacagctgagggcatgatagcccatgtcagtagttaggggaccttcttgggctgttttgctgtccaagagctgctccagtgagcttttttcccaacttgtccctgcaggccttgacagccctgcctttccttaagtgtgccacagggggctgttcagggatttctcctcactttgcatcctggacagaacaaggctgtggtacctgccatatcttaaactgcattttacatctttattttgccttggccttgtacccttagacaagttactttgttctccgagagtggggtcaacctcagcattgatgtgggaagtgctacagggatcggaggaggtggggcacataaaagcattgcctttcttctgctatggaatcgggtggcagtgcttcctgtcacttcctgtcactcagcactttgtccagcactccctccccaaaagtcacagtgctctccatcctcttacctcattgccccagtgctgtggcaatagtgctgtactagtcacagcagttgattgctagtgtttgaagggggtttcaacaagctgaggatcggtcttagtgccagtgtgcatgatgggaacagtctgccatttagctaagttctccgtctggcaatgcagtctttatttttgtaagaatttatttacttattacctatctgtttattgtttttacgtgtacgtacatatgtacctgcatggatgcgtctgtgcaccatctgtgtgtagaagcctatggtggccagaagagaacatcaaatctcctggaactcaagtttacagatggttgtgagccttcttacctgctgagccatctctctagcccccacagtagcactctgtagaacttggagtcctgtacttccttttctacccagaattctttcctgcaattagccaatacattgcagttgctaagtcacgagtccctccgaaagctggagagagattgccttatgcaagacttcttcaaatccttaatttatggaaagccaatgaagacagtcccatttgtgtttaataagaattgttaaaatgttttactgctttgatttttgtgggcatgtgcatgtgtgggtgcctgcataacagaactcaggtcctctgcaggagctccttccactgagccatctcttcatctccttcatcagaattttagcttggaaataaatatcatttaagcccagcattacaattagcttccagtgtctttagaacccaactggagtgtcaaggctgctcaccacggtttttaaagtttagtctcaaaattgttatatgcttcatcgtttgaaacgttgttagcttgagtttattcagtcgttctgcagattgtagaactaatggggttcatgatacatttatttagggtagactctggctttaactgccagttgtgtttcctgtgctcagcctgtcactgatatgaggcaaaagctaaagtggggagctgtgtgtgctcagtaagtaaactttagcttgaagattttcctcttactgaaggaacctgaatttgtagctgaatgatttttttgaaccatataagaaaatgatcacagtttccaagttctctgggtacatacaatattgtccatttttcctgactcgggttctttaaaagaaaataaaaaattagatatgaatattttctattaaaacacaggtgtgtttacagtttggttggcagtatcatgtatgccccatatacatcaagtggcttagaagtacagttacaagtacagcctttagtgagagccttctgctgttgcatgaatgctcagcagtatagtatgggaggagataaaaatcaaatcctgtggaaaataggatcctttttaattgcagtggtttctgtggattggtgaatggagagctgtctccctctttgttcagtgttcaggtatcacttactatcattgaaataagttcacatgggcttggggtagagctcagggcctagcactcgccagcatggatgaggacctgggttcaatacctagtactatgcctaagtaaatggatgtataggaagaaagttataatacttcttactgagagcaatagttttcaacatcacccgtattgtcccctaacttaagaaaacaagaaacagcggtccagacctcgtaagccacggaggactagaacggaggacagtgagcaggatggagatctggacggtcctgtcatcgacgagtctgtcctttcaaccaaggagctgttgggcctccagcaggctgaggaacggctcaagagagactgcatcgacaggctgaaaagggtaacgtctttatggatatacttactacaccatctctaaacattactctacaccaagttagtaactgcagtatgtgcctcagggttaggctttaccatgtgtaaatccatatgccaagggataattagcatgacttaaactcaagagttactgccattgtatttaaataaaaatgactgtcaagcttggaagtaacagagaaactgattctggctgattttctctgaatgtttagagatctatctttctgtcaatcttttcaaactgtagcgaccacgaaactgcccgacagcaaagtatacctgcaaactgtgcgatgctttgattgactccattccgtttgctcataagcacatcaaggagaagaggcacaagaagaaccttaaggtgagtgggtctctggtgattgaaacaagtgaatgctttccgttaaaacacaggcatatttatggtttggttgaaaatgttatatatgtaccttatacctcaagtgtgttaggactgcagttgtgtctgccttcactgggagatttctgctgtttgcatgagtgcttagcggtgtaggtttttgtggttttccttaaatccattgtagaatgcttgtacactagtcagatgtgtttgtacacttgtgaatttccccaagtccagagttaggatgtaagaagccattggtgggaccttggtgttcttctgcagataagaaggcacctaatatctgtggttgctgtccatgttttctctgtattcctgcctgctccttagtatccatattaagtacatagagtgtgtgtgtgtatgtttgatagaatgaagaccacaatgtctaagataaagaaggctacaaagattcctgaaaattctgtagggtcctgtctcagtgagaagaacagctacacctgagtgactttaatcttaccattgatcttacaaggaaaagcaggaggaagaattgctcaccacactgcccccgccagcgccctcccagatacatgcagttggcagcgccattgacagagtggtgcaggagtttggtttacacagtgaaaacttggatcagagactagaaattaagcgtgtcatggaaagtgtgttccggcacaagctaccaggtatgttctagattcctttatctatttagcatctaaagagcctcatagttcagattgcttttacctaataagcattaacttatggcctggccacagggtgctgcctgtaaggcttatggagactgagggagaggcatccccgactgggattcctattgggaaccccaacagcaagaaccgtttttagtggaacttactgcttataataagttagagctatgtgtgcattctgacatcagaaagaaatgcttgtattagcttatggctatactgtaggttttaaacactctgtccttttcaggatacattatctgaattttaaaaattatgacagttttctacacaaaatatgagcttgatcacataggagtacttagtatgctccacagctcatggcaggagtggctggaggccagagaaaagcttaggaaatggctgtgcagtccttgtctgagtgcctgctctcagtgtgtcctgcttctgggtgggcacgcctttgacttttgagtatgccttcagtagcagtgtttacttcttatagctttggagagatttcactcctgtgactcccacctgcttacttctctccagactgttctcttaggctttatggatcctcctgtagccgactgggcttcagagactctgacgtgaacattgatgttcagtttccagctgtcgtaagtacaaaatgatctgctggacttcacactcacgaagaattctctcattgtttagcattcagacattttatatttatgtgcttgtgtgagctcatatgcccttgccccctgcccccgtgtgtatgtgtgtgtgcacgggcgtgccagatgtgtttaggtgcccgtaaaggccagcgagggtatcagatctcctggagcttgtgagccacctatgtgggtgctgagatctgaactctgggagagcaagtgctcttgactttttagcccatctttacttaagctgtttttattgagttcatgggcacatgtgtacagtttcagtcacctggcagactgcctgatcataggctatccaagcagttggtgatctggctccttatcagaaacacacagctcttagtgtccttatctattccgtccctctgaaaacggacctgatagccaccttcttagcagagtggcagaggccctcagggaggtcagggcaaggcttctagattggagaatgctcagaatttaatggctggtcagcaaacacactttaccatgttagcccctcaggatcacatggactgtgaggaagccaagcccttcgctgccgggttgtggctgtgctcctttctgagaacagcagctctgtccagctggggctgctcaatagaagcctgctgtggttcccactggcacaggcttttcaagggagtgtgcttgaggcttgtggtggctggctggtggtagcgagcggaagtctgttgaatgtgacttggaggtgaatgcattttgatagttaaagtatgacagtgacagttcttcctgagaattttcattttatgttttctgtcgtcagcttcagaattttaattttttactttataaattttcatgtttattttgctacagatcttccctacttgtaatgttggtttgctaaggatgtgaatcctgggaggattctatgtgtctatgaattcagaaagtttaaattcttttcataaaatcagccttcctataacaggaaaggaaggcaaatgttcaaatagtgtatttgtaatatttatactataatatatagtataatatttatatgttatatattatattgtatattatataatatgtaatatatttatatataaataatatatctataatgttgcaaataatatttataaatattcatgatctgtaaatctaattagctcccaagttccctttttatatcacaataataataataataataataattgatgggccagagagacagctcaggtgcttgcccccaaatctgatgacttgaattcaatccctgagtgtcacaaactgtcctctggccatatgtatgcctccccacatacacataatgaataaatgtaattaaagtaataacacttttcaaaaaaacaaccacacctaacttcaaatgatggaacacatctataagtccagtactagagagctggaggcaggaatagcagaatttcaaggctatcgtcagacaaagcacacgtcagtgaaacataaagtagggatctgtccacacaggagcaagggtgtgcgcacgcacacatacaccaggtatagaagcctacgttttggtgaaatatgattcccaacaacatagataagtcagaactttaaagccagaagaaacttagattagccctttacccactctgcttctatgctcagtttagttatttgttataagtttagattctgaggccaggcatggtagtgcatgcctctgatcctagaggtagactagtttgagaccagcctagtctatataatgaagttccaggtcagccagggctacatagtgagatcctgtctttgaaacaacaaacagattctgaggttggattccttgatgttcttgttcatagcctctccttccttcctgtgcttaattctgtagctccctggttaggtaacccacggactttactgtttcttaaagaatttaattttagagtgtgtgtatgtgtgtgtgtgttcatgtgggtatctgcacatgggtgcaggtgtgccttcagaggccagagtctccccagaagctggtatgacaagtgattgttaaatgtcccatgtgggtgctgggaactaagctcgtgtcctctgggaaacagtatgtgttcttacatttccagctccaatcttaatattattttaagtttcaaattttgatgtgatttaccagagtaaatttttagcagttattttgatctggtgtcattcatgcagcaaattttcactaagcccctgctgtatataggctctattctaggtgataaaggacaagataggcctggctctctggtggcacttataagctagtaattatattgtaagctattaactatagtgagcttctcagagaaacacagctgagtgacaagctctgagcatagacttagcttcctcaaagagggcacacacatttccacagaactctgcttaggatgtggagacctggaccagttagttgtacagattcttgaaggcaatgtcgtaagaatttgactttgtcctaacaagagtaagaattttaaggacccttgatttgggagggtgactcctacctatagtcaaagcatttgggaggcagtggtaggaggattactgtgagtttgatgccagcctcagctatagagccagaccctatatccaaaaaccaaaaggctagggggatggttcagcagttatctgtgcttgttccttttccagagcatgttagtttggctccgggctctcacagcacatggcttacaacctcctgtaactcctgttctggggttttgacaccctcttctgatctcttctgtgactcacacacacaaataaaaataaatctataaataaaacacttcaataacaaaagaaacatttaagaatccattatataattttaaagggttttggtccaatgtggaacggagttttgaaaagagagatgttgattttagaaccatgtagctttttgttgctacagtgtttcagagtgagaggaacattgttgcactagaacaccttccaaccaccattaggacagctaaggggtcactacctcaagagtaagttgtacacagttactttgtctcaagtcctttgaccgggcatgcatcctcacgtgttctttgttggccttacacaggctagtgactactgtcttcacctgtagcaatgtgcatttcttatttggaaagcaatttggggaacttcagactgtattataaccagaaaaacaaaattgcttagggattatttcatgtattcattcatttatttcctagatgtctcagccagatgtcctcttacttgttcaagaatgtttaaagaacagtggtaaggccaaattcttccacattttgcttctgattttgtcttctgtctataaattttaatatatcttactaccaaactgaaagtagaaaattcacttataaaaattacttatgggtaaaatccaaagcaaaaataaaagtaagtgcccttgaattatttactagagtccagctaacactcccaggaacaccagtcggacagctgttagtttggcagcatgtaggattaatgagccctggactgtgagtgaaaaatgcaaaatatgtgatatttattcttaggagtacattcatagtaatctgctctattgatggtttaaatcaatgttacacatgttaaataggtgggccctgccctgattaatgacctcaaagacggttgctcccgagtgggcccatcagctgtcttgtacaatacagtatcccttggggcttattgccttttctcagtagctaggcctcaaaccgctcctttccttgagttaggcagtcttagtctttctctttgggtatgagaaacacttaaacattcatcttgtttcagccaatacatatttgacactatgatttagtagcttttacatccatctgtttttagtctcctgtgcacattcctaattatgttgtccacatagcatttaaatactgcatctgcactgcagtcatttctgatcagacactaactagctctgaaaaatgaggacactgtctgtgatgattgggttcttggacacagtgttctctccttctaagtcacctgagggctgtgtgtggtaatggcctctcagacccacagcagtgcttaggctttcctaggtctgctttacagagaggttttaactaacttgtttgatcatgttttcctctttcctcagactcctttattgatgttgatgctgatttccatgcccgggtccctgtggtggtgtgcagagataagcaaaggtttctgtgtctttaagctactattttatgtgatttatttgggctttttgagataaggtctaattaaccatgataacccagaatggccttgcatttgccatgtaacccaggacgggggtcagcttgtggcagtgtgccactgctgtgctgaggtcacagggataaacaccagcttcttagattgccaaaatcacaaatactttgttaaatccctgtaagagtcttaacttacagaattataggttccttgtctgattaccacttgtacctctccctggccatttgcctatactttcattgtaagaagaaagggaaaatcaagtgctggaagtgtctgcacacatttcagctagactggaagtagccagggggaacagcagcttcccgtaagcgcttcctgtgccgttgttgtttgtaaggttgtggcacctgagatagtactggggaggccccacaggtgcagctcttttcccttggaaagctgttactaccactgagtaggagcttcgtaggctctgctgactcgtcattaagcaaatccctttgacttgggagaaaacattatacccttggtatgagcagagcagacctttgataatttttatccctgtgttctttccaaaatatttttaatatttgaaaacatacagtcctagttctgacaaacaagtctattcaaaaatagttgcctttaaaaaaaaagttcagtttcagggctggagaagagcactggctgctcttgcagaggtgctcggtttgattcccagcacccacttagtgcctcacaaccacccgggcctccagttccagggatcaggtagcctcttctgaccttctaggggtctatgcatgcacatggtacacagcatactaacattcaggcgaaacagtcacacacaaaataagtaaatcttgtttaaaatccgacatcttaggtgaagctactcgtgaacttaaggtctttccgtctaggttttattattgaaatgaactttctgatgtagaagactgatccctaactaacatgttttctttctttccctcccatcctccccttccccactagcggccttctttgtaaagtaagtgcaggaaacgaaaacgcttggctgaccacaaagcacctaacagctcttggaaaactagagccaaggctggttcctctggtgattgcattcagatactgggcaaaggtaaggttggggcgggggtggtgctgctgcttctgcttctccttttccttctctctccccttccctctcccccagcctccccctccccacccccttcctcttcctcctcctccttgttcttgatttgtgtttgtttgtatttttgttgggtttgttttgctttggcagtgctggctggcctggaactcactacatagatcaggctccagctatcttctgtttttgcctcctgtttgctgagattacagatgtgtgccaccatgccttgaaccagatgtgtatttataggcataaatagagtagatgtcagactattggattagaaactaataaacacagaaaggaaggtcagagtttctatttagtgtaacattattattcagaagataaaatgaactataatgtttattaaaaatcaagtttggactgggcaatgctgttgcatgcctttaatcccagcacttgggaggcagaggcaggtgaatttctgagttccgaggccagcctggtctacaaagtgagttccaggacagccagggctacacagagaaaccctgtcttgaaaacaaaaagaaaaaaagtcaagtttgggtcgaatcttatggaatatgacctaagaagttgtttttgagggtctttgtgggacatggtaatatttgagataagtcttcttataccattttcagtgacaaaggcagagacttcagaaagacaaaaggtattgtcattgtctcacagttccctagtgttctacatacgttgttgttttgcagtgttagagtcccaaatgaagatgatttcacggtgatgcaattgacagctggccaggtattagcacacatccccagcactgaggaggctgagacaagaagctctcaagctccaggacagcctgagttagtgcatagcaagatcctgtctcaaacatagccacagcacggaagcatcagttcaaaacagggcttcctagctaacgctcatactgattcaggcaaagctgtgctagaaggttccagtgctagggtctgggatgaacaggattccctggttttaacctgatgaatcagaaaaaccgtacagaagccagggatatggctcagtggcagagagttttctaggacattgaggttatagttttagtacctagcaaccccctaactaatatcattaatgtgcttttgtttttttgtttttgttttttgttttttgtagctttgtagtattgatcgccccgaagaaggaggcctgccaccatatgtgtttgctctgatggctgttttcttccttcagcaaagaaaagaacctctcttgccagtttatctaggatcatgggtatgacaatttctagttgtatctgatagttactttattaaattccttatgcaaatatctaaacacttaaccaaacctgaagtatttagttattctaccatactttcattactgaaatattagtgtttgattacaatgttatcctatacatggataataatatttttaaagattttacttattttatgaatatgaatgcactgtcactctcttcagagtgacaccggaagagtgcatcagattgcattacagatggttgtgagccaccatgtgactgagttacactgtcgcccatgctgtctcaaacacctgggttgagcacaccatcttgtctgaggcttcagagtttctaggacgacagcattttttatctctggcctcctctatagcctataaaaccaaaagaaacagaatctgatcatagcctgaatcgtgatgtgcagagcatccccgtcactcctttagtgacgtctgggttacatttatgactatcatctttagcaacataacacttgtctaacctgtgggtacaggcctcttaagtcaactatgcaggaggctgaggcaggaggactacagggcaaaactgatctgggctagagtgagttcaaagccaggtattaccctagggacctagtgagatcctgccttgaaaaatagtttgaaaaatgcaaaggtgaggctgaggatgcggttgaatgttgagctcctgcctgacgagcccccgaattcacacactgacagtgagaatggtggtgtaaagatctccacgccagtgcgatggaacaaacccataattttaacactctggaggctgaggcaagattgcctgggatggatggatagagcaaaatcaccttccattaaaaaaaaaaacaaaaaaaaaaaaaagaaaaaaagtgctctaagcaggtacttcatgaaggaggtgttacatcctgctacttgctaacaaaattaattacctgataaagcaagcaaaactgtcattcttttgttttgtcaaagcataaaggatccaaaatcttcacgttgtaaaacagtgtttatagtgtctagaatgcaatttttaaaaattgttcactatataaaagtcaaggttcctggaccaagagctggttcctgggtgagagttggctttggttgctgcagtggcacacctgagagatcaatataaagaaacgtgcttttttgtgtgctcatggtttcattctatattgtcttggctattattcattggccttgaataaccctatgtgtatgtcattgcagtaggaacatttatcataaaagacttttcacctcagagtagccacaagccgagaaagagaggtagggttgtgctgtagagatactctggttgttaaagcttaagcatgaggacccaagtcaagtttaaaaatcactaaactttttaagttctaaaactttttgctgtttgaagaccattgttaaggactgaggattggtcagtgtggtcgagccctttcctggattcacaaaagaagaaaaatcacaaagaccaaaaataaagcactggcttcaagaacactgaaggcatgcatctaaccgagacagtgccacgccctgtcttccatagtgcttttgggagaattgttagggaacgctgacctggagccattctgggtgctaggttagagcaagagaagagcgcagcctgtgatgcactggaatggcagggattagggaggccctgggaaggactgaggagagcatgagctctcacacttcagtaggaatgctgttagccacgtcaccgactcatgaccactgcccatagatgtatgttcaggagcccatcccacagtgtaatatgtttattaacttgttgagttaggtgcgatgagtatgctgtcaacttgacagagtccagacttgcctgggagacaagcctgtaggctgatgtaggctgatgggcttctcttcaggtcaaggtgggtcaagagaaaagctttctttccttccctgttttggtagtttggtttggttttgtgtgtttgtttccagttttgtgaagggtctcaggcatgataggtaagaaagtaccctgctgctaagctcaaccccaagatactgaaaacttactttgtagagtcatcgtgccttttgcaggtcactctgaaaacagactataggtatcaaatctcaaagatgtttggtgagctgtttatatttcttcttactataatgttactcattattgtgtctggccatatgcacatgtatagcacacatgtggaagtcagagaacagctccttggttgcacttagagattggactgaggtcatcgggcctacatcagacagcaagtgctcttgcctgcccactgtctgccatcccctcttacgtcagtgaagtatagatagcgcgtgttgtttctatccctaccaacagttcttttctctttggttttttgagactgggtttctgtatagctctggctatcctggaacttgctctgtagtccaggctagccctgaactcacagaaatctgtctgcctctgcctcccaagtgctgggattaaaggcgtgcactgccactgctaagttcctaccagcatcttaatgctctggttgtcacacaattgtttgtgctttatagtaagatatgtctaattgttttttgttttgttttgtttttttctagattgaagaattctcattaaataaattagggaatttcagccttaaagatgttgagaaagactctgtggtctgggaatacactgacaacagcacaggggacaccagctcagcaaaagaggaggcacccaaagagactgcagcaaagaagggacaggtctgtgcgttcctctctggtcatacactgaccttcccatcggactccagctgtggcgcttacgcattgctccgtctccctgtggctctcttccctgtgcttctgtctacatttgttggaattttgggtctcacttggcttcccaggctcactctggagcttattatgtagcccacggtggtctgagctcgtgcagtcttccagcctcagcctctggaagtcctgggattgtggccatgaactggctctgtcttaagtgtttttgagtatagtgttagttaattgtacaaaggcatgggttgtattacacacagcatttctctgcatgattgtaatgtgctttgaccttgtttagtcctctgttccccttctttggcccacctgtcccctacccctgttccttgtccctgttcctactagaccctttttaactgctgtgccttagtctgcccttccattctgcatatgagacaaaatatgggttgttcatgtctgtgagactaacttattttaatgtggtaatgtttacttgcgtacattttcatgcaagcaccataatttcctctttatgggcaaatacaattccattttatatagagaccatacattcttcatccatgttcctagactgactctttagcatgactggtgtgagtagagtggtaagctgggtgccggtcttctctgtggtgagctgactgttactgggctggggctggttcatgcttgccccagtttacccattaaggagtccacacactgatgcactagctcatgacattccattttcttttctatgcagcctcttgagtaaacaggcaatgaaacaagttgaaaacttgcagtcaccatttacttacatggcttcttctgtaggtagaggcctcttaaagatactgagtagagtccttacatgggcaatgactgccataaatccttctaggactgagattcatggttctaagcccactgcacattaacaggtcatgccccctctggttcctggcttattcatgcctcagatgagactgtggtgaacttcggactcctgaaactggggaagataagggagatgccctgaccctgatgactctacatagcaccattctgttttctgtgtgggttttggttgtgggcagcagcccagcctcttagacagtgtgtgtaaatttgtgtcccagctctgactttgtagctctgtgtccttgggcaggtcacttattctttctaggtcccggcttcctcttggtgcccagcatcattgattcctaagtgtctaacttagtgccaggcatgtgatgagcactctcaaaactagccgctatttactttactagaaaagaatgctctcctctttgaaaagaaaggtcagagccagtggtgtttgaaggttctgaagttccttgctatgatgcattgaagacatttcaatgagagacttaaaagtccttcataagactacaaatgactgtggataaagaggtaaaattcagcaagattcttgggttcccatgtccttggttacagtgtgtgggaccaagaacatgtctattcccctcaggggtctcagcactgcctgcagtccaccacaggactcaggattggcagaatccataggcctgagatttactaattgagtgtcacacctcttattctggtgtggtgttagaagtgtaattgtagataaatttataaactttggatggaaaaatgttttattcattgtgattagagaataatgtgaagaaaaagtcgttgctatgtgtccatttaatactttacttcaaagtgttatttggagtggttaagcaacctctagaacatacttaatgtgagagtggtgctgtgttaattaagctctgctgcctcttcctgctggagccctgtcagctacaaatacaaacgttctcagactttcagttccccctgtagcacttgggagtttagagccgagtgacctctaaagcatcttacaggtgtcacgttgtgtttcagtgatgtttgcttttcttcaaaagatagtacctgagaaaaagggcagagagcaaccacgtctgccagctgctttcccttggttctgatttaatcctcatcactgtcctgtgttataggtgtatcatccctactctgcagataatgatagcgaccattttttgaacactgtctgccaggcactgtgctaagcactttacagacactatctcactcagtcctcccaacagccctatgaggtgggtactgttatccccattttccaggtgaggaatccaagtcttagacaccttatagaccgtgaccaagctcatcacagctagtacctggcagagtgtgagtctgaaactaaactcgtcacacagccgttatcctgcccatgctgctgatcatagagaggagaaactaagttgcagagagcaggaaagagctgtgagctgactgagtcatactgggacctttcccccgctcctgctgtcttaagtcctatgtactttcattatgtcacatctgttattggaacttgtcaaacgtctgtgattgacaaactagtgtcaatttctgatatcagctattatttgactttagaattaagtggcgcttggcaggtttagtgtgttggggcagtgacagtgagtttccttctcctccctgccttagcagtactgggctgtggatatccacacctgaggaggtgccttcagcagcagcaatgcttcagccttctcaggggcctctccacctgctgagacctcacagttagctgtgctgtccggctacatgacacggtcctgtcctctcctgtggtgaaattcctgggataatggctgaatgttagcatgctcgaatcccagggtgcagtgcagtgctgttcacccctgaccaaatagaacttacaattagattatctagatggattgtcaagctcacggttttccagagtcttcatatttttcatataggtttgactgatcttgcacttgtcaggctgagctgctgtatgggttaacctctgtattccttgtcatccataggtgccattgacatttaatataaagcatcagccttcagtgccagtcgggcaactctgggtggaattgctgcggttctatgctttagagtttaatctggctgatttagtgatcagtattcgtgtcaaagaattaatatcacgggaatcaaaggactggcccaaaaagcgtatcgcaattgaaggtaataatgttggataactttgacgtggtgccagtctaacagcccacttctgtcacattctcttccagttcctagcagaggtaggcctggtctgaaggtaaaatagacactggtgcctcttgcatgcggtgcactggggtgagggacagcgggcttacttaccccaaggtaaagggtcttagttaccaagtgactggctacaggcacccgagtccctgctttgtaagttgctctcccagcttccctgtgacctgtgggttcttactccctcttcctaccatccccactcttgtgtttgagattctatcgtctcaggaatcccttttgagctttagttttgcaaagatgaatgaaatactttttcatgtgaaaaatgctgttcttagggttggttgactgcagtagaggaaacagagctattttcaaagcagaaagcagtcatttctgcatagaaaacactttgtagtgaaagctgtcactttgcagagtcagctgtcaggtactggtggccctgttagtgtcattgaatggacgagctcctctcagctttgcaaagtcaggaggttggaaccttctagaaatcttagctctcctcctttaacttaagaacaacagcaaaactcctacatggaaatctcagttttgcttggtttttttttttttcaagttttatgttgcataagatttttttttctttttgcataaattctgtgtgcagtcatggggaaatctcacatttttaaaccctcccctgcagtttctctggctcagctcttctggccaattgcctaacctgctggagttctaggggaggagaaaagattgagagaagtggtgtctcctcctggtgcctccctctcgcccctgaaactcaggccagccacttcagtgatggggcctcccagggcggaagagtggaggtaagcttgccacactgcagggctggcggagcgaggtccagagcgctcacttgctcagccgcaagcctgtctgtcagaagctcctgagttccccacagctcaggagccacactgacaacatctttcctacctccagtcactgagcagctagggaaggggcatcagttccctgagactccgaagcgttgctttcagctcctaactgctgccccactcctacctgggttgtttttgtaaagtgtttaaagcatgtaagatgcatgatccactctactgttggtgttacctgctttatcttggaaaatctagttttaagcatgatgaaacagaaatgtatgaagtggtggctttcttttttctctctctctttttgttgcagacccctattctgttaaaagaaatgtggcaaggaccctgaataaccagcctgtgtttgagtatatactccattgtttgaggacaacatataaatatttcgctcttccacacaaagttacaaaacccaacctcacaaagcctcctagcccagtcacctgtgtttcagacccttacagagaagcaaaaaatggtggcccagaaccccaagcaacaaatattgataaactgggaaatgcagctgtggctcaagatcctggtgttcaaacctcaggtgactgcagagcacagctagttactcttaagaataccactgaggaggtgggaagcccagcaaaggagaagacaggaggtgtgcacatcccagcccaccaggagagctctggctgtgtccaggcagaggtcagttgtgagggtttggaggatgccacagcagagcttccggaaacaggaagtgacaacgaggaagtcagaaggaagaccaagcatcctttgagcactgatgaccaaggtttaagcagcagcaagcacccagaactgcagaactgtggcagcctgtgtggtctgcaggcagacaacactctggagttagtagctgaagagtgtaatagctgtgcctctttggacaacaaggctgaggtcaatgaagagaggatagaaggcgctgaggaactagaagaagcagcagctctgagttgcttttccccttcagtacagagtcgcacatctgcagccatgcactttgatgatgaggaggaggaggaggaagaagaggaggaagaggagcccaggctcagcattaaccttacagaagatgaggagggggttgctaatgagcatcaggtggacagcaggtatgctgggtcaggtgaggaggatgccctctctgaagaagatgacttggcagagcctgctaagggtgaagatacaggagaatgtggagaaaacgtgggtgggactctgctcatagacctaaatagaataacacttaaagaagaaagctttcctgaggaagatttacctggggaccagtctgagttcttctacgaatttagaaaactgaccttcaccaaaggcaaggtaattgttactaatagactctaataactccagtggatagtgtttctagttttctctctgtcacctgtgagcaattggcagtgtgctattgcatggatatgaagtctgaggccaacttgaggaagtcagttttctctttttctttcttttctttctgtgggtcccaggaattgaactgaggtctccaggcttggcaccaagtgccatttaccaactgagctacttgtcagccctgatttcagtttctatgaactggaccagtagcttcccgtttggtgtggtttaacccatttctgttcgtgcgctgtgattcctgtccctcctgatggggatgttcatagacgacagacagttcgcttcccattgccgtccccagagtagcatgtcccatctcaggccctcagagtagctttgttttagcctatatgtgtagatgtgtagatgtgcaaagattcacagtcactcatgttttggttcaccatctccctgcagtcccccacagtagtgtgcagcttgtgtaagcgagaaggtcacctaaagaaggactgtcctgaggacttcaagagggtccagctggagccgttgccacccctgacacccaagttctcaaacatcttagatcaagtctgcgtccagtgttacagtaagtgttctgtgttcacctgatgcgccacagtgggtgacactcaggagtcatcagaggtgctgccagcctcacagttagtactctgaggattgcagacagtgtgttgtgagcataggcacctaccacccctcccccagctcctcctacagccactccctctcctcaccctaaccgactgaatccaggccttgctgcaggtagactcatggatgtgggggccatccactgtcagctccccaccccatcccccatgctagaatagtgacaggcttggtcttgcaggcagcttcagctgctgtgtgagtgcatgagagcagcagtcctcttgtgcctaataccccttggccccaggctctcaggccatagggatgctcccttttctgtgatggtgtctctacctggagggaaagaatactttgaacagcccgcatgcaagctctttagggaacatccatttgaggaagcactggtgctcagagaagtttcatttctatttctgaagaggcctgctgctgcttagcctggatgtgctcagggcccctccctgactggtacttaagctccctgccccccaggaggctccctccctgaagctgccatcaaaattgcctcctggatcctgggattacaggcaggcaccatcatgtccaacctaatccctcctaccctctcttcctactagggtctccctctgttactgaatttttgggtccaaacaacctgcctctgcctcagcctcccaaatattcaggacatatactactgtgtttagctactattgacatttttcgttttattaagctttttcagatgttaaggaagaaaactgggcttcccattaaaaacagaataacccacagacacctctgctccctttctagaggatcctgacagccagggctagagcccttgccccagttggtttccatttcaagagcagttcttggggttagactcatttgaggcagggtgttctgtgtgtccctggctggcttggacctcacagtgatgccctcctctgcctcccagtgctgggattacacctgtgttccacaggattgggacaggtgctatttgtttttattgctagcactgtctgttgagaaggataaaaatctggtttttgaagcttgtaagttttctttttctaaaaactatattttgtttttagcttttttgagaaatgtcaacttttaaagccactcccctactcattatacctatctgtttttaaacagaggatttttctccaactattgtagaagatcaggctcgtgaacatatccggcaaaatctagaaagtttcataaaacaggattttccaggtaaataattttttttttcctctttaggaaaagaaaggtaacatacgtattccaggcatattaacttcacagcttacctaattaccaataggaagatggcagtgtgggatcacccaggccataagaggtgaattcactggggactgcagttaagtcatgcacacttacaggagcaggagaagtggcttgcagacactctgacctctgagtgtgtgcacttgtgtattgagccacacacaaaggtaaaaaccaatcttctaaagtacgtaggaagcattgctcttagagtatgaaatgtcataggatggcctacatctttcctcgaaacatccttgcattttggcataaagtgatgtccactattctttcatgtcatatacagctgtgtatttaagtaaactaagggaatcattaagaatcaatgtgtagtgaaaaagatgctgaggcaggcaagatggctcaacagataaatgaccttcctgccaagcctggtccctgacttcaccgctcagataatggaaggaaaacccaactcctgcatgtttatgttgtcctctgacctccttatgcacacatgctgacacaataaataaataagtgaataattgttataaaatatttgaagaccttaattacaagaggatagttagcaattggtattttggattcatgaaagggccattttttaaataaaaactaattacatgtactcaggtaatgagctattacttgtcatctgtccctaacaggaactaaattgagcttgtttggctcctccaaaaatggatttgggttcaaacagagtgaccttgacgtctgtatgacgattaacggacatgagactgctgaggtacggttgccacgtgaacacacatgtgctgtgagcatgtggttagcgccgtcctcactggcagaactgcgaggcatctggaatgtacggggcattccacatgcagtgcaccaggaagcacagcctctggcttctgcgctgacattcttggagggggtgtgaagagtagaacaaagctctggctgggcatgggtggtgcacacctgtggtcccagctcctgggagcctcatgaaggaggtttgctagaagttcaaggtcagcctgggctgcctagcaagagcctgtctcaccaaaaaaacaacacacacacatacacacagagactggatagctttaaaggggcttttccagtgtagtacagattggactagattccgtgaagctagaccaccttcaccagtgcccattggcttggctactagaccagtacacctacctatcccccgttacctgtgatgtcggtttgcttgtccgtggtgagtattagctttatagctcaggacctgcatttgagacaaacttggtcttactagcaccaaaacatgtgtcctttggtagataacagaaggaataatttctgttcccttctgctttgagaaattctgtaattgggtggctttgatcgtgtgtatcaggaggcagcagagaggagactttgttaagatgcagctcagagcctgcttgtgggggtgggggtgatttgttcctctctccctgaagacagacttgtctgcaactctgttcctcctgcctcagcctgaggcctgagcctgtggcgtgtgccctcaggacactctttgctgcctgtttttacagttttattagcacagtgccacacccagacttggatgtgttctctgaggctgctttctttctgataacaaagtctggaaagtgctggagacaggatccagtatcttgtgcatgccaggtgggggccatccttccagccacacctgtcactgagggacacttcagaagcagtgctggtggagacactgttgactcagtggctgactacactgccactgctcagggactctcatggctttgttctgaatctgtattctgatggtgttcctgacttcaggagaatagtcaaaccagggtctacctgggatttgctgaatggtgtggggtgagattaagtctaccataaggagtaacccactatatcccctcaaagttgatcctcattaatgtggtttataaactacctttgacagtatttctaaagtaaaattctgaataggttgtagggtctgtgtaaccatcaggatttactccagtggggatgacagccatactttaacatgccaaggcacaatgctatgtgcttgtatcccaaaacaaaggggacataggcaagagggctttgaatctgaggtcagactgggcgcagacgctttggtctgaaaaacagcaaaaataccattccaaattgctgcatgacttcaattttagctagtcctagcaggaagtagactgagttagaccactctccacagcaggccatgagatcttagttaaactgtgtatagatatagttgcgtgcagcatagatgagacagcacagacgcttctcttgcatgccatacctacggtactcttccaagggaggtaactacctaggggagtgggggagagtcaatgtcttcatggtttaaagacctttctggaagctcctatttggtcttttgttgtacatccaaagcaattaaggtatgtttggaggcttgcatatccttagggtgttttgtatgtgtggtaactgacactcacctgaaaggaaaataaacccatctgaagttgggcagatggtggcacagtaggtaaaagtgcttttagtgccgccctgatgactggagttccatgcctgaatcccacagtggaagaagaaataattcctcaaggtagttttctgaccaccttgcatgctgtctttcacacatataatgtcctgacacatgtccccacacccattcatacacacacactaaagaaaaagattggaaattaatctcactgtctctgaaggcaatagaagtacgcaaagtgtactgttactgttttgttttatgcctgacccagaacctcacaagctcgccaagcacgctagtactgagctacagagccagagtccttagtcttacgaggtcacccatgctggctttgaacttcctttgcagcccaggacagccctttaagaggtgactgtcttgctcagcctccagaatagctaagatgacaggtgtgtgccaacagtcccagcttgcttcctgatttcttttccgttgttgtgcctttcctgcaggggctggactgtgtaagaactattgaggagctggctcgagtcctcagaaagcactcaggtacttccatacctgtcctaaagtacttctttctttttctttactgttttatatatgtagaatttattcctgccaatgaggaagtgcgctgggttatttacaaatatgtgcaatattggtgtcattaaaatgttctatagtctgatatagaaaaagattgctagtaatgcttatgtgttggtgctagctgttgggtctcagtagaaagcatattcaaggcaggtgaggtatttaagtcatcttgatctcttttaatcacaaatctagaagactgttgtaggtgatttctgaagtgtttagagctataaaaaggggtagatcctgcaaatgatgtacagacctaaaatgttcttacaaaatagtgtaggtgaatgtttgtttgcttgcttgcttgtctctctgtagctggggatagaatctgaggccttgcccatcagatgcaagtgctctaccactgaactacagccccagccctgtcttaaacatgtagagtgggctagcctcaaacttactctgtaactgaggctggtcttgatctgcttacctctactccagttctgggattatagatgtgcagcctcatgcctggctctgtttgccaggtgagttggctacatgattaattggttttagatggctttgtttgtttgtttttgaaatgtggtctcaagtgaactggccttgaactcataactcttgcctcggcctcctgagtatgtaggattgcaggtgtaagccacaactcttgacaaaatactttctttaaacatgaatttcttaatcttttatattgagatcaaagtattacaatacagcctctgttcttatgaacaacacttgtgggtgtgcacatacacagtggtacagtttactttgtattttgacaaggtattgtcctcaaatgagaatccatctctaaagataagttttgtgtggcttctcgggttatacaaagaaactgaagttgcaaggttagatagtgcttaggttttagttctgagctgggctttgatgtttattgtaactcactcttgcttgctctgggtctctttctgggtcatttgagacatattgttcctttcctaagcattctccatgtatacttcgtaaggacaaaccatgttcactggttgtagaacagaaatgactctgtatagtcatttatataaggaattataagataggaatggaatgtaaattacacaaagaattaaatagcagctagaaggctccacttaaaacctaatgccattagaagcagtcagtctagctatggcattaaatgcctgcctcataataattaggaatataattaggccaacagaaaagttaaaaggcctgtgtctccttttattggagtggatagacagaaggctttgggattataaattggagccagggggacatgcaagggctaggtcttcaaggaaggcttgtgagtgtcaaatgagatctaccatagtagattccttaaagggaagaggagtggagtgtgtatggaggttctggattccaaagatcccacttcttctgtgccatgtgaacttgggcttgttggtttattttacatttcccttccgctgcctctgcccgttcttctctaaatctcatctagacttgagcactgtcatctgtggagtcagcagaataggcagatgaccgctagtcaccatgcacacagtgaggttggagctgcctggctccacagcttactgcttgcatgtgcctgagtgacacctgaggtctgttccccctcatgcaaggtgaagttgagagtctggttgtgaagggtcctctgaaagtccccattacactcgggcctgcagggattgagagcactgtctttccattcacatacctgttcctccatctctatgttctcaggccaccatgacagtccatcaggtgtggtcaccctgcctccatccctgtttctggcctactgttggtccttgattctccagtacttatgccctcactggcttctttctcctcaaggataattcctctgtttctctcctgttctcctcaagtccattctctagcctacatagtgtcatggaagggccctcaagcctttttgttcaactatccttgtcttgtaaatggcctccacctccactgtctccacatgttccttttcaaagtgtagctcagacagtctccttacctgcaaagttaattccttccttttccatccattgcttctagctctgtggtgactactgtgtcaggcattgagatgatgctccatgggctgtcagtcagtcagacagacagggaagggaactcatgcatgcaagctccagtagttcctgtgtggacccggaccccctgcatatacacttgcatgttctcattaaccagttggtttgtggaggacagtggacttcttggttctaattcaaatatccatgtgtataacagatacctactttgccaggggtcttcctagttacttagttacaattgtttggctagttgtaatgaatacagctaggcagctgaagttaggtcttgtttccctcccaagttgtgtttaatcatgcatctttcttccctcttagggttgaggaatatccttcctatcacaacagccaaggtgcccatcgtgaagttcttccatctaagaagtggtctggaagtggacatcagcttgtataacacactggtaagatttccttggacttggccaacctgtctttcattcattttttaaagagttccaatgagtagcctagcctactctgccatgtcatgaatctcctgttttggttctatggatccccgccccccttttctttttttcttgtttacttccttcaatccttcctttctcccatccagtcctttttttttttttttttttttttttttttttggtgggggagggagtgggggtgagctcatggggaccttgagctgctgctgctctggctccaccctgcaagcaagtgctaagattacaagcacattctattaggcattttcttaaggctgtaaagaggaatgagtgtctctttaaataagtaaatgagccacatgtggtggtacaggccattgatctcagctcttgggaggcagtgcagaggcaggtggatgtctgtgagttggaggctgtcctggtctataaaatgagtccagaacagccagggctattacacagagaaacactgtctcgaaaaatagaacaaaaaagtaactaagggaaatgagacattccattttgtctgtcttatccctgtccttttggttgctcagttttatccccaaatggctaagcagctctctgctcttgttttatttactctttgggaattgtctgagtggttggtgtgtgccttgtagtgttctgaggctggggctatggagaattcagtagctgttcccatccacgtgggctaagagtgtagtgcagtggtaggttatttgcctagcattccatcccagtgcatgccaagccagtatgtcagtagggtgtgagaatgtgtatgtatgcatgtgagagaaagtgtgtgtatgcatgtgggagtgtgtatgtgtgtgtatgtgagtaagagagtgtgagagagaatgtgtgagaatgtgtgtgagagtgtgtatgagtgagagagtgtatgagtatgtgagaatttgtatatgtgagagagtgtgtgtatgcgtgtgagaatgtgtgtgagagtgtgtatgtgtgtatgtgagagtgtgaatgtgagagtatgtatgtacatatgagtaagaatatgtaagtgtgtatgtatgagaatgtgagtatgtgtatgcatgtgagtgtctgtgagagtgtatgtgcatgcttgtgagagtgtatgtgtatgtgagtgagagagtgtgagagtgagagtgtgcgtgcatgtgagaatatgtgtgtatgtacatatgagtaagagaaagtgtttgtgtgcttgtttgagctcatgcacttgtgaagattcacttcagataaagtcagagcttgtctgcttggcttgaacctgcctgtgatttggtgtgcacgctggggtccttcttttggcctcacacctggctgctctgaggcccgatgggacctgggagcatttcacacaaatgatgccgctgtgaaggggagagagagtcttatatctacttaaagaaaacttactttattttactgttttatcttattccattaggtttcactgtcttggtttttgagacaggacctctcatgctgacaatgatcttaaacttctcatccttctgcctccatctccaaagtgctaggatgacagacctagtagcatgcttgtttattttaatggctttttgttgttgttgttgttgttgttgttgttgttggttactattcagactaaagatttattcatgaaatcagaagttacatgtatgtgtcattatctcttagattaatacagcttatctcagaaactgtcctacagtttgagcctttccaggtcgcagtgtttgcgtcagtgagagcctcatggcctgttctccctttcaacaggcgcttcataacacaaggctcttgtctgcatactcagccattgaccccagagtgaagtatctgtgctacaccatgaaagtgttcacaaaggtaggtacattgatgcatgtggtttatctggaaattgctgtatggaccaggctggcttcaaactcacagagaccatcctgcctcctaagtgtatgcgccacaatgcctgaccttagtgtgttaacttttcatgatgctcctgctatgaccgacaatccacttctttgttgaattcagtttaattcaggttggggtggttgcttttgttgacatatttttattttttaagatatggttttcatattagttcctcaagaagtggtggtaatggggtgactgcaagctgagtagaaacacccttcagagtgctctctccctctagatgtgtgacatcggtgacgcgtccagaggcagcttgtcatcctacgcttacactcttatggtgctatacttcctccagcaaaggtctccacctgtcatccccgtgcttcaagaggtaggtgcccacgggagatggtctaagccagcctctgcttctgctaatatgttattggtcagtactgacatcttgtaacttttcctggacattttggtatcaacattttaatttttcattctgtaataatacttttaaaattaatttcagatatacaaaggtgaaaagaaaccagaaatacttgttgatggctggaatatttactttttcgatcaaataaatgaactggtacgtattttaagagtaaaggttttcccaacccttggctgaaagtcagcctgttctgtgctgtagaagtgttgtgaccatgaggactggcattcacaagtgtcccctttcagttggtcctgtccctaagctgggtgtgttccaggcgctgtaccagggtttcctgtcagctggttcttggtagttagtaactattccaaaggaatggatttttgttgtttggttcttgtcacactgactgtgtacatgtgtactgagttcagtgctgtggcccacagagctcttgaggtttattcacagattgccctgctgtcatgtcctgggatacatcattgaacattctcagttgtctctactgcaagtcacagagtaggattaatagactcatgtcaatactgttttaaacatgaaagaaaactcatgcaactctgttttgtgtatataaggcaactgactggtccaggcttcctgctgaggtgcgcatgcatactgctgttaacactttatgatggctacagtgacatccttgttcccttgcatctgtagcccacttgttggccagaatatgggaaaaatacagaacctgtcgggcagctgtggctgggacttctgcgcttctacactgaggagtttgactttaaggagcacgtgatcagcatcagaagaaagagtctgcttacaacttttaagaaacagtggacctcaaaatacattgttattgaaggtatgaatgaagtcaaattagaagtgacatgttggccgggcatgtgtgaggatgatgtgcagagccttttaagttgagcatcaagtgtgacctgtgagcccccctggctcttcccccaacagtcacctgtttgcagtacagcagccctgctatggccacaccaccctaaaggttcgttttaagtgactagtgcctccaggcggggcctttcacaggtccaaagtcttcactgaggagaataaactcagttgttggaccacggcagtagagcacagcagcagaggcaaggcagctttgggacagcagagctttaaagcctacagcgagtggcttcctaatttaattctgccgtgtacttttactttttggtcatggtaagtgcataaagcactcagtactaaatgtgtaaagtttagtgtgtagttccacagctccagattcgaatgcctgtcccagatgctcgggggctcagagagttgtatagactttgggtctggttaattctactgggtgatatttttataagaaagtttaaaactaaaataaaaataagtctttactgagggatggagagtgccagtagaggtggattcttagccctttacatactgttgggaaaaggactgtctgtaatgattctcagtgttgaccccagagagagtcctttcctgatggaccttgtgcccaaacctctgtgtgactccggcacccaggagcgaagcagttgaatcaagtcaccctactgaattcaacagtccactgaaaccattgacgtgtatagttagttgttcctaagtggtagggattcagtttttaagaagacaaaataagccgggcagtggtggcgcacgcctttaatcccagcacttgggaggcagaggcaggcggatttctgagttcgaggccagcctggtctacagagtgagttccaggacagccagggctacacagagaaaccctatttcgaaaaaccaaaaaattaaaaaataaataaataaataaaaaagaagacagaatgaaggtcaagtgctataaagtgagctgggaagggactgagaaaatgtcttcttggtctcacaggacccttttcttatcacactgtcacatagatggagtgtgaattttgtgattatttcattactgcgagcagtactgacgcagtgccataagcactacctgggctatgcatggtagggacttgtgttctagaggctcctatcaaagcacagattagtgaaggcagattgccatgtcatttgttgttgctcagcttactaagtgaactttaaaaagaaaaaggcagaactgagagtgtgatggccacatctaatcccagtactggggagctaacctaaaagccaaagcagtctttgctcagcttctcaaccaggcctgattaatagcaatgcttccaactgtatggtaactaatgtacaatctgccttttataaccagcaaacacccaaactgtaaaacacgcacacacacacgcacacatacacgcacacacacacacacgcgcgcacacacacacacacacacacacacgcacacacacacacacaccagcaggaaagggcaagcctgggatgatggcacttgtcgtctgtgctccagttgactgactttgagtgtcatgttccccagcttggtgcctgccctctggaagctttgtggacagaatcatggtgcctagcttcactcccagacgcccgctgtggtgctctgcaaatgtagttcttcacgtctgcatggagggctctaaaaggatggatcctagtttgtccctctgtctttttcagtgctgttttaggaagaaaatgatatcgatcttcatatgatgaccatgaccagatcattagtcatgtgtatagtattttaaatcatctataaaataatatttgggtttagaagcatgctgaagagtacgtccactcagttgcacctgtccagctgcctctttcatcccaagtgttcttgtcctctgcatctggctcttcatggttcttgtgaatcatctccttggcccttgataatcaatgtttaccattatagtgacactcgatagctcagactggcctggaactcagctacacagcccaggctagcctccaatcccttgtttttctgcatctgcctcccatgtgatgagatcagaggcatggcatgcacacctggtttatttatgtttgcaacttctactgtgacacagaatggacaccactaaatgacctggttagtgagtcttcctcaggatttcctccagaagtaggcaacctggacaataagaagaacttttataaagatcataaagatgatacagagctattttcttactcatgcttttggaaaatctcacctgatatgtaggtttgactgttgctgagctgtgcataactctggatgatgagcaaagaaggtggcactgttgtgtgtgtgtgcgccaaggtaatgagatgagtgctggcagtctcccctgctgtctcacctgcccctctctctctctcctttactcagatcccttcgatttgaatcacaatcttggtgctggattatcgaggaaaagtaagtgcctcttgtttgttaacctgggcaatttcttgttctcttaatgcatgtaattgaactcttactatttcccttatagtgacaaattttataatgaaagcttttatcaatggtagaagagtatttggaattccagtcaaaggatttccaaaggacaacccctcaaaactggtgagtttttgatagaaatgccagagaacaattaagatgcacattttgagcaccaaataagtctgcaatgtggtgtggttgaatcgagctggctggtgtgtctgtttcctcctgtgtcacttcatggtgtggcattggaaatatgtagttactttgaaatgtttatcattgactttagccactctgttgcaatagatctctccagacatgttccttctctatccagaactctgtcccctttgaacaacaggaacaatcaggagcactgattcagcttctgcatgtgggcaagtaggcacttctagcaaatcatagtcgagctcctgtcagacactgctctggacatttacagtggtgtttctcgtacttgttcaagagctccttcacctacacagtgtgttcagatgagtgatttctccaggaggtgtgcaggggggatgcatcatcccagcctcctcctgcagcagcaccagcagcagcagcagcagcactagcctgcagctctttgccttactttaatacagagtttgcactgtgtgtttctcagttcactgcagtttagccattttgtctcatgacaggctctctgtgacctcagcttctgctgcagtattgaagccactattatgtcttatatgtcagtgccctccaacttgagggcataaaagacatagtttagatgatctgtgtcagctattgtgtcactgtgctgctccctggtgtgcaggtgtgttggggatgagtggtacacatactaaaataccaacctgttctcacactgatttcatggtgtgccatggtcttgttcacagttcatcttacacagctgtgttcttgtaggcatacttttttgatccggatgtcctaactgagggagaactggccccaaatgacaggtgctgccgaatttgtgggaaaatcgggcacttcatgaaggactgtcccatgaggaggaagtaagcaccagttccgaagggaagggttgggttttcattttcttgtcccagtttctaaatgtgagtctactgatacagaaaaaagacacttggaaattttcatgggagtttctgccccactgtggcccatatatctcccaaatcaaaaatacagaaacgtattatttttactaataagctgttggcactatacagggcaggttctcaactgttctaacctacatccaggcatagggctaagttagtgttctaacctacgcccagccacagggctgagttagtgttctcacctacatccagccacagggctgagttagtgttctcacctacgtccagccatagggctgagttagtgttctcacctacatccagccacagggctgagttagtgttctaacccatgcccagccatagggctgagttagtgttctcacctatgtccagccatagggttgagttagtgttctcacctacgtccagccataggcctgagttagtgttctaacttacgccagccataggactgagttagtgttctcacctatgtccagccacagggctgagttagttgtcaactgagtcttcctttgtttgctctgttccatgtgtctcctcagggtgatttttttttcttggcctcctttgtcccctttttccttcctctaagaccctctactcaatctcaagtcccaccctcctgtctcctgccactcagtcacaggctccagccttttattatccaatcagagattattggagagcattcttcatagcacatgggtcagtacaatgcccatgtcctgactgcagcctgatcttggggcacagaactcagcatctgaatacacagcgtgcaagaccaacccaacagaaattgagcagttttcatataaatgtaatactgttttttaaaaatgaaaataaactgatgtaaatgtggccatgggtgcacatgctgcgggctggctctcacgccaggttaaacactttttcttccctattttgggtttgggtttggttttaaattagtttaatccttagtaattattttcagtagctcaggtgtttgggcaccatgctttctcctgctgatgttttgagaggcagggggtacctttatggtcggcttggatcattgttctcctggctgacagtggtttgctttcaactaaacagtgctagtctcatttcaaaatacacttaagggaagttggtcacaatctgggatctaagaaatagtaatcagcagagcagaaagaaattgttaataccttggggtggtaccatttattactacttcctgtgtttgggaggctgagaaacatgagttcaaggccagcctcagctacaaagggaatatgaaatcagcctgggctgtgtggcgttacgtcaaaaaacaaacaatatgtgaggatgcagctcagtaagagcactaactgctcgtgcacaagaccctggttccattcccagcacctacagttggtggcttacaaccacccgtaattccaattccagggcctccatggacacttactatatatggtacacatatgtatatgcgtataaatgaaagaaagtcactctttataacaaaggaaaaagtgactctgacattcttgaagatagaaccccttaaaaccattgttaaaatttttctgagaaattcaagtcttacagttcaaattttcattgcctaataaaagctaatacatcaaaaaggctgaccagcaacccactacacatatgatttgagtttcatcatgcaggtatcaaagcaggcactggggctggagagctggcttaatggtgaagagcactagttgctcttccacagaaccggggttcaattcccagcaacagcatagcagctcacactgtctgtgactccagttccagaggacccaacgccctcacacagacacacgtgtaaatacaacaccaatggacctgaagtaaaaagaaatgtattttagaaggcaggtactgagtctcagcaggaagcactgcttgcagcactggtgacaggcaggctctgcgctaaagattacagttccagcagctgcagagcagggtgtttggaaactcactgcatctgggttcaaaacacatagacttgtttttcttgttgtcctctccacagtacagtgtaactgagaggatgtgtatgtgctatgctatagcacgtgactttctgtaaggactggggcaactgtgggtgctggtttctgagtggccacctgttacccacagtctgtgggtgctgaaggacagcagagatcttaatacagaagccaggctttgtcacattctcggcctccttttcacattctatggtcctagctatctctacacttggacacatcttgatactcccataagtttctgttgacacttttcctattagtattttatcttcactagagtgaggcgacggagagaccaggaagataccccaaaccaaaggtactctgagagcaaagaaaaaagaagcaaagaggacaaagagattcagaacaagtacacagaaaaggaagtgtcaacaaaagaagataagctcacaccgtgtgcagctgcgaaagccaagccagtgagggcagctgtcgacctgggccgggagaagctcctcaggacgcccacagaaaagtggaagagacaggacgacagagactcgagagaaaagcgttgtttcatctgtggaagagaaggacacattaaaaaggaatgcccacagttcaaaggctctccaggtacagacaactctccagaaaccgtgatgttcatggtcaagggatataagaggtctagaggcttttcacattttgtatcggtttctttaaggacggttgtgtaaggaagcactgcagctccccatcccattcacacacaccctgggtacagctgaattgcttattcctgggtctaggtagccttatgaaagtctaagatagtcaatgaatgctagtctcctctccagtccatataaacattgtctcagtatccagtaagcaagtcacacttagaggcatgctgttcactgtgtacgtttgtaagtcacagcactgcctagacactgggtgaggtggtggcttaccaccatgtacaaatgagtatatttgcacccacacactctaagcaggaaagagaatagacggttgttgacagtgttcttgtctgcagagtactgggaagggtttcattgttagcccttatttaatacctttctatcagggaccatagtaacagcccacagatccacagatgagagtcaaccacaagtcttcttgatgcagtagtccatggctataaccaaagctacctaaaaggctgaagcaggaagaacactttacccaggagaataaagaccagcctagccaacatagtatgaccttgtcttgaacacaaaactaaatcacctctaattgctggatgtgaattggtccatggataagtaccttttaatagactgttaagacactgtctggatgcctttaagttgtgtatgctatggtcttcagaacaatttatatactgtactgccttgtaggataagcctaggtgaattggataattgtagctgaggaacactagagagtagctgttactgctcttctgctaagggtgctggtgagggcagctctgtggttccttcctctcagcactctggtgctttgagtgatttattaaatcgagtctgccaggcaaattgtctcaacttctaagactgaaagttttatgtgccctgttctcaccctacactccccaccccctagggcttttgaggcagagactcactattgtcatcaatgccagcctagaatttgctgcatagccctagctggcctcaaactcagtatctcctgctgcctttggggtcacgagcatgtgctgtcatgcccagcttctcctcatttattttctaaggagctttatagagagaatttatgcaatgctcgagtgtttatggatgacttggctctgggtaccccagcctgagtcagctgaaccccagccttgttcttctaagtagcttgggacttaacctcaacattcaccttgattttcctttataaggagacaagattaaaagaattaaaatgctgatatgttagcactcagttgacatgctcctcagggtcaggttggcactatttcagtaggagtatagttaccgatcatctcacttagctcaaacagttgcctcctttaagctagggaactagacagtatagatacaagttaacatagtttcaccaaaattgttcttacatactatatttgtgtttacaaacagcatgaaacagatcttctggtaccctcctcctcctccagcatagttgtcctctgcctcctcccccacccccccaggtgcatccctttgtctagtagcaagaccaacacgtctcaaaactgtttaagagttgtagcctagagccagacagtggtgtcatacgcctttaatcccagcacttgagaggcagaggcaggtagatttctgagtttgaggccagcctggtcttcaaagttgaattccaggacagccaggggtatacagagaaaccctgtctcaaaaaaaaaaaaaaaaaaaaaaaaaagaaagaaagaaaagaaaagaaaaaaaaaaaaaaaagaaaaaaaaaagaaaaattaaaaaaaaaagagttgtggcctaaagagatagctcagggaggctggagagatgacgcagaggttaagagcactagctgctcttgcagaggtgctgagttcaattcccagcaactgcatattggctcataaccatctataatgagatctggtgccctcttctggcctgcaggcatatatgcaggcagaatgctgtatatgtaataaataagataaatctaaaaaaagaaaaaaaatactgcatggcttctttaaaaagaatgttaaaagagagagagctcagttagttagtgcatgctcaaggacctgagttctggtcccaggatacacataaaaagcaaagcagtgtaggagattcttttaatcccagtgctggacgcagagataggcagatctacccctgaagctcgaaaacagctagcttagcctgaccaagccagtgagagaccctgcctcaaaaaaccaaaatgggttgctcttgaggaatggactcagaggttagctttttccagatacgtgtacacccatgcacacacatgcatgtgcacacacacacaagcttcagagtggcagttctgtcagcctgactgtacacctggcagctaaccttagggatcagcaaccttaagaaaaagtcctagtctagaagcctggctacttcctatgcagtactcataactagtgtcagcagttggcatctgcgaacagaaggggtcagagtagagcaagtgcttcgtggtgctaactcagtaatgtttctgtgcccagagttcaacgcccttccccatcattccttcagtggattgtgtagaattccatcatgtcatcagaaaatatgtcttaaaacattttagaaaaagactgttgctttaacttaaagtaggaacaaaagtgttcctctctttctgtaggtttgtgtaagtcagattatgtgtctgcatactcttcacctagcccattgagaccagttgctcaggtaaacgccagcccaaacctgagaggggagccccccccatcctcttcaccctcacagcctttgggagtgcttgcagctgtgtgctgggccctcccggctggcctctggtgcttgctccttctgtctcccacatactgtgtgggaaggcttgttgggccctggtagtaggggctttggtagatggctcctgcattcatgtctgtctttccaactaacttgggccaacctcgtgcctaaccccagctcttcttggatgcggtctgaggctgtttctgttgctttatcttcagtttttgtaaaccagtctatttcattttttaggcagtgcttttacatgaagacaaaaagaaacaaaaaacaaccatatttttgagtccccagtcaggtatgtggttttaaaggatcagatatgtgttgttttcttctctgaatattttaccacatgcctttgagatgcttcctttcctatgtggttctgacagggatatcagaacttctcaagggaactttaaacaaacaaaaaaccctcttgccttgcttccaccttgatccttatctgatgttcaatgggtaagtgcagcctgtgtagttttcagattctctgggtgactgcttcatttgaggaagagttgctcccttagccatggaagcctttcttgcacatttgtaactgctgtggatttgtctttgctgtgccctcacggtttctccttgtgaatgttagctgccatgctccagagtaaggaaagaaagttataacctgaaccctccactctgcacccagacaactgtttcatttatctcttcagtaaatatctgctgagactgtctctaactgcagggcaccagccccagcactgaacacttctcggtgagcagcaaagctcctcctctacattcttgtcaggagtagacaatagagagaagcaggcaacaataaagggtagccatatggtgacagatgctttaagcaggaaaagcacagatgatgctgagtatgcagtatcctctctaataaaatcgcatcctgaggcagctgaatcacaggagatgagggtcaggctgaaggctggtagacctttaactgtcggcatggaggagcagtgagaggtgaacttggagtagatgagtctagcttcttgaagctacagatgtgatggagggatggtgctctttgaagtagtaaatggctaggacaggaacactgacgccactcaagtatttaccaaggtagttgcgtagagacgatggtcacatgtgggtggagaatgccagggaggacaaccatacacatctgtgttctgaagacaacaccagcaaaatgaatgcatcgggttgtgacatggatacacaggatcagatgacacgacaggctttgtctaagaaccagaaaaataaaggaaatttctgaggagaaataggagtcagtggtgaactgaaggtagctggagttctggtctagagaaggccagtgtccagttgagtatatgagtgtattagggttctctagagtcacagaatgtatggaatgtctctgtttattgagggaatttattgtgatgactttcagtctggagtccaactaccccaacaatggtcagctgtgagtgggaagtccaaggatctagtagttgctcagtcccacgaggctagttgtttcagctgctcttctgtagatgtaggttccaacagatgtgctggcaagtaagtgcaagcaggcaaagaagagtgaatcttcctacttccaatgtccttatgtaggtctccagcagaaggtgtggtacagattaaagatgtgtgccaccacacctggatctgggacctgttttttgtcccatgctaaccttaaactcaaagatctccttgccttagactcctgggattaaaggcatctactgcctttcctgggcctaaccttttcatggccactgtgcctcaagatctccatgcggagatccaggtcagaaatttgtgtcttccagcctcaagatctggatcacaggtgagccctccaattctggattgtagttcattccagagatagtcaagttgacaaccaggaatagccactacaatgagcctgctggcatttaactggtccaggctgcagaagagtgtaatattgttattgtggccattgcatttcaacccactatactcaggaagatcttctagcaagtaaaaccacatggaagaaagggatgcatgtggaccatggaaatcaaaaaaaacaaagatggtcaaaggaggaacagaaagcgccagagttgagctcagagtacaagtgaaggaagtgcttggttaggtgctgcttggagctctgtgtggaaactgagttcagcaccgggcttagcatctgagctcagtgaagcctttgcagagaacctaggctttgggagctaggttcagaataccaagaaaaggagcctgcttagcctgggctgtggtgtgaagggcagagcccccttctgccatatctcaggcctatggagggttactcaagagaacatggtgtgataccagggtaagaaggtcttttgctagtatttcaagtcgtcttctgactctcaaaaaagagggaaaaaactgaggtaaaagtggctttttcagcaatatcataggaaagaacaaaactgtgagaaaatgtaaacggagtccttcctgggacagctttgcttaatcagccagccctggtctctctttacctcttttaaaggaggctaacaatgggcaggtaagcccagagagcatgagcaatcgtcccttttaagttcttgtgtcatttattaaaaattaactcggaggtctttttatgtacatgaatgttttgcctgtgtgtgcctatatgtacttcatgtgtacatggtgcctgtggaggtcagaagaggttgttgaatgccctagaattggagttacacatgcttgtaggccactgtgtgggtcctaagtaccaaaccctggtcttaactgctgagccatccccaacacagaaaagtgaaatttctaatgacagcgcttatagaacttttactacagcagtgtcacagagtgggtgtgtcataacatgtagaacacagattagctgcattcagacatccattgtggatttagggaatgccatcctaatattagggaaagtactgacttgttaatgctgactttggtagagcaagaagtcttcagctgcccctcaggataagctgtctctcctggcctttctccctcttctgtgaagctaggacactgaccactctgggagagttgaggaagctttgggctattatttctactatgaatgcagttcatggggggaaaaatagtggaattgttaatgtgtttaactccttaagttttttcagcaccaagaggcatgatcttaagtatttgcgattgttttagttttctttagtgaggaaaggaaacactgaaataatgagaactttttttttttttaagctagggtgtcatgtggccctggaatccccatgtaatgcttcatatatggtgggcagacactgctgtctacgtgacattcccaaccatggtgtcgtatctgtttacataaaatttaaagtacttgggatttgtgctggtgtgcagaataagagcatgtgacttgaaggaaacagagctctccaggtcttaactgcacttagaccagaaggagagcattgtacgtgacaaacaagcaggaagagggacaagggacaggagctccagtcccgctcaggaagagtcatagctgttctccatggagcacaccatttcacaatcagagtgctgttggataccctccaagcccagtagacagagtgaaaggggaatggtgccccacagttaagctgatcgaggttggggaagagaggtgggctatatcacataaccacactgactttcaaatgaccctagctttctggaagggtgtgagccacagacagcaccagtcagtggcttcattttccctgtagatctgggagtttgaagatctaagatgtacatgtataatcagactaaaagaatgctgttttaagcaactttgaccttaagcagatattcccaaaacatttcacacaggaaaagtactgatgttcctgatgttaggcacatgaaggaacacagagtgtgagcagtttattgcatgtttctggtttccactccatgtgttgggggcgccccttgccctgcacacacctccgctctctcggctctgagctgactgctgaggagctgcgtgcaaacacttgagcagctgcgtgagtgcagagaaggttcctggtccccacactgtccccaagtccgcagagagcagcactgctgggcttaagaggttacacatctttaaagttgagttttactataatttttcaagttttaaaaaagtggggaaaaaaatgtagatgttatagacctagaaatgccatggccaactaacatatacttagttataaagaagttattagttattcatctcagtaaaaaaaaaaaaatcctacaactaaaaacttactaacttaaatttattatggggaaattttattacaaactgtattctgctttctacaagaaaaaattatagattgctaagatttgttcttgccaataaaatagctcagaaagtaagttagtgacagctgtcacatattaacatgtgacccatgtctgtgttgtaggtagaaatagtttcccttgagcccctttgtagactaagtctctgacccactctagtttccttaatgagcacatgttgatggacagctgtgctcttacctttgattttgccatctcggctaacaggtgcattcctctgatgtctcagcaagtagtacttgtttaaattatcataaaggccattggtggggctggggagatgttcagtgggtataaagaggaccagagtttggatcggagcatccatgtaagtgttaggtaacatggcagcctgctaggaatccatcgcatagggggtggagggagggagctccagagcagacttgcatagttacctaacccacctccatgtataaggaggagactatggggggaccatccagtaccaagccctgactccatcatatgtgcatgcgtacacacacacacacacacacacacacacagtgtccaaacacatattcgcattcacaaacatgaaactatttcatacacacagtcatatggcgggaaaatggtttggtagtggtgtgatttttgttgttattgttgttgttttaataggccttaaagttctagtcagtgataaagttatataaatatacataaatggggcagatagctaccaatcttttagactgtctctaaattttaaaatgtcaggccatttggttgaaaagaaataaagggaaagcttgtgtggtgggcattgctaaagctgctgctttgggaaagttgtgtccatgcttctgaaaatgtggacaactgctgcgctttgacttcttttacttacatttaattctacacttcatttggaaatgacaagagtgacagtttaagaagggagctagcttccttctccccctcagaagttatgggtgcaagccaggtgtggtggtcatggtgtagtatttaatccccacactcagaagcaggcaaaaagcaattctaggctagcctgggctacataatgaattttaagtcatccaaggcctcacaatgagattctgcttttaaaacctgtagctggcatggtaccagttactaaaccctttgcattccttccattggtttgagtagagccttcattgtacagtagtagccacatgggctctcattccctcttgtatgtgctcagactccagaacacagtacatgttgtaagctgtggatggcttcactactaattaagtacagagaattttattttctccttgtacatccataaggtattactagacttctaaagggtaatggtatgaggtactaatttctggccagcgatctctttgcagtctgtgagctacaaacaaaaagaatatcctatgtaaagaactttcaaaatgtttcttccagcctcagtgcctgcctgtggctgcattgaacagcctcggggctgtaccttaccagcactgaggaagcagtgtctaagcactgcccagtgcctctgatggctgtgcacttgtttatacctagcctaactgctcgactcaggacgagtgccctttgtggtgggacacgtgtctgtcagtaactgacaataagtattgtgtgactttgctcaaacaccattcttttcgtttatgttggattttgttttccctcctaggtagcctttccagtaaatatatgactcaggggagagcctcagtgaagaggacccagcaggaatcatgagggaaggaactgcagcactggaaatgccactcaggtgtccgtggccacttgggaaattaggttcatggcacaggacacagtgacacagatcaggcttcaacgtaacagttgaggggcatcgtaattttttaaattttaatgaaattgttaataaggaaaagaaaaattttaatatagtctaactataccaccaatctccagagatttgaagattttaatagaaagtcaacttaaaagaaaaatatgagggccagaattcaatgactacagcgtcatggattttagttctttcaaagcactctaaaaatagtgtgctgctcaccagaggagttagccctctttccctacacatcccctttttgatttccaagaggggattctctctgttgttcctggatcgtggtatggacgcacatcaaggacatgtggactatactgctgtacatagggtctacaagcattcttcatggctcattgtagaaatgatagcatggaatgcaagcacctgtcagtgtgggcctcggtggacgaccacagcaccactggcacatctttgagggcttccttctctaagtaattgacagaactgttgtgctcataaaaatgaagtcataaaaataagtagtccttttttgctggtttaaaaaagaaaaattaaaggagaaaaggacagaataaaagtgctttttactttttatgatacacagaaattagggtggagagcttttacaaacctctgaagatcaaagaggctgctgtctctgccaatcacaagtttgattggcaaccttctggtctgactggagccctctctaaactgttaatgaacttcacaagcctttctgaaatagtacagagtcagaactatgccggtttatttatcattttgaaataaaatcgaactttgaacgtgtaattttatccacattattttcttatgagtcattagaaaagtcaaccaaagcgctgacagtacacatctccttaatagggtgcccatgctgttcccctttgatagctgtgcaccgggtctggggtgtgcaagcaggagactggggggcagagagagagcttgctaaggacactggcacaacgagggagactcacgagaggcatatatgtgtgaactagactggtcatagtctagttatgaaagagtcatgtcaaaatggaaatcattaagaaattggaaatcatggtaaaaaaataaaaatggtgaccatcaaactcatgggttgtgcaaccggggcctccctgctacgtgacggctcagctgctggcctgcttcctttcctcctgctcagctgctggcctgcttcctttcctcctgcctctggctgtgaagtgacagcgctgctttctggctggaacagtgccacgcctactgaaaaagcgcttagtgttgtttatccctctgcccctagaacggagaagaaatacgcagccaggccaatctttatacctggtagttattttctacttggatgttttgtcggttgttgagggagaggagtgtacttacccctaaaattaaacagaattgtcatgttttcttctagccttaaaaaggtttcctacattttgattcttaaaaaaaattctgcccagcagcctggtgtttttgatggcttatactgataccattagacaagtgaggcacgcttctcagcggataagatagcaggctcgcagccatggccaagtcaaagcttcctctgcaagcgatcgcagggccagggccgatgccctgttctgttctaaaacagcggaaactcagaatccagtttttacagcaggagttctgaacacccgatcttcaccttctaacagtctcttgctcactgtgaactgctttggcaagcttcctggtaaaagatgtaaaagatgtgttttcagtgtacagagaaaccctgtctcgaaaaaccaaaaaaaaaaaaaaaaatcagtctgtttttcttttgcttcaaaggtggcttctatcttaaggagaggatatcttcccaagtggaacaaaatccttgcaagagagagatcaatgaccgagtggggttcacagttttcagacactaaaaatagagttgaaaacatggtgtgcccactctttgtaaagctatgaagaaagggtcagaacattttcttagctcctgggcaggtctaggcagaatgtacaatgtctgtcttactctgtcagtgttccagcatggcaaagtccccatttcggacggggaaactgccccttctagtcagaccagtgagatcgcactggaaaagaaaacacttgttctttccgtctagacctgaggccgaatccatttccctccctcggccttcctggaaccataagggggcgatcaggggtagcaaacccctcagtactccccacgcccacccagttcccgcacggggccagctgctgctccgagataaaggagctcccgttcttacgtcatcacgggccgcgaaggaagccgaggcgtggtgacaggcgcacagctaatcaaatgggaccggctagcaggaaaggctagccaaatgtgcacggggcccgggatcgggactcaagaaccgatgctaacgtagcgcccagggcgctcgctctcagaggctcggatagagccaccatgcccgtgcttccatgcgaggctggtagctacgtacgtgctcagttttcttgacacaaactgctacacaagagtgacatttcaataactggaaacctgtcgtatggtgtctacccgcttgctttactatcgaagcagctccagagtcacagagccgtgtccccacttccggggggtctgtcgttagtgtacgccatacggaaggagccatcccacttccgctagcgcagtgaccgcgaagcccgcaaggtcacaggtcacctcccttgcctcgtcagtgatgacggccaatcggcccggcccgtcactcacccggactgtccaatggtggagcgggacgggcgacgggaggcggggcctgtggcgcctgcgcaggagcttgtggcgtcaaagtgcccgccgtgtccatggagagaagttgagtccccacgctccagccggaggctgcgggtgccgcgacgtggacatgtcggcgtcgttggtccgcgccaccgtgcgggctgtgagcaagagaaaactgcagcccacgcgggcggccctcacactggtgagtcacctcggcgtccgcagggaggtggtggcggcggcggcccggggtgcagagcgagcctggacgcggactagggtctcccggcgggccgcgcgcggagctcgatggggcggacgggctgtgtgcgctgccaccgggcggccggggcggaggacggcagtttgccgccgaggtcacggcgttcccggagaaaggtcacacagggaacgccgcggctccgcataacctcccaggaggcgtcagccccagaggatcgggacagcgtgagaccgggattcattcggtccagacgccaccgcggaatccgctccacccagagtcctaagaggggctcttgccaatagttagttgaagcaaaatagaagggagtcgtgaacaagtgagataatctgtttataggataggtcattgtttggcccttcagtttgccccagtaatcacactgcattctgtgttgcttttccctccgggaccagctagttttcgtcaccgcaggtatgtcatggattctaggattgtgcaaactatgctcatcttactgagaatagagtagaatcctcctacaagtaataaattccagaaaagtcgagcacaggataggtggtggttgttattgtcgttgtttgcttgcttagttttgttttgtttttttttttaatcaccatttggcctattgcatgttacttgggaaatttcgacccgccccttctcacaccccccctctgcccccgtttctacctcataagcatacattatcatgatccgctgtttttcatgagaagaaataattgagttgcctggctcgcaccctccgtaggccattccttccaggagtaacatctcatttgcacagtcctggcctgtgtcgtgctttgtaatcttctgtttcgttatgtatagtagatctcaattcacaccctctgccgcgctgcctagctcagctgtagagtctgtggtgttaggcttggtcctagaatcacctttccctgattttcataggcacagctgttggcaggcgtcgtggttcgtacttgtttttcaagtgtctggtaaacattttgaaccccagcacatagcaaatgcaaaagcaacgaggtgaccaacggcctaaagtgtgagagagagataactagcaaacaagagtaatatgagttaggtattgcttggccggtacatcagcctgacagcagggagtctgacattctgcaacatctactagaagtcagccatggccaggaaaggtgtgacataaaacataaacactagctatctgttagctgatgccagtcgtggacagaatggatgggctggcacattgggctgtgtgtatttttagtcagggtttctagaatttatggatagtctatatagtaaagggatttgttacaatgacttaaacagtctgtagtccaactcctcaacaatggtcagctgtgagtgggaagtccaaggatctagtagttgctcagtcccatgaggctagttgtttcagctgctcttctgtagatgtaggttccaacagatgtgctggcaagtaagtgcaagcaggcaaaaagcaaatcttcctcctcccagtgtcctcctgtaggtctctaacagaaggtgtggcccaggttaaaagtgtgtaccaccttgaactcagagatgatcttgccttagtctcctgggattgaaggtatgtactgccttgcctgggcctaagcttttcatggccactgtgcctcaagatctccatgccaagatccaggtcagaaacttttatctaacaacctcaagctctggattgcaggtgaggcctccagctttggattgtggttcattccagatagagtcatgttggcaaccaggaatagccattacactgtggtgtagactggtaagatctgcaaacccagaatggctccagctcaccacatccaaaaacaacgtgctccttcccacccccatatatctaggagttaatagagttgaatttgcagggaccagagtcagatgtgactggagaatgtgaaagctgctacctagttgatgggcagctttatttccatcattgtacaagacagaggtggtcagctttcatgacgagaggctcatcctcaccaagctccacttgggagcgagcggtggggcctagctagcatgcatgttggtacgcgctgagaacctagttcactctgtatgcactgtagtgtgtacactgtactgtagaagactctggacgcttagcttcccagcgcagcctggtagagaggggcccagggtgtgtataaggacatgttacttcactggagtagggccagaagatctttggaacagcaactagcacgtgcctttggtttagaaacataaccaggaaaacctgcaggttacaaccaggtttctagtccagtggtagaacagccgctttagggcctggcgtgagaacagagtggggtgttgtgtgttcattgtaaagagagatttgttttgtgtcacagttgttaactctttggtcattaatttaggagcccttgcaaatatttaattgtgccttaaccacagagttgtaagattaatagccataacaaacacgggccagggggaggagcctgtgtgggggcaggggctaaactggcagagaatgagctgtgaagctcagggcctgagtttcctctccagttcccagataacaacaacaaaaaagctaaagttggggggtggggtgggggtggtgcatacttgtgatcccagtgctggagtgggagcaggcagggctggggctccagtggccatcagccaccctacgggcccagccccaggccatgtgagcagttctgaaacattcctgaagtgcatttcccagcattctgaccaaaaaaaaaaaagcagctttggaataattgtttggtttgcatgtttaatatttaaaatttatttatttttgtatgtgtggtcatgcgtgccttagtgattgtgtgatcagaggacaactctgggtgtcacttccctccttccatcatgtgggtcccaagttcctttacctgacaaagtacctcaccagccctttgaaaaatgtttttaaaacctcttcaatatgttctcactttaagcagctgtgttcctatggtagtttacacaggagcagattaaaaggcattattagattttacaggatttcagtaatctgaattctgagcccttatttgttggtagatttcttgggaaggttcaggttgagctggtctgggaatgcagacatagtagaaagctgccagacttgcagtggtgttcagggaagacctccccactgccagggtctgaagcaagcgggtgcttaccgtctttctagtaccaagttcagcttggtactagaaacagattggtaccgtgaacagaaagggcagtcccatcaggagccctgtccgacccatgcagttcttttgactaatcggagcagtcccttagctgaacaatggcagctcccagaagctgaagggtcaagtactaggaccagcttgggatgcacagtctgtctccaaaacaaggcaggaatacagcagtcccttggccactttaggctgtctgtccgtccctccgcccctccccctctccccctttttagttgagagctccttagtaacagctcctcagggaggaacgcaaagggaagacggttttggtcacttgacagcagcttgcagacattcaggtccttttaatgatacttttccttgtgtgccttttcctgtgtacacgatgtgaatgttagtgttcatgtcagtggagatggcctgcatagcttacttttgtgccctgtgttgaaattgttttgagacaaactagctgtgtatatcaatcaggctgatctcaaattcatgatcctcctgcctcagcttcccaatagccagaattacaggcagacactgtctaaatgttttctgagacttgagaaaagaaaaaaaacaccaaagtaggtgtcttagttagggaagtcatttaagccccagcccttgttggaagtcctattccaacaaggccacaccttcagatggtgccatccctggtccaaggatatacaaaccatcacattccactccctggcccccatagacttgttcaaaaacatgagtctatgggggccatacttaaacatagcataatgcaaaatgcatttagtccaactttcaaagtcctcatagtctatagcagtcacaacaatgttaaaagtccaaagttcaaggtctcttctgagattcattcaacttaattaactgtaatccccaaagcaaggcaggaaaccagctgtgcaaactccaaactctgcatctccatggctgatgtcaaagcagtcttcagatctccactcctttttcatctttgttgactgcaacaaactgctttctcctgggccggttccactccctgttagcagctttcctcagcatgtatcccatggctctggcatctttaatgtctccaaggcaatttcaatgttacagcttcttgtttcagtgtctgggattccacttgatcttttggactcctcctaagagctggcatcacttctcccatctctgtcctcggtagcactctatgttcaggttgattcactccactacggctgctgttcttggtgatcatcccagggtactgacatctccaatacactggggtgttccactccaactaggcttcaccaatagcctctcataggctctcttcagggtgccaagcctcaaatcctttgcatgaccccttcagtcctgggccatcaactacagctgaggcttcaccttctccaatggccttccctggcctctcacagtgctaagcctcagcttctctccatgatcccttcattccttcacaagcagtaccacctgagtgactcttacacattaccacgtccagccgcagcacgaggtacaaccttgggtatctctggaacacagcttctttgtgctcccagaaaacaatttctagaagatttcacctcagtgatgctggtctcttcttaatcactgctaattccttagctccaactaaccagcatcaactgtcccagtagttccttccattcttaactctagagccagagccacatggctgaagctgccgagttctgctgcttacaagaactagaacatgatccccttgtactattacattatcactagctttatgttttctaaatccttcactgcctaagcttggctatcctggttgcttgctctgtagattgaccttgaatgcagagatcagcatgcctgtctcatgggattaaaggtgtgtaccaccatgcctggatctaattaagctgnnnnnnnnnnnnnnnnnnnnnnnnnnnnnnnnnnnnnnnnnnnnnnnnnnnnnnnnnnnnnnnnnnnnnnnnnnnnnnnnnnnnnnnnnnnnnnnnnnnnnnnnnnnnnnnnnnnnnnnnnnnnnnnnnnnnnnnnnnnnnnnnnnnnnnnnnnnnnnnnnnnnnnnnnnnnnnnnnnnnnnnnnnnnnnnnnnnnnnnnnnnnnnnnnnnnnnnnnnnnnnnnnnnnnnnnnnnnnnnnnnnnnnnnnnnnnnnnnnnnnnnnnnnnnnnnnnnnnnnnnnnnnnnnnnnnnnnnnnnnnnnnnnnnnnnnnnnnnnnnnnnnnnnnnnnnnnnnnnnnnnnnnnnnnnnnnnnnnnnnnnnnnnnnnnnnnnnnnnnnnnnnnnnnnnnnnnnnnnnnnnnnnnnnnnnnnnnnnnnnnnnnnnnnnnnnnnnnnnnnnnnnnnnnnnnnnnnnnnnnnnnnnnnnnnnnnnnnnnnnnnnnnnnnnnnnnnnnnnnnnnnnnnnnnnnnnnnnnnnnnnnnnnnnnnnnnnnnnnnnnnnnnnnnnnnnnnnnnnnnnnnnnnnnnnnnnnnnnnnnnnnnnnnnnnnnnnnnnnnnnnnnnnnnnnnnnnnnnnnnnnnnnnnnnnnnnnnnnnnnnnnnnnnnnnnnnnnnnnnnnnnnnnnnnnnnnnnnnnnnnnnnnnnnnnnnnnnnnnnnnnnnnnnnnnnnnnnnnnnnnnnnnnnnnnnnnnnnnnnnnnnnnnnnnnnnnnnnnnnnnnnnnnnnnnnnnnnnnnnnnnnnnnnnnnnnnnnnnnnnnnnnnnnnnnnnnnnnnnnnnnnnnnnnnnnnnnnnnnnnnnnnnnnnnnnnnnnnnnnnnnnnnnnnnnnnnnnnnnnnnnnnnnnnnnnnnnnnnnnnnnnnnnnnnnnnnnnnnnnnnnnnnnnnnnnnnnnnnnnnnnnnnnnnnnnnnnnnnnnnnnnnnnnnnnnnnnnnnnnnnnnnnnnnnnnnnnnnnnnnnnnnnnnnnnnnnnnnnnnnnnnnnnnnnnnnnnnnnnnnnnnnnnnnnnnnnnnnnnnnnnnnnnnnnnnnnnnnnnnnnnnnnnnnnnnnnnnnnnnnnnnnnnnnnnnnnnnnnnnnnnnnnnnnnnnnnnnnnnnnnnnnnnnnnntacaaaccatcacattccactccctggcccccatagacttgttcaaaaacatgagtctatgggggccatacttaaacatagcataatgcaaaatgcatttagtccaactttcaaagtcctcatagtctatagcagtcacaacaatgttaaaagtccaaagttcaaggtctcttctgagattcattcaacttaattaactgtaatccccaaagcaaggcaggaaaccagctgtgcaaactccaaactctgcatctccatggctgatgtcaaagtggtcttcagatctccactcccttttcatctttgttgcctgcaacaaactgctttctcctgggctggttccactccctgttagcagctttcctcagcatgtatcccatggctctggcatctttaacatccttgagtctccaaggcaatttcaatgttacagcttcttgtttcagtgtctgggattccacttcatcttttggaccctcctaagggctggcatcacttctccatctctgtcctcggtagcactctatgttcaggttgattcactccactacggctgctgttcttggtgatcatcccagggtactgacatctccaatacactggggtgttccactccaactaggcttcaccaataacctctcataggctctcttcagggtgccaagcctcaaatcctttgcatgaccccttcagtcctgggccatcaactacagctgaggcttcaccttctccaatgggcttccctggcctctcacagtgctaagcctcagcttctctccatgatcccttcattccttcacaagcagtaccacctgagtgactcttacacattaccacgtccagccgcagcacgaggtacaaccttgggtatctctggaacacagcttctttgtgctcccagaaaacaatttctagaagatttcacctcagtgatgctggtctcttcttaatcactgctaattccttagctccaactaaccagcatcaactgtcccagtagttccttccattcttaactctagagccagagccacatggctgaagctgccgagttctgctgcttacaagaactagaacatgatccccttgtactattacataaaggttaggcccaggcaaggagatctctgagttcaaggtcagtctgggacaaatcaagtcccagatccaggcttggtggtacacatctttaatctgggccacactttctatagtgccattccctgggcctgtcaccgggtgggggtggggaatgggatggtgagacagggtttctctgtgtagcactagaggttacccttcctttcttctgcccttcatgcagtgcctagctgcctctctggtcagctgcactgtactccgccttgacagaccagccggcattgactttattttattttattttatttatttttttgcagtgctacacgaaacaaaatacacacgtatcatacgtaatagcttaaaatagtgcactaaacagcagccacttactttacacgtatggcattgctttctctttgtgtggggggtgtatgtgtaaaggggttgctgtacaagtgctcatggatgcatacgtgtggaggctggaggacatctccagtgtcagtcattcttcag

SEQ ID NO: 414 - DNA, 5138 bp, Mus musculus
gtacaaagtaagaaagttgaagtcaaagaccatgggagatacagcaaaaccttactttgtgaagcgcactaaagaccgtggaattattgatgatgatgatttcagaaggggccatccccaacaagattatttaataatggatgattatgctaaaggccatagcagtaaaatggaaaagggccttccaaaaaagaagatatcacccgggaactatgggaacacccccaggaaaggactgtatggggtttccagcaatccatatgcatttaaaaacccaatttacagtcagcctgcttggatgaatgataaccacaaagatcaaaataaaaaatggctatctgatgaactcgctggtaatgcagacagctggagagagttcaagcccggacctaggattcctgtcataagccgctcaaggaaggaatcctttcaggaaagtgacgatgcctacaggtggcaggaggggagaggctgcagagctgtgagaaggctgtttcagaaagacctcagcagcctagaagccatgtcagaaatggaagcaggaagtcctgaaaacaagaaacagcggtccagacctcgtaagccacggaggactagaacggaggacagtgagcaggatggagatctggacggtcctgtcatcgacgagtctgtcctttcaaccaaggagctgttgggcctccagcaggctgaggaacggctcaagagagactgcatcgacaggctgaaaaggcgaccacgaaactgcccgacagcaaagtatacctgcaaactgtgcgatgctttgattgactccattccgtttgctcataagcacatcaaggagaagaggcacaagaagaaccttaaggaaaagcaggaggaagaattgctcaccacactgcccccgccagcgccctcccagatacatgcagttggcagcgccattgacagagtggtgcaggagtttggtttacacagtgaaaacttggatcagagactagaaattaagcgtgtcatggaaagtgtgttccggcacaagctaccagactgttctcttaggctttatggatcctcctgtagccgactgggcttcagagactctgacgtgaacattgatgttcagtttccagctgtcattgaagaattctcattaaataaattagggaatttcagccttaaagatgttgagaaagactctgtggtctgggaatacactgacaacagcacaggggacaccagctcagcaaaagaggaggcacccaaagagactgcagcaaagaagggacaggtgccattgacatttaatataaagcatcagccttcagtgccagtcgggcaactctgggtggaattgctgcggttctatgctttagagtttaatctggctgatttagtgatcagtattcgtgtcaaagaattaatatcacgggaatcaaaggactggcccaaaaagcgtatcgcaattgaagacccttacagagaagcaaaaaatggtggcccagaaccccaagcaacaaatattgataaactgggaaatgcagctgtggctcaagatcctggtgttcaaacctcaggtgactgcagagcacagctagttactcttaagaataccactgaggaggtgggaagcccagcaaaggagaagacaggaggtgtgcacatcccagcccaccaggagagctctggctgtgtccaggcagaggtcagttgtgagggtttggaggatgccacagcagagcttccggaaacaggaagtgacaacgaggaagtcagaaggaagaccaagcatcctttgagcactgatgaccaaggtttaagcagcagcaagcacccagaactgcagaactgtggcagcctgtgtggtctgcaggcagacaacactctggagctcagcattaaccttacagaagatgaggagggggttgctaatgagcatcaggtggacagcaggtatgctgggtcaggtgaggaggatgccctctctgaagaagatgacttggcagagcctgctaagggtgaagatacaggagaatgtggagaaaacgtgggtgggactctgctcatagacctaaatagaataacacttaaagaagaaagctttcctgaggaagatttacctggggaccagtctgagttcttctacgaatttagaaaactgaccttcaccaaaggcaagtcccccacagtagtgtgcagcttgtgtaagcgagaaggtcacctaaagaaggactgtcctgaggacttcaagagggtccagctggagccgttgccacccctgacacccaagttctcaaacatcttagatcaagtctgcgtccagtgttacaaggatttttctccaactattgtagaagatcaggctcgtgaacatatccggcaaaatctagaaagtttcataaaacaggattttccaggaactaaattgagcttgtttggctcctccaaaaatggatttgggttcaaacagagtgaccttgacgtctgtatgacgattaacggacatgagactgctgaggggctggactgtgtaagaactattgaggagctggctcgagtcctcagaaagcactcagggttgaggaatatccttcctatcacaacagccaaggtgcccatcgtgaagttcttccatctaagaagtggtctggaagtggacatcagcttgtataacacactggcgcttcataacacaaggctcttgtctgcatactcagccattgaccccagagtgaagtatctgtgctacaccatgaaagtgttcacaaagatgtgtgacatcggtgacgcgtccagaggcagcttgtcatcctacgcttacactcttatggtgctatacttcctccagcaaaggtctccacctgtcatccccgtgcttcaagagatatacaaaggtgaaaagaaaccagaaatacttgttgatggctggaatatttactttttcgatcaaataaatgaactgcccacttgttggccagaatatgggaaaaatacagaacctgtcgggcagctgtggctgggacttctgcgcttctacactgaggagtttgactttaaggagcacgtgatcagcatcagaagaaagagtctgcttacaacttttaagaaacagtggacctcaaaatacattgttattgaagatcccttcgatttgaatcacaatcttggtgctggattatcgaggaaaatgacaaattttataatgaaagcttttatcaatggtagaagagtatttggaattccagtcaaaggatttccaaaggacaacccctcaaaactggcatacttttttgatccggatgtcctaactgagggagaactggccccaaatgacaggtgctgccgaatttgtgggaaaatcgggcacttcatgaaggactgtcccatgaggaggaaagtgaggcgacggagagaccaggaagataccccaaaccaaaggtactctgagagcaaagaaaaaagaagcaaagaggacaaagagattcagaacaagtacacagaaaaggaagtgtcaacaaaagaagataagctcacaccgtgtgcagctgcgaaagccaagccagtgagggcagctgtcgacctgggccgggagaagctcctcaggacgcccacagaaaagtggaagagacaggacgacagagactcgagagaaaagcgttgtttcatctgtggaagagaaggacacattaaaaaggaatgcccacagttcaaaggctctccaggtttgtgtaagtcagattatgtgtctgcatactcttcacctagcccattgagaccagttgctcaggcagtgcttttacatgaagacaaaaagaaacaaaaaacaaccatatttttgagtccccagtcaggtagcctttccagtaaatatatgactcaggggagagcctcagtgaagaggacccagcaggaatcatgagggaaggaactgcagcactggaaatgccactcaggtgtccgtggccacttgggaaattaggttcatggcacaggacacagtgacacagatcaggcttcaacgtaacagttgaggggcatcgtaattttttaaattttaatgaaattgttaataaggaaaagaaaaattttaatatagtctaactataccaccaatctccagagatttgaagattttaatagaaagtcaacttaaaagaaaaatatgagggccagaattcaatgactacagcgtcatggattttagttctttcaaagcactctaaaaatagtgtgctgctcaccagaggagttagccctctttccctacacatcccctttttgatttccaagaggggattctctctgttgttcctggatcgtggtatggacgcacatcaaggacatgtggactatactgctgtacatagggtctacaagcattcttcatggctcattgtagaaatgatagcatggaatgcaagcacctgtcagtgtgggcctcggtggacgaccacagcaccactggcacatctttgagggcttccttctctaagtaattgacagaactgttgtgctcataaaaatgaagtcataaaaataagtagtccttttttgctggtttaaaaaagaaaaattaaaggagaaaaggacagaataaaagtgctttttactttttatgatacacagaaattagggtggagagcttttacaaacctctgaagatcaaagaggctgctgtctctgccaatcacaagtttgattggcaaccttctggtctgactggagccctctctaaactgttaatgaacttcacaagcctttctgaaatagtacagagtcagaactatgccggtttatttatcattttgaaataaaatcgaactttgaacgtgtaattttatccacattattttcttatgagtcattagaaaagtcaaccaaagcgctgacagtacacatctccttaatagggtgcccatgctgttcccctttgatagctgtgcaccgggtctggggtgtgcaagcaggagactggggggcagagagagagcttgctaaggacactggcacaacgagggagactcacgagaggcatatatgtgtgaactagactggtcatagtctagttatgaaagagtcatgtcaaaatggaaatcattaagaaattggaaatcatggtaaaaaaataaaaatggtgaccatcaaactcatgggttgtg

SEQ ID NO: 415 - protein, 1296 aa, Mus musculus
YKVRKLKSKTMGDTAKPYFVKRTKDRGIIDDDDFRRGHPQQDYLIMDDYAKGHSSKMEKGLPKKKISPGNYGNTPRKGGVSSNPYAFKNPIYSQPAWMNDNHKDQNKKWLSDELAGNADSWREFKPGPRIPVISRSRKESFQESDDAYRWQEGRGCRAVRRLFQKDLSSLEAMSEMEAGSPENKKQRSRPRKPRRTRTEDSEQDGDLDGPVIDESVLSTKELLGLQQAEERLKRDCIDRLKRRPRNCPTAKYTCKLCDALIDSIPFAHKHIKEKRHKKNLKEKQEEELLTTLPPPAPSQIHAVGSAIDRVVQEFGLHSENLDQRLEIKRVMESVFRHKLPDCSLRLYGSSCSRLGFRDSDVNIDVQFPAVIEEFSLNKLGNFSLKDVEKDSVVWEYTDNSTGDTSSAKEEAPKETAAKKGQVPLTFNIKHQPSVPVGQLWVELLRFYALEFNLADLVISIRVKELISRESKDWPKKRIAIEDPYREAKNGGPEPQATNIDKLGNAAVAQDPGVQTSGDCRAQLVTLKNTTEEVGSPAKEKTGGVHIPAHQESSGCVQAEVSCEGLEDATAELPETGSDNEEVRRKTKHPLSTDDQGLSSSKHPELQNCGSLCGLQADNTLELSINLTEDEEGVANEHQVDSRYAGSGEEDALSEEDDLAEPAKGEDTGECGENVGGTLLIDLNRITLKEESFPEEDLPGDQSEFFYEFRKLTFTKGKSPTVVCSLCKREGHLKKDCPEDFKRVQLEPLPPLTPKFSNILDQVCVQCYKDFSPTIVEDQAREHIRQNLESFIKQDFPGTKLSLFGSSKNGFGFKQSDLDVCMTINGHETAEGLDCVRTIEELARVLRKHSGLRNILPITTAKVPIVKFFHLRSGLEVDISLYNTLALHNTRLLSAYSAIDPRVKYLCYTMKVFTKMCDIGDASRGSLSSYAYTLMVLYFLQQRSPPVIPVLQEIYKGEKKPEILVDGWNIYFFDQINELPTCWPEYGKNTEPVGQLWLGLLRFYTEEFDFKEHVISIRRKSLLTTFKKQWTSKYIVIEDPFDLNHNLGAGLSRKMTNFIMKAFINGRRVFGIPVKGFPKDNPSKLAYFFDPDVLTEGELAPNDRCCRICGKIGHFMKDCPMRRKVRRRRDQEDTPNQRYSESKEKRSKEDKEIQNKYTEKEVSTKEDKLTPCAAAKAKPVRAAVDLGREKLLRTPTEKWKRQDDRDSREKRCFICGREGHIKKECPQFKGSPGLCKSDYVSAYSSPSPLRPVAQAVLLHEDKKKQKTTIFLSPQSGSLSSKYMTQGRASVKRTQQES

SEQ ID NO: 416 - DNA, 71207 bp, Homo sapiens
tttgacagtttttaccatgcatgcctgtgaaagtaggtttagaaggttatattgcctttcagtgctagtccactctagatgtgaatgggtatgttccaagaagggattttagtaatttctttccagtttttatgttgttagttagaaggctgaatttcaggatttcatcctttttttgtttgtttgttttttagacagagtctcactctgtcacccaggctggagtgcaatggcgcaatcatgactcaccacagcctcacctcctgggcttaagcagtccttccgtctcagcctcctgagtagctgggaccacaggagtgagtcatcttgctggctgatttttttcatttttgctagagatgacatctcactatgttgtccaggctggtcttgaacttctgagctcaagcagtcctcccaccttaccctcccaaagtgctgggaattacaggcatgacccactgcacctggccccatccatattttaatctatattttcaatccctttactttgatttagccatgtgttcttggagaagttattctcttggattcgcattgtccccatctgtacaatggggacagtattagcaggattgctgtagggattaaataaggcagtacatataaagtgctttacatctgttgcataataagatacaccatcatggtagctgccattatctgacagaatttctgcagccatccacttctgtataaaagcagtaggagttgattgaggtctttggaggaagagagaagttactctttctagaaaatgacagcaaatatggttatatggagaaacctttgtgaccagaagagaggaagagtttaaaaaaggaattcggttccctatcacttactggcttgtgaactaataggggcttttctaaagggtattgcagtattattttaaatttatagagtttttgcctaagaaacctgtaataaacactgaagttagatgcagtttttttgataatgtttataatgataagcaaactaaatgagaatggatacatctctaagtaaaagaagtgcttatctgaaaaaaaaaaattgttcagaccagaaatactggccttaaaagattatgataatttaattgggagtcgggggagtattaaaaaggaaatattaaggtagcgcaaggtagcctgattttctgttgaaatgacaacttaccttttagtattttatttgttcagtgtattttgattgattttttaaaactacttttccaacactttaattttttttaattttttaattttcttatattgtggaaggtgtttgcagaattttgagatagtcatctcaggtagttttagcacaatgcttgctgcttatcctttagcgctctcagcaagctttttataaaattggaggtcctatatttccttttcagcctgccagttcattgtaattgccatactagtagtaatgagttcctctgaaaacttgatggaggaattacttcatgtagggcttttcagtaggtttatgtttccaagcactaatgtgttactaatagtttcattttttaaaactcgatataagttatcaaagctatctaaaacaattttttatggtttaatcccacaatcactttaacaagttgaaaagttataagttttaaaaaggaacaggatgatttttattcattataaggattatagaactaatagcagagtttataaacaaatgtacttagagaaaacttttgtttcaatggccagttgtttttttcctttgaaatatgctcagtgtacaggccattcaaagaagctaaaatgaaggtaaaggtaaaatgagagatagttgtccttagtaaataaaattttggcttggacttcttcatattaacggagggacccggcttaggtgttattgatggctaaatttgcaactaaatgatgatttttcactccagatgagtatatagttgatttctgagttgtccaggggtacattttgcattttgccttattgagattgttcacttatagaagatgaaagcaaatgtggctggttttaatgagaataacaggtgtacttacagatattatagaatatgtaagatatatttacaatatgtattgtaatattttaatataatagaattatagatatacttgccttcagagtataatttttctgttgctttgctatgctcagcagtataccaggaagagataataaaaatcaaattgtatgattgaagtagaattcttttaaattttccaaaaagatgatttctatggcttaatgtctacaggtgatgtgctcactgaatacagtattaaagcattttgtccataggacagctacctttccttctgctctgcatgcagatgtgatttattctctcacatgatttaatacatatgtaaggtctgctttttactcaggagtggcattatttaatattgccaataatatttttcccccaccttaagaaaacaagaagcagaggtccagacctaggaagccacggaagactagaaatgaggaaaatgagcaggatggagacttggaaggccctgtgatcgatgagtctgtactttcaacgaaggagctgctaggcttacagcaggctgaggagagactgaagagagactgcattgacaggctaaaaagggtaacatccttatatatatatttgttggttagaatcctggttttagcctcaattttgttgttaattgagtatgcatgctctgatcaattagatatcctactttggttatcagtatttaagcactacaagttaaaagtgatgtccagtgtgatttaataggattaggagtcattgctattatacttaaaatgactgttagggtagtgataaagggaacaataacagtagcaattttaaaagtgaagaagaagccaggcacagtggcatgcctgtagccccagttacttgtgaggttgaggcaggaggattgcttgaactcaggagtttggggctgtagtatgctataatggtatctgtgaatagccagttcactccagccagggcaacatagtgagactcctgtctctttagagaaaagaaattgaaggggaaatcatttcctggctgattttgtttatctgaatgtttggttttacttatgtctctctctaaataaatctcttcaaattatagcgaccacgaaactaccctacagcaaagtacacctgcagactctgtgatgttttaattgaatccattgcatttgcccataagcatatcaaggaaaagaggcacaagaaaaacattaaggtaaattgaatgtaacccaaacaagtctgcttacttgttagttgttattacttgtcatctttgtggctttcttctccttaaggctatgatattgataactttactgctttatttattgaatatatttgagccaaaatacataatactggtcagatgtattttactggttaatcttgtgaatttccttaagggcagcatcaggttatatgaagtcattgataggacccaggtatatgtccttatactagtattaaagcaaacaatgtttgtaagtgctgtttttaatattctttccttacactttctccttatgcccacctatcctctgttaccactgatccacattatgtgcataaggaagtatgtatatgtttgataggatgaaaactaacacagctaaaatgagaagggagggctaagaaaaagaaaactctatagggtgttgtcttcatgagtggtagaaggtcaaaactatgtgtaagtcatttttaatctcaacatttgatcttaaaaggagaagcaagaggaagagttgctcactacgttacccccaccaacaccctcccagataaatgcagttggcattgccattgacaaagtggtacaggaatttggcttacacaatgagaacttggaacagaggctggaaattaaacgtatcatggaaaatgtgttccaacacaagttaccaggtattttctagatttgtttttctatttaactacctaaaagtacctcattcatttctcctaccaatagtaattttcatcaaataaaaatttatttaccatgtcatgaagctcttgtgttttctatttttttgttttttgttttccctggctttccctaaggtaacaaggactttcatatgcattgtcattataaacctgtttccattataaattttaccctgtgtgtgaactttaagttgaatgccctgcattattggggcactgtgggactcttgtgtatgtatgtttccctttccgctcatctaaattgacaccatattttgagttaaaatcaagagaagtatcctgaagttattttcaggttattcatgtcaaaaaaaaaaaaaaagattttatttaactgtacttaagagaattgcagcatctaaaatgaactttgaaaactagttttaagaaatttgtattggattttgtgcactgttgaattgattttccaagttatgtctgtcttctgcctgtttttaactttagacctttggcatgatggggagggggcacaactatttggagtgtattactatgaaaatttaaggtcaggtatgttcaatgcctgacacaactgctgtcaatccttgatggcaacaaaccccaccccacatcatcccccaacccccactggccattgctgtttaggtaaatggttggaatagcttcatcattctcaattcttgctgtgcatcagaattatctgtgaagccatggacaactatttttacaaagctcgacaagtgattctgatccacagctagggttggaatcattatttatatttgtcaccttataaatcttaaaactgtttgttctactgaaagatcatacatatagtatttgtaacgcatatactttcataagaataagggaaaataatctcattttattatacatgtatttcctgaaaagtcagttgtaattctgatgatttttactgtaaaatttcatgtaaaaatgaatgtactttgttgtggaaaactgctaaaacccaaagaaatcacttgaattttagcaaaccttaaacaaacaagaaaaccaacccctgatgagaaaggatactattttggcatcatagtaaaacactgaaaataaatgctatactatagatagtactcatatacacacacatcttcctctgaagagtgaagtgtctgctacctatgtcagtgatattgtaattatttttcaaaagtttattgggattttgttacagcaaacgctttttgttcataatataatgagaaattcatattaaatatgtcaaaagattatttttattattgttttactaaaacctccttatagtaaattacaccaatgggtgcattctaaaaggtgaaaagaaacgtttgcattagctcttgaatatactatcaggtttataaatttaaacaaagacattctttttcaactggcacatttaaaaaaatattttaaatagtattttcttcataaaatgtgatatttagataatagtattttattcataaaatacatgataacgtagcaatttgacgttttacaactgacatgaagcgtggctgttaagctaaatcatagttgatgcagccttccctattaaattaagtgaagagcaaagagccacctatttctgtcctttgtttatgctagtcttgaatacaagtttgcttttgtgtgtaattttaattgatggttctgcttctgaaatagcagtgttttgttataacttttgagaaattctactgtatttattacttttatttatttatttattttttagattgttccctaagattatatgggtcatcctgtagcagattgggtttcaaaaattcggatgtaaacattgacatccagtttccagccattgtaagtacaaaatgaaatgctggcactttcagagtggtatggaaattctttcttacaaatgtaaactgtctatgaatatattttagatatttgaagatattttaagtgtaatgacagcatccgcttgccttcagtttcagagcttttttttttaatactctgcaaattttcatacttattttagtctatagatcttttatacatccaacactggtttttcaaccatgtgcacctgatgggggtgtttaggttctgttacttaaaaagagtaaattttcttgataaaatcaactttccagtggcagaaagggaattcagattttaaagtgtagatatttaaacatttatgatctgcaagcttaattgtctctggagtttcctctttttgtatacctattttgttaaaataattaggcttttaaagaatcacacctagcctggatttctggtttaaacatgatttaaaagtatgttgatgagttagaattttaaaactggagtgtagctggacacggcacagttctgtagtcccagctactctggaggttgaggcgggaggatcacgagcccagaagttcaaagctgtagttagctgtgactgcacttgagaattgccactgcattccagcctgggcaacatagtgagaccctatctcttaaaaaaacaaaaaactgaaaggcactttagtagattatccatttctctgctgttagttcccacaggcctgtttatagatgatgtgtttgcagttacttgggttgcttgttaaaaatccatattctgagctgggtgcagtggcttcaccctctaatcccagctactcgggagactgaggttggagggttacttgagcccaggagttcatgaacagcctggccagccccacctctctcaaaaaaaatccagattctggggccccagaggttctattttacaacctcttacttcttgctaaacctgagtgctgtagctacctggtaagctacccaatagactgtttttttaaccttaaattctgatcagtgatttaccagccatagcagttattttgatccggtgtcattaattcatttagcaaatattcactcatcccatttgtatggcagacatactaggttataaaggacaaaacagagatggttcctctttatggaactcatctagtaaaggagattagtaattaccttgtaattatagtgagagctgtgcaggtaaaggttcagggatagaaaatgacaaggtctgggcagagatacagcagtcatgaaggcttctttgaagagggaacatttaagctgagttctaaaagacgaaaaggagcctgcaggagagggggaaacgggagggaaaagagtttcaggcagggggagcagcatttgcaaataccctaaatcaataaagagtttggcatattcaaggagctaaaagaaaggttgtgtaagtatggtgaagggaccaagaaaaagaagagcaggagattaggatggctaggtaggctgggcttgactggccgaattgtgtagaccatggtaaataaagaatttggttttgacctaagggcagtaagaagtcattgagagttgtaaggatacagtttatgattttaaatggccctggctccattgcgaaacaaggattttaaaaagaagtgcaagactgactccgggaccagtaagctatctgttgcaatggtattagagtgaaaggtaatattgttagcagtttgacaaacttccagctaccactttgagacttgctgagaggcaggttaacctcaataattagttaaatcagaagttagttgtatagtaggtctcttgcccacatttgtcttcatttggtgttgatctgtctgtctttgactgacatatgcaaacaacatagtgagtaatttctttactttgatagcaatgtgcatttctcatttagaaaggaatttggggaacttcggatgactcttatatcagtgaagcaaaatcacttaggaataatttcatgtattcattgatttatttcctagatgtctcagccagatgtcctcttacttgttcaagaatgtttaaagaacagtggtaaggccaaattccacatttaaaaaatttttatgttgtctataatttggatctatcttatttctcaaactttgaaaatagcaaggcatgcttttaaaattatttatgtgggtaatatccaaagcaaatgcccatgaattattaactagagtcctgttagtagttctactatgcagaataaccatttcataagtaaagcttttagcttgatgacatcatcactatttataaagattaaatgagtcctagatgtgactaagaaatgcaaaatatgtaaaatgtactcttgagggtaaaactgaaggataatctgcttttatcaatggttaaaatcagtattttaccaacagtgaataggtgtaacccaaccctaattaatgaatccacagagtggtgcccatttaggtttatcagttgtctaatacaatgtccagcttggggctttatggctctttgtgttttacatagtccttatgaaactgtgtcatctcttgaattagtcatccccatcctccttgttttggttaaattttgtcttcgatcaatacatattttgacactgaatattttagtagcttttacagcaactttgtttttaaatgtattacctatatttctaattgttatccatataacatttgaattttctgatccaatgatgtagtcacttataatgaaacattcactttacaaactaagggttttacactaatgtgataacttggtttttgaatgtaatattttttccttttcaagtcattgcagagcattatttagtagtggtctttcaaaagactcaacagctaagggacaactggtacttgtactttatctggttctgcttttaaacaaagctttaattaaccaacttaatatttttcttcttctttcctcagactcctttattgatgttgatgcagacttccatgctagggtgccagtggtggtgtgcagagaaaagcaaaggtctcatttctttaaactgtttatttactaactctcaacttgccaaaagcacaagtactttactacatcttaatgtccaatttctagaattataagctttttatttggttatcacacatggttcctactaacattctccctatacttttggcatttgatgtaaaaggggaaaatctcattttaaaaataataaaatgacttaaaagaaaaaatatagcaaggaagtatttcggtccatttcaactcgttaaaaaacagccttattaaatagttacttgctgtaatcacctgtattttgccaccctttttggcagcatttatggcagtgctgagtaacagtgtgacctctctggtttatctctctctgcctctgtgtgaaagcattactgtcactactgtaaatgggtggtttataggctgtaatgattcttcattaggtacattcctccaactcttgggaaaacactcttttattgttacagagatgaatcatgctcccatttgaaacttttttttttgagacggagtctcgctctgttgcccaggctggagtgcagtggcgcaatcttggctcattgcaacctccgcctcctgggttcacaccattctcctgcctcagacttccgagtagttgggagtacaggtgcccaccaccacgcctggctaattttttatatttttagtagagtcagggtttcacccaggatggtctcgatctcctgacctcatgatctgcccgccttggcctcccaaagtgctgggattacaggcgtgagccaccatgcctggcccgaaacatttgataatattttccttatttgcatttccccccaaaaaataatatttgaaaacaaaattattaatccgaaaaataaagtttactcagaaaatagccacgatatcttttttgtaaagaaaatttattaaattactcataaagatgtagtttttttcacttttaagctttttatttttgaagtatttattatgcatgtatattagttgttggcataaaagacactttgagacctgtgtaacacttttttctttttttctttcccatcctcctcccccacctctcaccagtggtcttctgtgtaaagtgagcgcaggaaatgaaaatgcttgtctgacaacaaagcatttaactgcccttggaaaactagaaccaaagctggttcctttggtgattgcatttaggtactgggcaaaggtaggcttgaggtctttatgcatgaatacattctacatatgtataagcagtatgctttgatttttacttaatttaatcttcagtgtttaaatgcaaatttatagacatcaaaagagaaagacatctgaattttgcaacagaaacgtacagacggaagattcagtgtttctgtttcactttaacggtattgctcaaaagatcaaaatgatttatagggcttattaaaaatcagatttgtgagttaaatctcagaggataaggcccaggaatttacattttaactagtttaccacagtggttgttaggcacaggaacgttgagataaagcttctcatatcatgtccaataacatacacagagacggcaaaaaatagaagatactctctgatcttgtttacatttccataatgttttaaatatatttcaattaaaatactcaaacagtagaagatttaacgttcccccaaaatgtgaggttgagtcatgattataaaattgagattctgtcgcttgaacctgggaggtacaggttgcagtaagccaagatcgtgccactgcactccaccctgggtgacagagcaagactctgtctcaaaaaaaaaaaaaaaaaaagagattccatgtatgtgcttttagagaaaatcaaaagctttactgattcaggtatatcaataacaatagatacttcccgtttcttggatcctgaatgaacaacggatttcccactcttcactggctaaattataattataatatgctatcctttgaaaaccaccgcctgcttcatcactaagtagaacatgcccttttagttgttatttccattagtggtgatgagtttgtccacgttctctccccacgccaatctttgtgaccaaagcatgcatatgcaagacgctatgggttagggtaagaggaccattgaactggcttaatgtgtaactgaacaatcgtttttaattcattaacatgtattctaaacaaatgaatgaattgaccatggatatcaaaaaataaaataggaaataatattttagggccatccacaagtgagtatggttaacaggattaaatattcaaaattgaaactatcacttaaaaccacaatatgtggttgctgcaaaagtataaggaagttgtatattttgtaactgctattttcagctgaagaattaccgtaaatcatgtagtaaacaagaatgaggttacaggttttaggccaaatcgtgtaaatgacaaattcatacaaaaagaatgcttaactttcttttctcttgtttgtagctttgcagtatagatcgccctgaagaaggaggtctgccaccttatgtgtttgccctgatggccattttctttcttcagcagaggaaagaaccccttttgcctgtatatctaggatcatgggtataaaacattttttttgcttatatatctgaacagattttattacaggtccacaattaaattttgcataatttcaaaatctagacacctaaccagaactgacatggatttatttattctactcatgtgaatattcatacctttcactgctgaaatactaatgtgtttgatttcagtatgttgccctataacctgcttagggatattattacctttctagactgcaaaatctcttaatttttgaaatatgtatggtcctgagacgaacaagagactgaccctgtaaatttaccatttggtacattctttctttgggtacagttttctaaattgatacttgaatttacatatcacctccagacagacagactgtgggaagcatttggttcactgtaacttactttctgtttctaatctatttctccccataacctgtaaaacaaaaaaatatataaacattgaaattgctacctgtaccacaagatgcagaacctagtagtcatctcttgaataatattttgacattattttaaagatgaattagaattcatgtgatcactctttctttctggataaattaatgttgagttgatttgttcaagtaagatttaagaagagaccatctgaaagagtcaacatgatattagctcatcctcttagaaaccttgtttgtaatcccttggtattaccttgatacacttttatgtgtagaaaaactcccattttatagaaagaccccttagtgaaaagcttactttgacacattggctattgtaactacttttcttaatgcacacaagtttctctcatcatttaaggagttcttaacaatgagtacacatcaaaaaatacatttaaagagaattttttccttatactgaataaggtgagattaagcagggacttctgtctaccaggccgtgggaataaagactgaagtagaataactcacttagaaaactatcctggcataagggattattgcatgctgtgtatcctagtaacctaaaggtagttctcttcgtgcctgtggtactgagagaattcagagccatgagagggtatctctaccagactactgtcctggtagaaaaaagagcaagagaacaaagtcaacccttagttgataaataactctttccagcacacccaagtaggaatgtgtgaaagtctttgaagttttcctttcaccttgatctaagagagataggaatttaggataggattaaatcaggtggactcctgcacctaaaaaaaccctggcacaagttggataagttgccttgctcactaccatcttactgaatgagatctgctttttcatgtgtcttgatcttctctaagtagtcatctgtcattaacatgagaatgcaggaaaaagaaaaatctcttctggtgatgagattctcctaaggatacttcagggtagtatggataccctttcctatggccagcatattatttccttgttagtgataccggaaactctctaaagtgatactgaatttgattttgattggatcatgtttgttcaaaatttaatgacaaaagcaggtatgcagtgatcaaacactggattgaaatcattggatccattaaggcacactaccacccgaaccaaaatgatcctgcggtgttcagcattttaaactagttaggaagtgaagagaatggaactaatacttactaagtatctttatgctagatattttacatacattatttctgcagaaaatccaatgaggtcctcataattatgtacatgagagtatctaactgttaattccttcaaaatatttaaagcactgtgtatactagtcattgtagtagtgcctgaaatacaaagatggacaagaccaaattccctgtcaggaagtttagtgtattgtgcctgtgttctctgatctgtcttttcacaaatcttttagtcattctgtcccgacctacccagatctcttccatgttggagactccaaccctctccaacctttattcccaatcataattcccattttattgtcattaaatcttgatatgattgaagttaatcatagtgagttgtgaatgaagaataattttatattataaaaacctagtccttagcagatattcatactttagagatgccaggtaatatagtagaaaaaagggtgattttcaagtttaccagcactgggactcatctctgttttgccactcacatccttgtgaccttgagcaagttatttaatctctgagcctcaatgtcattctgaaccttgaatgagataatgaatgtaaaattcctgaaacaaggaaggagaacaaatgttatagtccttttctccttcagtagaaagtcaagttccacttatggtgtggaagtgtgaactcctaatcaagtgatccttctgcaaataacaactataaactctgggcaacatacagaaacaacagcatcaaaaacctgcagactgaacaaatgcaaacagtctttagaggggagtcaaaacttggagcaaatgaccaacacagagtgagtctcctgtttttctgtagctctacccctaaaggcaactctgatttaagacaaaaatcagtcctcttcctggccagaggaaccagggccaccagaagataaggtgtacaagaggaggaactgaaaggaaagataacagataagtggaacccttaaaacccttaaaaagaaccctgggtataaaaactcaggatgtctctgcccaactcctgaaccagtttagtttggcatgaaaggagcccagaagtcgtcactctcatcctcacaagaaaaaaaactgaacaaacggaaaatcaacaattctttttggatccatcagacaattgatgtcatgggcaaaccactgcccccagaattagagagcagggtaatacagtgaagcacagcttaccagagcagaaggccaggagcggaatcctgccactgaagccaatactagggtagaaaaatttaaagtgtagttgacaaatttccgaaggctcagtttggacaagcttgagggttaaaaatttctcccattcttaggagggcttcctcagacttttgtgtgagttatacctccaggaatcccactaagctctgagggtaaagacctgagaaaaatctcccagtgcttctggcaggatgagaggaaaagttgccatttagaaataatgcccagagcattctttaattattgaaagcctgcccttcggaggtactcttactgaagcctaaccaccttgggttttacttgccacgggaagggaggtacctagctccactgctccagccttcctttctcatctaagtaagggtggtagtaggagaactgggaaatagttatgaaggtcactgtctaggggcacaagctcactaaaagactgagacctaatcttaggactatacagtgtttcccctctccagggatcacaaggtctgaactacaagtctcagaccttttttaagaagtctttagggaaacacagaggcaacaagggagacaaaaacaaggacaccagaggaattttcagctacgacagctgcagaaaacaataaacatcctaactcctagccagataaacataaaacctcaccctaaaagcctgtttacccagtacatcgtgtctagctttcaacaaaaaattacaaagcatgctgaaaggcaaaaagcacagcttgaagagacagagcatgtgtcagaacttaagttggatatgacaaatgttgaaattgtcagaccaggaatttaaaataataatgattaatatgctaaaagctgtaatggaaaaaatggacaacatgcaagaataaatgggtaatataagctgagaagcagaaactctcaaaagatttaaaaggaaatgctagaaatccaaaaaattataacagaaatgaacaatgcctttgggctcattagtagactagacatagccaggaaaaatctgagtatgaagtgatagcaacagaaaattctcaaactgaaaagtaaagaggaaaaaggaacaaaatacctaagaactgggtcagttagtcaaggttgaaacatatgtataatgggaataccaagaggagaaagaaaaaagaacagaagaaatagtagaaggactaatgactgagaatttttcaaaattaatgccagactcctaaaccaggcctgtgtggggcagattgaatatagttgggggccaaggcttaaagaactgatgcaagagctgagccacaatctactggaggtgtgataatttccagtttgcctaaacaagttaattacctgctgctaaaacaaaaacatcactttttggagtaaaataaatgattaaaattttaataatataatatttacaatgtctaaaatgcaatccagaattactcagaaagagtcaagaaagtgagacctactctcaaaggaaaagaaaatgaacaaaggcaaactccaagatgacccagatgcaactgtcaaagacattaaagcagttattatagctgtgcttcatgacagaggaaataatacatgtggaataaatgaagagataggaaatgtcagctagagaagtaggaaatatcaaaagaaccaaatggaaattttgtctgagtggacaaacagaaaacactcaaatgttagacctaaaaccaatgatatcagtaatcaacttaaatattgacagactaaatatccccactaaaaagcatagattaccagaatttatttatttatttttaactttcaggttcaaaggtacatgtgcaggcttattatataggtaaactcatgtcacgggtttattggacagattattttatcacccaggtactaagcgtagtacccaatagttattttttcttgctcctctccctccttctacccttaaccttcaagtaggccccagtgtccattgttcccttctttgtgtccatgagttctcattatttagctcccacctataagtgagaacttgtggtatttggtatttgattttctgttcctacgttagtttgctaaggataatggcctccagcttcatccatgttcctgcaaaagacatgatcttgggtttttttatggctgcatagtattccacggtgtatatgtaccatattttctttatccagtgtgtcactgataggcgtttaggttgattccacgtctttgctattgtgaatagtgctgcagtcaacattcgcatgcctgtgtctttatggtagaatgatctgtatttctctgggtatatactcagtaatgggattgctgggttgaatggtagttctgcttttagctctttgaggaaagtgttcccttttcactgcaaccttgccagcatctggtatttttgactttttaatagtattctgactggtgtaagatggtatctcattgtggttttgatttgtatttctctaatgattggtgatgttgagcttttttcatatgctcattggctgcatgtatgtcttcttcagaaaagcatctgatcatgccctttacccaaactttttaatggggttattttttccttgtaaatttgttaagttctttatagatgctggatattagacctttgatatatagtttgcaaaaattgcctcccattctgtaggttgtctgtttactctgttgatagggctatgcaaaaattcttcagtttaactagatccccttcagaatgaattttaaaagcaagactatattctagaagaaataaattaaatataaagacatataggttaaaagtaaatggatggcaaaagatgtaaattgtaaccaaacgagagaggctatgttaatatcagatgagattgatttcaagtggaaaaaatatgccaaagacaaaagggacattttattagggtagggtcaattcattgggaagacaaaacaatcgtaaatgtttgcaactattaagagggcaccaaaatacatgaaataaaaattgatggaatatattctaccatcagacaaggagattttaacagccttcatcaattgacacctgtgttagctaaacaaaaaatcagtatagatagtataaactgatacatcatatcaaccgccttgacctaattaatatttataaaacactatacccaataactggagaatacatattttttacaagtccatatggtacattcatcaagatatactacatgctggttcttttgtttttttaatttaagagacaaggttccactatgttgcccaggctggtctcaaactcctgggctcaagcaatcctgtgtcagcctcccagaggagggcctatgctggttcttaaaataagtcatagtacatttgaaaggattccatggattaaagaggaattcaagtgggacattaaaacatattttgaactaaataataataaaaatgtaagatagtttggcatagtggcacacaccctagtcccagctactcaggaggctgaggtgagaggattgcttaagcccaggaggttgaggtcgaggctgcagtgagctatgatcacaccactgcactccagtctagaaaacagagcaagaccccatctcaaaaaaaaaaaagaaagaaaaaaatacaagatatataaaatttgtcagatgcagctaaaatagtgttcatagggcaagttttagatttaaatgcttaaattcaaaaagaaaggtctaaaatcagtgacctaaaggtccacctcaaaaagctggaaaccaaaatgggtgaaagacctaaatgtaaaagttaaaaactctgaaactcctagaagacaacctagggaaaaacctttgcagaaaggatttcttaacatactaaaatcaataaagaaaaacattaagaaatcaaactttatctaattctaaaactgcagctcttcagaaaatatcactaaataaacaaaaactcaagctacccagttgagaaaaatattgaatacatacatccaaccaagaaatagtcactacgcctaatattttccaaagtgttttctgtggaagactagttcagtctgtcaacaaatctttactgagcagttaccatggccaggcaccaactaattctgggtgttactgttagaagtggtgaacagggccgggcatggtggctcacgcctgtaatcacagcactttgggaggccaaggtgggtggatcacctgaggtcaggagttgaagcagcctggccaacgtggtgaaactccatctctactaaaaaaatataaaaaaattagctgggcatggtggcaggcgcctgtaatcccagctacttgggaggctggggcaggagaatcgcttcaacccaggaggtagaggttgcagtgagccgagatcatgccactgcactccagcctgggcaacagggtgagactctgcctcagaaaagaaaaaaaaagaagtgaacaaaacacaattcttgccctcgaatttatacatccaattggggcaagagactaataaatatatatgcagtggtggtactttctctgaggaaaaataaaccagggtaaggaggacagagaatgataaatgtggagctccttagagaaaacatttgagcagagctgaataaagtgagggagaatgagtcatagtctccctcactttgttagggggaagagcattttaagcagagggaataccaggtgtcatctctgagccaagaagatagaaggatcagagaagtagaaaagagccaggttactcaggccctggaaaggactgcacttcatctagagtgagacagaaaccactatgaacaggagagtgtgtcttctgttttagaaggatcactctcttctaaaccaatgaagtagcccatttggtataaaaatacatttgggaaatgtgatgtcacatccatactccatcccatattattttgttcattaacctgtttttgtttgttttttgttttgttttttttttttgagatggagtttcgctcttgttgcccaggctggagtgcaatggcaccatctcggctcactgcaacctctgcctcccagggtcaaacaattcttctgcctcagcctcctgagtagctggaattacaggcatgcgccaccatgcctggctaattttgtatttttagtagagacgggatttctccatgttggtcaggctggtctcgaactcctgaccttaggtgatccgcccacctcagcctcccaaagtgctgggattacaggcatgagccaccatgcgtggcctgttcattaacctgttttaaaggctgtgataaatcctatcatacgatgaagaaacctgttcagctccgtttgacatttcacaagccttttcaactagaccattttcttttgcattaatattcattaatagcacataaaatttactttgaaaatgtccagcatacccagaattaatagtatttaaaattattttctaattagctggatctagttcttgtaattttcattttctagcaatatagttgtcttgtatttattaagcagttactatgtgctgtatgctacaagcagatactacctctatctgagtgccttatggtcattttttttatatcataaccatcccatgaaggaagtcctagtgttacccctttttaaaggaacctgaggcctacagagagtaagtaccttactcaaggttatacagctagtatatgaaggagctgagatttgggaccaggcagttttacttcagaacccatgacgtcagccactaggccattttgcctactcttagaatatttactgaggaattatttcacaaagtcaccatttcttttgcaaatcaaaaccttgttttttacttttaaaaatatttttaaatgtatagatgtctctgtgatagtccataaattatatcttttgtattttcgttgaactatgagtatttttttattccaagattagtagactgtgtttgatataagattatttctatcttattttagcatgtgtctaatttttcctagattgaaggattctcattaagcaaactagggaatttcaaccttcaagacattgaaaaagatgttgtgatctgggaacatactgacagtgctgcaggggacacaggcataacaaaagaagaggcaccaagagaaacgccgattaaaaggggacaggtctgttctcttttgtttctagttgtcagtttcacttgccaattgtgaagttgtggattagtcagtcttgtcttctttccttaactatctttactatttcgtggctctttcatttgccagtctgtttagtacctcgaacagacaagtaatgagaaaaggttaaaaaaaatattagatcactaaatccacagttatttatgtagtttctttgtgctggttcctttgaaagagactcagaattcaaaggtaaatccatatctatcctcaaagagcttagtcttaggtggtattatgaggtttaaatgtatgaaaggttaactagctttcagttactaaaataacagtgaatgcatatatgatttaatgtaccggtcccatactgttgggggtgggcaggggaatttatgcacaaggaaagaatagccattagaatttcaaacaaaaatctctgcaatgtcattatcctagtaataagaataagattctctcccaaataggtgaaaggcccctgatcttcccgttaccttttggggtaaattgacagtaacatccacaaaattcttggaatcgaatcccagctttatacaaacaagtcatgtcactcctccagttcatgttttactcatgcctaaaatgaggagttagtggtgaatcagattttccagttgtgttttctagaatccttgaacactgggaggaggaggagagtggtggtaccaccctacctctgctgccaccagaaccacttttatctgtttcttatttggagtctctgtagtggagaagagtataggctgtggagccagaatatgtgaatttgtatcccagctctcccacttcccagctgtgtgtccttgggcaagtgacttcgcctttctgtgcaccagtttcctccctactcatggggataatattggtaccctctcatagggtcacttacagaatgcttaactcagtgccgagcatgtggtgagcactcagtaaatgttagctgctattcttattttatttgaaaaagaaaatgttctctgctttaaagaaaaccagtttaagttcctgtagtctagatatttcaaaggtctctccagtttcatgttatggtattatcaagtcatttcagtgagatgcttaaaaatcctttgtaatgccgctatggataaagaggtaaaatgtaataatgcttaaaatttctggggggtttatttgtgtcctcaaactgtagtgtttgggacttagacaacttccatttttaatcagttctgccttgtaaagccaccagatgactttgtattacttgacagaacctttgtgattgagaaaaatagaccactgattttgaagcttaatataataaagtatgattgaaaacaaatttgtgcaccttagaggaaattacttttttcagtgtgaattataggaaaagctattgctgtaaatccatttaatgctttatttttacatttttatgttatttggaaagattaatcatgctgccacttctgaaataaagtgagcttcagacattatggggttgcatatggtgtgcactgtactgagatcaggagacattgagacattgttctcatccggccactgccaggcagtgcaaccttctgacaagccatgggcactcgtggggcttcagttccttctcttgtaatatacaggagttgaactagattacctcttaagagcatcttacagttgtgacattgtgtttcagtgatatatggatttcttgtacttaaaaaggctatacctacgtggaaaaaatacagagagcaaccaagtctgccagatgctttcccttgtttctgatttaatcctcatcactatcctgtgttataggtggtatcatccctactctgcagataatgatagcgaccattttttgaacactgtgtgccaggcactgtgctaagcactttacagacactatctcactcagtcctcccaacaaccctatgaggtgggtactgttatccccatttttcagatgaggaaacccagacttagacagattatagaccttgacccagatcatacacagctagtacatggcagagtttggatttcagatctaagcttgtcccaattccaaagcctgttctcttagccactgtgctgtgctaccagtctgagaatgaagaagctaagtcacagagcaattaagagctatgacgtggcagaatctctatttgggcccatattttcccctatcctaagtaatatgtactttctaatatattacatcgcagttatgttccaacttgtcagaagtctgtaactgtaaaaccagtgtcaatttctgatggcaagagttatttgactttaaaatcagttgtcactgacagagtcaatgtgcttatgtagcttctcagggcagtgagaggagtgtttttcctttttctctatgcctttagctactgtccatttttgtgtgtctgtgactgtaaaggtgcctccagcagcagtaacaggaagagttcagtgctgagaatattagcaacccatgcacagtcctctccacctgttattaacagttcaaaattaggagctctgtctggttaaataaaactgatcctgtctattcctgtgataatgactggattatagcatactctaatcctaatagtgcagtgaagtaatgctgttttaccacaaacaaaatagaagttagaattgatttatctagatggattgtcaggcttatatctttgttaaggttttccagatttttttaatttgatgcttaaatgatctttaattttccagattgtacttacatctgaaataacctgtatgtttctctttgctattaataggtgtcattaatattggatgtgaaacaccagccttcagtaccagttgggcagctctgggtggaattgctgcggttctatgctttagaatttaatttggctgatttagtgataagtattcgtgtcaaagaattggtatctcgggaattgaaggattggcccaaaaagcgcattgccattgaaggtatctcaaaatgtttatcttattcccccccactcttttttttaaaggtaccagtctaacagcatgctttttatttcagtctcttttcagctcctacaagtaaggtaggcctgccctcaaagggaaataaatagttagaatcttgcatgtgttaacagtgggtcatttcaaggaatcaaactgttcaccctgggtttttaaagtataaacaacttgaataatggctggctgagtccttgctttctttgtagattgcttaaccacttaaatgcctaaagtatgtttttcacagtgatgtgtaaatccccctttcctctttaccattctcacctctggattttttaattcagtccttttgtggattgttgaagttgtttagttttgcaaaggtgaggacaatactttttctcgtcaaaaatgtcattctccattggattcctctccagtagagagaatgagtagttatttttgacatatctacagtagcatttagaacttattcataaaaacacatttttagtgaagcctcatttaactgaaatcactttatcaaagacacactgatgtgccctgtagacatcattaaatggactagctcttctcagctttgcaaagtcaggaggttgaaacccctctagaaatcttaattctcctcctttaaataatttaaagaacctcctaaatggaattctcttatttttgcttgattttttttcaagctttatgttgcataagagggttttttgcattttgcataaattctgtgtgcagtcatggggatctcacatttttaaaccctcccctgcagtttctgtggctcagctcttctggccaattgcctaacctgctggagttctaggggaggagaaaagattgagagaagtggtgtctcctcctggtgcctccctctcgcccctgaaattcagtccagccaattcagtgatggggcttcccagggcagaagagtggaggtaagctcgataaaccacagggcctggctgagtggggaggcagagcactcagcagcagcagagcctggtgggaagatcttccttcccaagggcctgagagccacgctgataacatcttttctacctccacagtcacagagcacaatagggagaaggggtactggttctgaacagaatgggttcccttcatagagccgatgtttcagaaaatactgctttttgttcttaaactctgttttcttactccccacccccagtttttttttaagtctataaaatgcaagataaattttaccattgtttgttgtctgtttttatctgcagcaggctaatttttaaaacatgaaatatagtaacatatgaagagatggatttttctttctttcttttttttattacagatccctactctgttaaaagaaatgtggcaagaaccctaaatagtcaacctgtgtttgaatatatacttcattgtttaaggacaacatacaagtattttgctcttccacacaaaattacaaaatccagccttctaaagcctctgaatgcaattacatgtatttcagaacattctaaagaagtaataaatcatcatccagatgtacaaacaaaagatgataagctcaaaaactcagttttggcccaaggtcctggtgctaccagttcagctgcaaatacctgtaaggtacagccacttactcttaaagagactgctgaaagttttggaagcccaccaaaagaagaaatgggaaatgaacacatcagtgtccaccctgaaaactcagactgtatccaagcagatgttaactctgatgattacaagggtgataaagtataccatccagaaacaggaaggaaaaacgagaaagagaaagttggaaggaagggcaagcatctgttgactgttgatcagaaacgtggagagcatgttgtctgtggcagcacacgtaataatgagtcagagagcactttggatttagaaggcttccaaaatcccacagctaaagagtgtgagggacttgccactttagataacaaggctgatcttgatggagaaagtacagaaggtactgaggaactagaagactctctaaaccactttacccactcagtacagggccagacatcagaaatgattccctctgatgaagaggaggaggacgacgaagaagaggaggaggaagaagaacctaggctcaccattaaccaaagggaagatgaagatggcatggctaatgaagatgagttagacaacacctacactgggtcaggggatgaggacgccctatctgaagaggatgatgagttaggcgaagctgctaagtatgaagacgtgaaagaatgtggaaaacatgtagaaagagctctcctagtggaacttaataaaataagtctcaaggaagaaaatgtatgtgaagaaaaaaattcacctgtggatcagtctgattttttttatgaattcagtaaacttatcttcaccaaaggcaaggtaatcagtaccaccactagtcatagaactaggagactttaaggactttgaatgcatttaatttcaatttttatatactaggaattttcctattttggtagtgttgaacaagttggcctttcattctgatatgactgctcggtctgcttttctccttaagactcatgggaattagcagaggaagggaatgctattagtagtgaaaatagccactatgttctcctaatgatactataggatgtccccatctctcagatcatttgagtggatgcatgttatattttcatttcctttggaaagtgaataggtgactgtgtacttttaaaacatgattccagactcctttatttggcaaataaagtgttaagtcttgttttgctttgccatattcctgcagtctcctacggtagtgtgcagcttatgcaaacgagagggtcatctaaagaaggactgtcctgaagacttcaaaagaatccagctagaacctctgccaccattaacacccaagtttttaaatatcttagatcaagtctgtatccagtgttatagtaagttattcacatttcttttgatttgtcaaaatattaaattgacatttactcgagtctttagaatcactatcctatttaggtctctaaacattattagggaccaagtctattccattctccattgtatcctcaagcgttccatgtcatgtctgttctgtttgggacatgcaataaatgtcaaagaaggatgaggagagatgcagggaggatcttttttatttaaaaaaaaatttttttttaaattttgagacaggatctcattctgtcacccagactggagtgtagcagagcaatcatgagtcactgcagcctcgacctcccagactaaagcaatcctctcacctcagcctcccaagtagctgggagcacagatgcatgccactatgcctgactaaatttttcattatttgtagagacacagtttccctgtgttacccaagctagtcttgaactcctgggctcaggcaaatggaggatcttttatttttcttttaatatcaagtgccttctgtacttccttttattaacagcatagttgttgcatcaagatacatagcaatcatagcaggtttccttttttggagggtgatggtgagacagggtcttgctcggtcccccaggctggaatgcagtggcgcaatatcagctctccacagcctctaactcctggactcaagcaattcttctgcctcaaccacccaagtagctggtattacaggcatgcatcaccacacccagctcattcttatattttttgtagatacagggtttcaccacgttggccaggctggtctcaaactcctgacctcaagtgattcatccaactgagtctccgaaagagctgggattacaggcttgagccatggcgcctggccagcaggtttctttttaaagcttagtattaaatatctttccccatttaaattttccattactctgccaagaaaaaaaatttttttttttttgagacaaagtctagctctgtcacccaggctggagtgcagtggtgcgatctcagctcactgcaacctccacctcctgggttcaagcaattctcctgcctcagcctcctgagtagctggaattacagtcatgcaccaccatgtccagctaatttttttttttttttttagtagagatggggtttcaccatattggccaggcaagtctcaaactcctgacctccagtgatccgctcgccttgacctcccaaagtgctgggattacaggcgtgagccaccgctcccggccaaaaattaaaattcaagttacttgaagcctggacacacttccctggctagctgggctatgtaaaggttggtggtgttattcttcctgctgtgtaagcagatccaggccccagaaagaagggaccaggttatataattgtttttgaaaagtttgctacaaaaatgcatggcctgttataagccaggatacaaagtaaggatgagggtaagggagggacatttttttccagaagaaagatattttctgaagagtctcagttcataattttcccaaaatcgttggaagagagggtaaaatctcaatatgaatttcaaagtactgtctctgtgaggggccgaaagttgccttgctgaggatcttttattaagtcttaaaattagagtagtagcatttcccagctggcattctttgaaatgtttttctagatggcagttaataatatttcatcaccagaagtatacctaggccagcgagggaataacactacacactcccttctctcttagaattcctgggttatttccaggacatattagcatattgaaggtatctgagaaatattatttctaaaatttgaacatagaataatttttgagtaacgctaattaatagcctacttaacagccctttaaggaacacaaatttggggaagcattggtgtagagagccttaaagttttacaaaagaaaatatttaaaggatagatgttcagctgcttaaaatgaaggaacttgtttcacatggcttcatcataaggtgttcatccgtgtcagaagacacgtgttcttaacaagtccttttttttttttttttgggaaattttttttttttatattatgagctattaaaaaaactaggttctccttagggaaaaaaatacatgcaaatgctcacaaacttttaaattcacactttagcggggtggtgatttctgaaggccctttctgtaaccctggtgtctttcaggaaacccaggtggagatcccatgtttaaattactttccgtttcaagagcacttcttagattctttaaaaaaggacatcttaaattttacattactgttacaaaaattagccaggcatggtggtacatgcctatagtcccagctactcgggaggctgaggtgggaagatggcttgagcctgggaggcagaggttgcagtaagctaagatcacactactgcactgcagcctggccgacagaaccagaccttatctcaaaaataaataaaaaacaaactttaccttgttaatgctatctactgagaagacacaatgatttaggaatttttaaatttaagcttgtaagttttattttctaaaaaataaatttttttcagctttttctaagagtgtcaaccggcttattttgtcaatatgtctatttatttttaaacagaggatttttctccaacaattatagaagatcaggctcgtgaacatattcggcaaaacctagaaagtttcataagacaggactttccaggtaaatgatttattttttatttttaagaaaagtagtgtaaccttttttccaaatcagttcatgtgttacaagcacactgattttgagaatcaggatttccattgttttgcaatatacccaggatggtccttggtctgccaaatcctcatttaccaacagaaacagtgtagggtttattctagcaagtgccataagtgaatttcatttaatactatgtttagagtcaaagttaagcttacattattaaatgtgttgaggtgatctaacattttccttgaaatgtctttgcatttaagaataaaggagcacctggtaatctttcttgccatatacagcttgtatgtaaaggaagctttgagagaaaaagactttagcataaatgaccagttaatcagagaacataagtatgagattaatataggataattaaacaactgggtgtttttgattcatgagagggccattttgatcaaaaattaaatgtactcaggtaattagttattacttttcatatatccctaacaggaactaaattgagcctgtttggctcctccaaaaatggatttgggttcaaacagagtgaccttgacgtctgtatgacaattaatggacttgaaactgctgaggtacagtgaccacataaaacttccatttgctgtggcagtgtgatttaaccaatctagactggcattacagcttggtattttccaaatttatcagggcataccatatagagtgtgctgtttggcacagtctctggccaaatacattaagaggcttggaaaggttgtgaggaatgtgaggagcagaaaggttatactttcaccctgtagcaaaaagtggattggaaagtgttgcctgggaattctacatagccaaaccagcctcttcagtgtcccattggcttggctactatgctgacttggatcacacactcacataaggttacctgtaaagtttgttaccagacaggcagtgtggtaaatcataagagtactaaccttagagtccagaggcctggatttgagacaaacttgtttcatcagtacctaaacatgtggtctttggtaaataatcgataaagtataatatctgttcctcctgcctccgctgatttttgtacacattatcatggatcatgtgggtcaggagttagcaaacgatggcccttgggcaattcagccccccactgcctgtttttgtaaataaagttttattgggacagaatcacacccattcacatatgtaatgtctatggctgccttcactcttaagtacagagtttagtagttgtaagagaccatatggcgtgcaaagcaaaacaaacttgccagcccctgggatatctgaaggcatttataaaatataaaacactatataaaggtataaagtctaggaagtgctgagtccctattcttttaaatccttaacagcagtccaaatgctaaatatccaaatgaatgatgctgctgttgctgaagacctttttgtaccttttcttagtttcaagtctttctattttgaggatgtatctgatttgggaaaatagtcaaaagtgatctagcctgaatttgaataaagtatataagcaagattggctcaacatatggaatgaccctatcatacatcctcaaggtttatttatttatttatttttttacatggcttataaactagttttgagggcatttctaaagtaacattccacgtatgttctgggatttttataaccatcaaaaaggcgtatgttgagtcagcccaaatgtttttaagaatgatttatcaaatactatttatatttgctgtatgactttagttatatgcattataattctggctagtcctatagggaaataatttgagcttaatcactctccacagcaattcatcaactcttaaactatagaaggtctgcttagaatgaatgagctggggcacagaagcctcctctcatttattctgggacatggggtacatccgagtgatattatgtggaggggaagaaatgaaggtcctcaaccatggttcagagacttttttggaagccctaggtccataagcttcctgactgattttagcctttgttgcacacccaaaaacaattaggaagtagggtatttagtggtttttgtaccgtcaggatatttcctgtgaatactgactctaatacccaactagaaaggaaaaaaatagatatagactgacttgaaattaattacattatttctgaaggtaatggaaactatagccagtttcagaacctgtcttccagttttggttaagttctttatgccttctttgttgtagggattggactgtgtcagaactattgaagaattagcaagagtcctcagaaaacattcaggtacctctgtaaactttttctaaaaatatttctgactttttaattagtgttttctatagtcttcccttggtatccatggggtatttgttccaggcccacccatcacccctcaaccctcccttccccagcagataaaaaaaatccttagatgctcaagttccttatataaaatggcatagtatttacatataacctatatgcatccttccatatagttttagtcatctctaggttacttataatacctaatacagtgtaaatactatgtaaatagttgttatactgtattttttatttgtatttttttattgttgtatcgttagttttttattagttgcttttttctcttaaatatttttggtttgtgtttgattggatatggggatgcaggacccacagacatgaaaggccaattgtatttagagtttactaatgccatgaagcagtatagtggctcattcatagaataattgcaatattaatgtctttttaaaatcttgtatgcgtaagtatgaaagactgaggaattggtgataatttatatgcatattgttgcctagctcagttttatttcaagacaaagcctacgccagacaggcaagaaaggctataaatccttttcctttgttggcgttgtataagtcaaagtgtaggagttgctaattgtgtgaagtgtcaaggaaagcaccccggactgggcttgtgggttgaatttgcagctgttctgctcaacaagctgtatatgaccctgaacaagtccttcacttgaagcgatctctttttttaagaaatgggatcttgctaggttgtccaggctagtctctgaactcctgggctcaagtgccttggcctcccaaagcactgggattacaggtgtgagccactacgcttggcctgatctctttttttcattgataaattgaggcaactggactggataattattctagagtatttacagctataaaatgtatagattttgtaaaccatgcacagaattgaaatgctgttaacgtatccttttgttgtcatggcagctatggataccattaacagtgaaaaatcttcttttaaaatgtagttcagcaaacttctgtgctaagagctgaaaatgaaagtgaacaatatatggcccctatcctcaggaacttaaaatccatggtctgtccatgaaaagtttttgtacatttcggttaggaacagactttaagtcacagcatgaacgtgcacacacacctagacacacacatatatacaccttgggtgccacttttctttgaaattttttccccaggagttaataaagtacataccatgttgtttaaataacaggaggaaaaaaaatcttaattttggtttattcccaataaaaattaacctaaagtatacagaaattgggttaggctttgtttttttaaatgtacattgatttgttcacagagggcagaacaatataaaaaaaaaagaaaaaaagtgcattgatatacttttctttggtcattgaagtaaacatttcccttaacttgggaattccacctctaaagatcatgtgttttgttttgttttgttttgttttgaaggtcgtgcaaagaaactgaagtactaagttagcgtgactattaattttttagtactgagctagattttaactttgtgttttgaaataatttaatttcacatttaaaggaaagcagcaaaagttgcataaagagttccacatataacttttattcagatccaccaattaacattttccatatttgattcatcattccatcttttgcttgctctcaatttcttcctgtaccatttgagattaagctatagacattatgtcctttcccctaaatacctcagtatatatttcctaagaaggaacgatgttaaaaacagatcatttttagattagaaatgacttaggcacacagatgatttataataataatggaatgcagattgcctggaacaagaatttcgtaacagctagagggctgtgtttaaaacttcatatctttaaaacagtctccccaggtattttattgggtgcctcctatgtgcacagcactgtgttgggcacttagggatggtggaaaagtaaaaaaatctgtatgttttttttgtgaaagcttccatatcttaagaggtaaggtaatcttccaaactatgtaacaatgtaaggtaatattcaattaaataacttctaagaagagagaatgtgggaaagagttgcacaggggaggttgatggaagagatggaggttgctatgatctcagatgatggtgaacacgatttgaaaaggatgggaaaagaaatcatttctaagtgcatagatgtgaatgtgagactgtgggatattttggagagcagtgagaagattggtacatttggagattttcaaatgggaaatactaggagataagatgaagtctatagatatttggaagcactgaagtttcttcaggagggaaaggacccaataaaagcataacataaggtttttaggcagctggtgtggtattttagggaaggtataatgtagacaacagggcagcaggacctcagccagggtgccactggtgctaacaggaaaaagatatgagagattccaagtgggaaaatttcctagatttggtacctgcaagtaggaagtaaggattgaggtcactatctgggttatttgagaaccaggaatgtttgcagagaacacctgtgtgaaagtgtttagtttgccatgagcatataatctccaagacttaacattccagaaaacaattagaaatatggggttgccagtcagaattgaagatgaaaataaaacagtttttttgcattgaaagccttgaagaaaaagagagagattgagagaaagagactagacagaaattaagaaaagagactgaaaaggaactgggaagatatgctgtgaataaatccgagactttgaagtgtggtaatgatcaacagtgtcaaattccagaatgggaaggatgtgaagaaaagggcctctgtctaatttagaggcgagatagcaaagtactaggtggaggttctggaatcagactctgattttaaattctgtctcccccttgctggctgtgcaatcccaaaaagtcactcagcttcataacaagcactcagttcctcatctctaaagtggaaataacaattctatggcatttaagaaagataatacgtaaagtgcaaagcctagcatattctaagtattcagtaaagtgagcttccttgccccctttccccatcagattaagtttcatttcctctgtctgccacacagattttttcctgaaatgtcttctacctacttattttctcctgtgttctatgatgtgatcactatgtatctgctttttaggaaccaccacttagctctctcagaagaaactcaaactctgacatctcagaatgagcttatctttcactttaccgcttcccttctgcaggaaccaactccattaatctgcccttccttgtgaatcctttttcatggttgttgatattggcatccttggaatcaataaaacgggtgaaatgataattagcctgacccacactaggttcagtataagttgggagtcaatcttacctagatttgaattccggctccacaatttaccagctgcatattcctaagctagtgaatctttctgggtctctgtttcctcatctgtaagatgagggtgataaacctaaggaggtaatgtttgtaaaggactcttcacatatccctatcacacattaggtgctcaggaagtggtaactcttactctgaaagccctgatcctctcttactacccctagcttcccatccagttacagatgctctcaaacatgccttgcttcttctgtgtattcccatgccaccatgaaagttcacacccagttgtttttcataagtggtcaccctgcctctgttcctggtgcctccagtctgtccactgccagggttattgtctaactagatgtggtcagtgattcctcccaacttagaccagttcattggctcctctttgattctaaggataattctttttatttatttatttatttatttatttatttatttatttattattgatcattcttgggtgtttctcgcagagggggatttggcagggtcacaggacaatagtggagcagcataataaacttgtttatctggtcagcagataaacaagtgaacaaaggtctctggttttcctaggcagaggaccctgcggccttctgcagtgtttgtgtccctgggtacttgagattagggagtggtgatgactcttaacgagcatgctgccttcaagcatctgtttaacaaagcacatcttgcaccgcccttaatccattcaaccctgagtggatacagcaggtttcagagagcacagggttgggggtaaggtcacagatcaacaggatcccaaggcagaagaatttttcttagtacagaacaaaatgaaaagtctcccatgtctacctctttctacacagacacggcaaccatccgatttctcaatcttttccccacctttccccgctttctattccacaaaaccgccattgtcatcatggcctgttctcaatgagctgttgggtacacctcccagatgggatggtggccgggcagaggggctcctcacttcccagtaggggcggccgggcagaggcgcccctcacctcccagacggggcagctggccgggcgggggactgacccccccacctccctcccggatggggtggctgccgggtggagacgctcctcacttcccagacggggtggctgccgggcggaggggctcctcacttctcagacggggcggctgctgggctgaggggctcctcacttctcagactgggcggttgccaggcagagggtctcctcacttctcagatggggcggccgggcagagacgctcctcacatcccggacggggcggcagagcagaggcgctccccacatctcagacgatgggtggccgggcagagacgctcctcacttcctagatgggatggcggccgggaagaggcgctcctcacttcctagatgggatggtggccgggcagagacgctcctcactttccagactgggcagccaggcagaggggctcctcacatcccagacgatgggcggccaggcacagatgctcctcacttcccagacggggtggcggccgggcagaggctgcaatctcagcactttgggaggccaaggcaggcggctgggaggtggaggttgtagcgggccgagatcacgccactgcactccagcctgggcaccattgagcactgagtgaacgagactccgtctgcaatcccggcacctccggaggccaaggctggcggatcactcgtggttaggagctggagaccagcccggccaacacagcgaaaccccgtctccaccaaaaaaatacgaaaaccagtcaggcgtggcggcgcgcacctgcaatcgcaggcactcggcaggctgaggcaggagaatcatgcagggaggttgcagtgagccgagatggcagcggtacagtccagcttcggctcggcatcagagggagaccggcatcagagggagaccgtggaaagagagggagagggagaccgtggggagaggggagagggaagaggggagagggagagggagaggactaaggataattcttagcaaaatgtgtatgttctgtagttggacctttcccagtttctccaccatctcctatgcctcatattccattccctcaagttcattcggcaacctatgcaattctctggaacttccctgaacgtaccattctatttcaggcatctacactttttgtgtacagtttgccttgcctggtaaatttgctcaactgccactatttttgctggtttttctccctctttttcaaagcttagctcaggcaatttcctctctcctattgaagttaattcctattaacttcataacttctagctttaaggtgagtaacttgtttggaggataatcgtcccttaggctgttctccaaattagatatagtcacatggagagaacaggtgggaaccacatagttcagactctatagtagtttcctctgtttggtatttgtcttagtgacaacgacatacacatgcatatacacacatgcacacgtgtgcacatacgatccagtaagttcccagaggggagtgactgtttgattcttgtagttctaatatcaatatgtttaataaatgtaaactttgccagactaatcttcccagatgtttgttaataacagaattctttgacaagtcctaatgaatgcaatgaaacaggccaaagttaggtttacaccattttatattggaacattaacataagagttacttatatccccagctgctgtatttaatgataacattttatttcccaacttaggtctgagaaacatcttacctattacaacagcaaaggtgccaattgtgaagttcttccatttgagaagtggtctggaagtagatatcagtttgtataacacattggtaagatttttttcaggctttttgtttagagaggttaagggaacaaatgtctcaccttgcaaaaacctcaagttaaagaagtcattcatttcatcttagtgaatctttcaagagttattatgcttacttgctgtgaacctggcagtgttctgaggctgaggattctaagataattcagatatgtttcagggatttataggacctctctgaccctttaggggtgtttgtgcagagagatcttatatctactgaaagggaactgattgtttatttcaccagcccttattttctagatgttcagaccaaggacgtataaaagccatgaggtcagatgttacttataattctttattattatctagtaagttaatgaagattgtctttagggaaaaaaaaaaggttaatttcagttgaaatgtcttcttcctaaaatgaatcagactgtaaacctatttaaaatattccagtttaaaatcttttcatctaggctcgcatggtggctcatgcttgtaatcccagcactttgggaggctgatgggggaggatcacttgagcccaggagttcatgaccagcctgggcaacatagtgagatcccatctccattatttaaaacaacaaccaaaaaaaaaaaaagagaccctttacacttcattgttagtcttatagtgttattttccttttaacaggcccttcataacacaaggcttttatctgcttattccgccattgatcccagagtgaagtatttgtgctataccatgaaagtatttacaaaggtgagtatgcttcctattgtgacttatcaggaaatttcattgcatctttaaacactgttgaaaacataaatctattttttaatgaactgtagtcatgtgaaatgcttcatgtagctatttgggagaccctatgaagaaagctaaaattttgttctgaattttatacaatgacctgatcttgcacgtagccagctgtccactgctttgctaggttggattggttttgcctttgacaatgtgatttttatattagttctcaaaatatgcactttacttttagtgataacagaatggatgcaaagttagcagaaaacagacctttcctttgttcttggttttccttctgtctagatgtgtgatattggtgatgcatctagaggcagcttatcatcgtatgcatatactcttatggtgctatattttctccagcagaggaatccaccagtcattcctgtccttcaagaggtattagtgaatgaaattgtatttcttatctggaaaactggtgatctctgagcctttctcctcctctaaaattctgtggttctgtagttaattttttacctattttcctagaagtttttgtatcaatgcattaagtttgtaatccatactaatagtttaaaaattaatttcagatatacaaaggtgaaaagaaacctgaaatatttgttgatggctggaatatttatttttttgatcaaatagatgaactggtacgtattttaagagtaaagattttcctatatccttgactaaaaattagctatactacagtgtagatggtcaacaactattttattgcttgttgtatttatatatcttatgatagtaaaaaaaatagtgttttcagatgctttctttgatgtgaaaatatttttactaagccaagtgaatttctagggcctatatccagtatttctttaatgcctaataattccaaatggttaagtaactttattccaagtgaatgaatatttgttctgtggtttttgtacccagagtttagaaagactttcaatgagctaaagagatctaataacctacgtattaccaaggctcttagaatctatttctggatcttctgactaatatgttctgagacttgacactgaaaactctgagctcttcctactccaagtcacagagtagagattaataaacttatgtaaattatgtttttaaatatgaaagaaaagttgcataattgagctctagttaattagaaataaatccaaatttactccctaaaatacaaatgaatattgatattaacacttcactaaagaccatggtatcccttgttcccttctatttctagcctacctattggtcagaatgtggaaaaaatacagaatctgttgggcagttatggttgggccttcttcgtttctacacagaggaatttgattttaaagaacatgttattagcatcaggagaaaaagtctgcttacaacttttaagaaacagtggacctcaaaatacattgttattgaaggtacgaataaaattaaacttgaagtcgaatagactatagagcttgaactataaggacattgttcttcctccttgcagagctcttccagctgcttggggtgtgcagtgccccagtctcattgtccataccaggccaacttttctctttccagccttaagatttgttttttaaatgactgaagccatttcaccatgacaaattttttgctattgttggacacatactgaaggataaggcagcagtagtgataaggcagcttcaagaaagtgggacttctacaaccttcctgttggggggtttgaagagtgccgctaagtgaattttcaagatcttcattcgctattgatggagttcacctataagtaattgtatataaattttgacatttattttgaccatatggaagccttttctttttctattttttagtttttgagatggagtttcgctcttgttgcccaggctggagtgcagtagcgctatctcggctcactgcaacctccgcctcctgggttcaagcaattctcctgcctcagccacctgagtagctgggattacagggacccaccaccacaactggctaaatttttgtacttttagtagagatggggtttcaccatgttggccaggctggtcttgaactcctgaccgcaggtgatcacccacctcggcctcccaaagtgctgggattacagatgtgagccactgcgcctggccaccttatctttttctattgaatgtagtgatctattggagccattgatgctaatagttgattgtttatttccaatttgtgggattcttattttaagacaaaatggaatttaaatgctttagctgagaaatgacctaagaaatatttttttaattttaataagatttttaaatgtttatcttttaatatgtttgtatcacataaataatacgtactattctaagttgtggttttattattatttctgcctattggcagtattaaaatacaatgaacttttgtaaaatgaatttcagatcaccatgggttacagatatagttttgactttttaaagatctcatgtgtcaaacacatagaatttttgacttactacgccttttcgttatcactgcagttcttatcatctgtcacttattaaggtattccttttttttttttcttgagacagtctcactttgtcttccaggctggaatgcaatggcgcaatcttggctcactgcaacctccacctcccgggttcaagtgattcttgtacctcagcctcctgagtagctgggattacaggtgccgtgccaccacgcctggctaatttttttgtatttttagtagagacggggtttcaccatgttggcaaggctagtttcgaactcctcagctcaggtgatccggcccacttcagcctcccaaagtgctgggattacaggcgtgagccactgtgcccggcctattaatgtattcttttttaagttttgaaggtttattatcttttgcttctaattcttacattactttcagacaagcagttagtaataggctaaactaaaaagaaggcttcattcataatcatataaccagctattttagaattgaggcatttcagtggtgatagtagtcgtttgtttttgtttttgcgggggacagagtctcactgtctcgcccaggctggagtgtaatggtgcgatttcaggtcactgcaccctccgcttcctgggttcacccgttgtcagcctccagagtagctgggactacaggcacacaccaccatgcctggctaatttttgtatttttagtagagagagtgtttcaccatgttggccaggctgatcttgaacttctgacctcaggtgattagcccacctcagcctcccaaagtgctgggattacaggcgtgagccacagcacccagccagtagtagtttctttaactgcacagtagctaatattgtagtatctccactacaccaagcaaataaccaaaaatacacatacacatataaaaatcacttgaagaaagaatgaccaaactgatgaaggtaaccttctcatagcaataattattgcagggttgagctgaaggaagggtcctatacttcgataaactgatagtctcaatctcaatatggtacacctcagttaccgttcactagaagcatacctggcaagtggaagatgccactttttacttctttacttctcttgtgtatgctatatccatgcagtccttcattttctcaataagaggattcccgaaaaaaggtcatcgcttttttctctttgccttcttgaatattgttttagggatgtgaaaaatagaagttagatatctacacataatgtctaaattatgaatcatgggtgtatgttattttagatcacttataaaacagtatttggatttagaaatagtgcttttaaccccatttatttcatgagacagtttattcacacctcacataaatctttgacattagcattgttttcatcattcctaccattttctgggttatttaacaaacagtattccaaaacatatcctatatacagctatctaagatgtttcagatgcagacatgtaagatcaaatgagagtctatattaagcttttactagaaattgtatcccaagatccaggtagccaatggcatgccattgggacagatgtatatatctgtgtgttttataagtgtgttttgtaatctccatcatgaattattttctgaagtgatctttaagaaatttgttacatagtgggaacatttagtgccaaaatgttttaaatgtatttataacttctatatacatccaaaactagtgtcattaagtaatatcaggctaatgtgtcttctgcaaacagtattttgttcaaaaataggcagccagtcataacataaagagctttataatgatttaaatataaagtagtacactctattctgatgaacagtgtagtggaaaaacttgccttctgtttaggaatatgtattgcttagctttattataacttctaagctcatttaacaggtgtcattttaaacttttttttgcacttcttttctatcatgtgaatttaaaacttattaatgataagcaaagtagatgatattcttgtcttgttttatgaactttacttattggatgaatggtggcattttctatttgattaccttatttgctcttaaatttttttgcttagatccctttgatttgaatcataatcttggagctggattatcaaggaaaagtgagttacttcgtttgtcaattttattttttattttacttatgtatttacttttataatagagacagggtcttgcttttattgcccaggctggtctcaaactcctgggctcaagtgatccacctaccccagcctcccagagtgctagaataacaggcgccaccaggcccaggtagtttgtcatttgtaatacaatctcttttccttttaacccgcctaagtgagttcttactcttctttttagtgacaaattttataatgaaggcttttatcaatggtagaagagtatttggtattcctgtcaagggatttccaaaggactacccctcaaaaatggtaagtgtgttggaaataccaaaaaataaaaaataaaaaaaagtgcctaatttgtacacatcacttcagtagtaacttaaatatttagaaagtctgtgagtctagccaaagtaaatgactatagtacagaatgattcccagagcccccctttttcttaaacatccccgggtagaggccatcagaatagagagaaatagtaagaagttggatttaaggttgttaaattcttgttttcctctttgatgccttttttttttctggttatctgtgctagccttcataggtgcattgctgttctgccagcattcggcttgataccagccttggccaagcccagtttgtacatatctagaatctagattttccaatctgcttgcaaaaagtagtaaatcttttgctgggactagggggttaacagtgcttcctgtagcagacagctatctcttctcatgtaacttgatactcgagtttttcaggaaccacatttattgaaaacaaagcaaaattatgtcaaaaaaataatttcagtgagagaaaaatggctagggactagatgatcttgctaagaataatattatgttcttctgcattaatttccttatactttttattcttatttttaattgacatacagtttatggagcacaacgtgatgatttgatacatgtatatggaatgatgaaatcaagttaattaacatatatatcacctcaccattttttgtggggagacatttgagatttactcttagttatcttgaaatatacactattattgactatagtcaccctgctgcgcaatagatctcaaaacttattcctcctgtctatctgaaactttgtaccctttgaccagcaaccccctattccctctgtactcccagtgaagacttttaaaatttaacgtaagtgtattgctttataggcacattcagtgtttgattacatctgtacatctgatttatggtagatattgatgtggcttctacaccagtgcttctgaaacttgttcgaacaaatcacctgaggattttgttaaagtgcagattctgattcagcaggtctaggatcaggctcaagactgcttttccagcaagctccctggggatgctcatgttgctggcctccaccttaattttagtacaaagaggctacaggctagaccattatctttcctttgttctgttatttttccttcagcagccacaactaagcaaagtagaaacacatagttttttttcttttcttcaatataatctgtatgatgcaaatcatgtttctcaattcattatgttttagccttttcatttgatgaggagacaaagcctgtgtacctggcctcaactccctcccacatcctgaaaagctgactcatccgcttctttagaagtgtgcttaaacctttagggttagggctcacgagtgctctgcatgactaaaaggaataaacaaaaatggatttagttaaaactatcctgagttagaccttgatggtcttagattttgtttggaattaagcagtataaataatatttattaaaagtaatgttatatcaacattgaattgtaagataactgtttaatatctggttagttttgtgttccgatctcacgtgaatagttcaggcttttatatatttatgttcttctaggaatacttttttgatccagatgtgttaactgaaggagagctggccccaaatgatagatgttgtcgaatttgtggaaaaatcggacacttcatgaaggactgtcctatgaggagaaagtaagtaaatgttcaaaggggttggttgtgtttttattttcttaatgtcccaatttttaaatgaggtactattataacaaagaaaatacacttgtgtaaaatccagcagttttcagatacatttaagttttttattttattttttaatgaaatgaagtgatttaaaacatgactttaggccgggtgcagtggttcacgcctgtaatcccagcactttgggaggccaaggcgagtggatcacctgaggtcaggagttcaagaccagcctgacccacatggtgaaacctcatctctactaaaaattagccaagcatggtggcgggcacctgtagtcccagctacttgggaggctgaggctgcagaatcgcttgaacccgggaggcagagattgcagtgagcccaaatcacgccattgcactccagcctgggcaaaagagcaagattctgtctcagaaaaaaaaaaaaaaagcccaggtgtagtagctcatgcctgtaatcccagcactttgggaggccaaggcaggcggatcacttgaggccaggagttcaagaccagccttgccaacatggtgaaaagaggaaacaaaaattcttcctttttacagtagtgagaagttcagaatcatttcagtcagtaaacagtcaaatgagttccttcaggatctcagttacatctctaatgcacagtaactgttcagcacgttgggatatatattcacaaacagttcactggattttagcactctttgtattccacttaacccttaataattgttgtgagtaggtaagccatgcagtttagtccccatgctttcttctggtggcgtttattggggggcaagagagacatgtttttgcttgcttgccttgggatacgttgttttgggtggtagtggtggtgtttttaactgtacagcaatattttaaaacatggtgctcaaattaggttaccatctggaatttgagaagctttgtttttcagtcctttttttcattactcaaaaatcagtgattattaggataagggagaaatgattttgacattttaagagcataaatcttaaaaccattgttcctttgtgaatttaagccttcacatctaaaatttccagtgccaagtaaagaaagaatgctaatgtgccagaaaggccgttcaagaaatcactccatggatgatttgcctttcattacatcagtgtcaaagtaggcattcagccaaggagtgccactaattgcagtcattggttttacagcactagagcaactttgaaaatgaagaagaaaaactgcacccttaaaccctgagggagcatcttaacagagaagatggattttcatttaggttcttgcttttccttttaatactttctattcctggtcatctcttaaatctagaattgccttaatattttgggaattgccttaatattttgttaggcttctgtttagatttttgctactaatatgatatcttctacagagtaagacggcggcgagatcaggaagatgccctgaaccaaagataccctgagaacaaggaaaaaagaagcaaagaggacaaagaaattcacaacaagtacacagaaagggaggtgtcaacaaaagaagataagcccatacagtgcacacctcagaaagccaagccaatgcgggcagctgctgacctggggagggagaagatcctcaggccaccagtagaaaaatggaagagacaggatgacaaagacttaagagaaaaacgttgttttatttgtggaagagaagggcacattaaaaaggaatgcccacagtttaaaggctcttcaggtatggacacctatcacaccttgatgtttgctctaacatctcaagggaaatctgctttttagagctctttactattttagttatctttatttctttatcaatatatttactcaaaaaagatcttgtttttaagaaagtaaaatcccttccccctcctttaatgttgatcctccatatatcttattcctggctttatttagagtcttatgagagtcatttggtgaacttttctaagattatcagtgaggtgaaagtgtaatcatccctggtacctgcacatgtagcctcagtgaccagaaaagaagctgcaacttgagctttgctacttgatatatgtacttgtgaaatcaaatcacaggggtggcggtagccagagttatctcaggacaccatgctctgtgcacaggtgagccacacacaggcacatgcatagaaaagggaacagaaagaaataggctgcatagttagcagtgggtgaatctgcagaggggaattatggaagatttttttctgtagattttgtcattttgattttctacaagtgagcatgattattcttatgacgaagaaaatatctattagcagtcattaacaacaccatccacaaatctggcccctttgagttgttaaatacaaattggccatttttgctaaatgggtgaaatgtctattgtgggcaccttttaaacagactactaactataagggtaccttgtgtgtgtataataagtaatgatttacaaagcaatttacattctcacttctcagaactgtgcaagtgatgaaatttgataagcatagaaaagaaatatttggaagtaatttttttctaattaaagtagtcaatcctgtcgctatcctcagttgtatatatatgtttgtggacagcataaagtgtcagctgctttacagtttccctaaaatactccatgtgtatagttcttggaacaagaatacctctcttctattttattttatcatattcagcaatatagtgtatctttttttaagacaggagatttttagatcatacccattcttttttaaaggagctttatatgaaaagatcaaaatacttaaaaatttttatctattatttttagagtagggtttaaatgtttatgaaagatacagctttagctgctcacatgggacatataccagaataaagtgattttcttttgttgttttaagaggaaaatgtatttaaaagaaattacaataataatagttgctaacattcattgagcattcactatgagttaggcactattttaagtactttacatggataatttcatttaatttttacaacagcttcattaaatacattaatatctgctgttttacaggtaaggaaactgtaaatagtatagataacttttaaatagtattcccaaaattattcctaaaattactcgaggcctgtgttgattactcatgactgaaacattattacagtcttcctctttggtacaacaaagtggagaatttgccccagctttgatgaatttcttttttctcgctagcagcaagttttaagttgtgtactagggaagctctcacaacagttagaccaatgattttggcagcctgtggggacagcagcaactcaaaaagatgcggggcgggtagtccgggtggcaggggaattatcaagcataaggaagagcacttatctagaaatgtggtcccttcagaatgcagtcttgacacattaaagttagtagtcatcatattttaaaagtgaaatgacagtggaggcatggggatagatacagggaatttcctttggtggcagttcaaaaataatcagctgcttcttcctctctcaaaattatgctgctctctcttgtttcttcagatatattgctcctttgtccacacaatatactgagtggagcttctgtcacaccaacagacagtctctctgtgaaagtttgaaaacagggctactgctttcaatttaaagtaggaacaaaaagtgctaatttcttttttaggaatgtctaaatcagattgtatgtttggatcgccctcacctgtcccattgaaaccaactggtttatttgttcaggtaaacctagctcaaacggagaaggaggcgtgtctgtcatctgttcactcaggagctgctccctgagtgctctcagctctgcaccatgtccttgcgctgtgctggcagtgcgggccctccttcctctggctgacctgcagcactcctgtctgtcctgcgcgggtgtggtgcgtggtgaggcttactgggcaccggatggcggggccttgtttcagaactcctgcccatggtcttgcttttcagttaacttgcaaaattctgccacccacatgccttatttcagctctccttggatatggtttcggttttaaggctgtttcagatgctcttcctttcgattttgtaaaccagtctatttcattttttaggcagtgcttttacatgaagacaaaaagaaacaaaaaacaacaatatttttgagtccccagtcaggtatgtgggttttaaaaaaaacaaatgtgtgttattttatttactgcatactttaccacatgccttttgagactttttctccaaatatgtgcttttaacagggattggacatcagaatcacttgggggaactttaaaacatatagttgcccatcctctacctttatttcctaaagctaattcttcagtggttaagcatgggcctgtgtgttttgtaaattccaagtgatgtttataccacccatgagtggcaaccagagtcttcaattatttgttccagtcccgtgctttttgttgctgctgtcttgccagcagtgttttctcctcctggagagtatttgccacacacaaagtaaggaaaaaaactaatctctagcctgaactccactgttacctctcagctacttcatttattcattctttcaacaaatagctatccagcctctcccctccctttccaagttcaggacaccagcctcaacactgaagatacagcagtgaacaagcaaagccccttctctcatttactctgcatccttttcagaagaggtagacaataaagagatacagagataatatgtcatgtggtggcaaatgctaggaagaaataacaaaacaagaaaagggaaagagaatggttggctaaggaggcagcatctctggtaaagtaacatttaagcaaagaatcaaatgaaacaaaggggccagtcgggggaaattggtgttagactggtaaactcagagatggaaacaggtgttgtcctgcagcatcactgaggcagtgtggcaggagtggaacaggattggaaactcgagagacagaagaaatttgaaaaaaaaaaaaaaaaaaaaaagtggagcaggcagaagggtgagtgagtggtagaggtgaagtcagagggtggatagatctgggttatgaagcgccttcagcagtggtaggtaccgtttttgttggtttttttctccctcaaagtgaaatgagagactattgtagggttttgagccaaggagtgatattatctgaattctgttttaaaaggttcattatggctcctgtgtggaggcagggtagctacttagaaaccaagccatctcagcctcccgatttgtagagatgtggtctcactatgttgcccagactggtcttgaactcctggcctcatgtgatcctcccaccttggcctcccaaaatactaaaatgatagatatgagccgccacacctggccataagcttcagccttgagcagatactttctaaacactttatatagggaaaaaaaactaattcttgcgtagccaaggtgttcattttgccgagaataacgtagcatagtgtttacaattacgtgggtgtaatttctagctttgtgatcctgagagactgccttatcctccatatgcctcagttttctcatgtgtaaaaagggggtaataataatacctgacagggatgttgagaaatccatgtaaaagtacttagaacagcgcctgcatatagtgagagcagagaaaagggaaaaggttcgtggtggtgattgcattgatgttattattccttcagggtatcaccaagtcttccagtgccagcattgttcagttgagagagaaatatagatgctaggcatacacctagaaatagcattgacagtaagttacgatttctgtaattatcttcttagtaaaaaacctacatatttataaatcttttgagcaactggaaaaaaagtattaacttaaatttactacaggaaaaatgtattgcaataattatgttactttataccagaaaaaagaaaacatttataggtggttaaaatcgatcctatccaataaatcagactcttccaaataagtatatgtcagatgatataactgtctagtttatctgtgatatatgtatccaaattatctatgttgttataaatgtgaactgtatctcacctgtaagtggtgttaatttccccacagctcttcctttccatagtattaagtatgtctttggcccacttgtagtttctcaagaaagcatgttgatacggacagcccctactctcatatatggtgtattgaccttaggcaagagatgtggtttctctgagctccagatatgtcatctataaaattggtgttaacaccgtttatctcatagggtgctaagaagattaaagtactgcccagagtaggcactcagtcaagttctctttcctctcctgatacctacccccatcctttcctctaggttgcatatagttctttactcccaaaggagatcacagtagatagaaaatcccatgaatgtccttgctcttcgttgttacctccctccccctctatcccccacacataatgccttagatattcagtaggttttattgattagaggtgaacttatttggaaggaataaaaagacaaagcaggagaatggtcaagaacatgagttttagagtgagacacttgagtttgaaatccagcccaaccatttactagttgtgtgacctctatcaagttatgcaacctctctgtgcctcagtttcctttttggcaaattggtgctaacacctcacaggactattgtaaggattaagttcatgtagataaagcacttaacacagcatccgacacatctcatcactcaataaattatcactgccctttgttactgtggttaacaaacacttgctgtaatttctctcttctaacttataggacaaacaaataatggaaatttttaacataagtatgtagagattgtggtaccacagtgataaactgatttttatgcttaagttaatgactctggtttatgtatgacaatttattcagtatgagaatctcagaaaactaatgtttttttctattccttaaccttcctaccctttttttggtaaagaaaattaccgaaaaaacaaaaaacaaaaaaaaaactacctctgtctatttatttattccattttaatctcatggcttgaaatctgaaaaattggagttgctgtaagagattggtggatgtctttttgccctcatggtgatgtattcttttacagcttttatcattgaccagaattttaaggcctgcttattttaaaaaacgaaaaccagtgttctttatgataataagcttaaaataatagaaatactttttaaaatagtatggggagagctcattgtcagtgaatatagatcattcttgttgatacccttctttgaatattctagtgtattaatataccattgtttatttaatcatgtcttattaatggactggctgttttcacatatttgatatatcaagtgtcttcacaacttgtgcttgcatattctttcccaaaatattgaaagtccatatatttccttgtacatttttaaagttgatatctaaatctttcattgtagttgcaaagcatgtaatttcttgggggaggggggctgtaaatattgacattttaaaataaaacttttaaatcagccttaaatgtatcaaatgaagtataaatattattgctttttcatacccaccatcatttatatacagctcagctcttctttaacaggcaaaaattatatatcatttccctttcctccttgaattcctttgttgtacttctacagaatttcagcataagatgatatattttgtttgtttgtttgaacttctccctgagatgatatatttttattacacatattttcaaatattttattgagtagcttatcatgcttatctgcaacaaaaatgacaggggcaacaagctaggccctattttctataaattgaatttttaagctttttattaaatctcaaaggatgaaaatatcttctatattgagttttcacaattattagaatatataattgatcaaaacaaatgttacaaattttaattaaaaattactttttttttttatacctaatgctaaatgacgagttaatgggtgcagcacaccaacatggcacatgtatacatatgtaacaaacctgcatgttgtgcacatgtaccctaaaacttaaaatataataataataaacaaatattaaaataataataataattactttttatgtttacttacaacgactttaataagaaagatgagattttttccctatacattcacatatctttgggtcgacattatttactgcgtgaatgaaactgttccttttctatccctaattttttttttatagttgataaaaatggaaaaaccccaatattctttatgatagcaaattaaaaataatagaaatactttgagtttgggaatagaagatatattacaatagtgccactcaattattttgattccttcttaattacatgacaaaaaataacagtgatgtatcatcaaaaattatttgtaatgatcatccactatcaatgtaattttatgaaagctaaaaatttggatttttattagaggcatttacattcaccacagacaccagcattttgtttgcctctcctcttctctgggttttttttttttttttttttgcctcatggcaatacaccacagtaggatttggctggttaggagatacgcctttcttttgtaaagtagataaataattgtgaaaggggaattagaaaggacaggtggagtgattcctgaaaaccagcctaagccttgaccacaaaggcattcacagacatataatttttaagaaagagtacacatggaagttgaagagctagaaattgactctcttaaaactatccttgcggccgggcgccatggctcacgcctataatcctagtactttgagacaccgaggcgggtggatcacctgaggttgggagttccgagaccagcctggccaacatggtgaaaccccatctctactaaaaagacagatttagtcaggtgtactggtgtgcgcctataatcccagctgctcaggaggctgagggcaggagaatcacttgaacctgggaggtggaggctgcagtgagccgagatcaagccacatgccctgtcaggtaggctcaggaacacatgggcccaggttggaagagcaccatttatataaaacactctaatgaatagtcgcatatttgtctagttatttcatcaggataaattcccgctcataagaatgataggtttaaaagtatgcacattttgacagtgatgccaatattcccaaattgtgattgttgacaatcccggagagtcagtgacattgtttcccataccctgacttcattgggatagtcttttttcattttacacctgcttgaattcctattattaccattgaactttaccatttttttttacatgatttcatctatctttctttgtacttttgtattggagtattcttgacagggtctcactgtcgcccaggctggagtgcagtggctcaattatagctcactacagccttgaactctcaagcgatcctcccatctcagtctcccgagtagctgggaccataagctagtgagaccacactcagctgatttttaaaatttttttgtagagacagggtctcgccatgttgcccaggctcgtcttgaactcttgggctcagatgatcctcctcagtttccagaagtgttgggattacaggcatgagccactccacccggcccagtttattattttaacctcacttatatgtgtttgccatacagatgaatgtttgttttaatagtgtgatctagccaacttttgcatggtttcttatcatgcttaccaaattttataaatgccatattattcctctatattatataaaaattcattcatgtgttatttctagtacttttgtttttttacatgcaaatattttatattcaggtatagtgaagatttttctgatatagtagattacatgtttaaatgctacagtagtaaaactactagtactatacttaccaaagggtttaacattttgggaaaaacagaaacgggcaagtagcagtataacaataactaacttaccttctagagaattggcattgtttttcaattttttttttcttttagagagaagggtttcactctgtcacccaggtaggagtgcagtggcacaatcatagctcactgcaacctcgaactcctgggctcaagaaatcctcccacctcagcctcccaagtagctcacaggcatgagccacctgtgcctggctcaatctcttttttttttttttttaataaaagacctgtcactgaggtagtggaagtgccttgagtaccatcaccaacatcgtttcctctgtcatgtccctctcaaccctagaaacatccattattatgaggttaagtctccaagtttccttttttttttttttgagacaaagtctccctctgtcacccaggctggagtgtagtggtgtgatctctgctcactgcagccttcacctcctaggttccagtgattcttctgcctcagcctcccaagtagctgggattacaggtgtgagccactgcacccagccccttctggttcattttttatactctttcatatgtactccttaacatatgtttctccttggtgaatttttaaattaaaatggcatatcatggcatataataagaatgtcctacaaaccagggatggtggcacgggcatgcagtctcagccactcaggaggctgaggcaggaggatggcttgagcccgggagatctgacactgtagtatgcaatgatagtgcctgtgaatagtcactgcactgcactccagactgggcaacaagctagacctcatctattttaaaacttttatatggtgctgtttttatatttgggtttttttctttacagtattccaccctgtgaataaaaaatattctatgtatttattacccagttttaggttgtattcaatattctgctgttattaacagtgctatagtgaacatccttgtggaagtccccttgagcatgtatgagagattctttagggtttgtgtgtctacaagtcaaatcgttaggtcatagcttatgtgcattttagttagattctatcagattacccttgtattggctgaaataattagaactcccaccagcagtgtgtgggtcatttctatgtattcttccaaatactttatttattaatttttcagaattttcatttttgcaagtctgatggatgaaaactactttggtgttgttctcatgtgtatttgtatgactctggtgatgcaaggggcccttttacttttttttttttttttttttgagatggagtttcgctcttgttgcccaggctggagtgcaatggcacaatctcggctcaccacaacgtctgcctcctggattcaagcgattctcctgcctcctgtctctcgaatggctgggattacaagcacataccatgacacccggctaatttttgtatttttagtagagacagggtttcaccatgttggccaggctggccttgaactcctgacctcaagtgatccacctacctcagcatcccaaaatgctgggattacaggccctttttacatgtttattggccatttggagttcctcttctgtgaattgtctgtccaaatcatttgcccattttcccattgaattatttccctattaatttttaaaggttcttcatttattctgaataccgctcttttattattatataaatttcaagtgtctacctgcagtatatcttctgtttcaactttttgtgtgtattgccattccaaagtttttaattttgagataatcaaattattagttttccataattagttttcatcatcatttggttcataatttagggtcatctttaagaaattcttctctaacctgaggtcataaagatatccatctgtattttcttctaacagctttaaaactttgttttttctatttagacctttaatccatccagagtttgtatgtgtatgaagtatgaggtagtctctttttttttcttttttgagatggagtcttgctctgtcgcccaggctggagtgcaatggcatgatcttggcttactgcaacctccactcctgggttcgagcaattctcctgcctcagccttccgagtagctgggactactagtgtgccactgccataacccagctaatttttttttttttttttttttttgtattttagtagagacgaggtttcaccatgttgcccaggctggtctcgaactcctgagctcaggcagtctgcccgccttggcctcccaaagtgctaggattacaggcatgagccaccgcctggctgaaaagccaaatctccatactttgtgcagttcacaatatcgaagatgggtgcctacagactagtagacactttgtggcataaataatacagtggtagaacaatagagtactttgtttcttcttgactgaaatttcttactgaattccctggctgatatttttcattgtgagttgcttatctcgatgtcctgctttgaaaagtatgtgtttagggaatgtttttatttgcatacttactatgtttgctatggaaaatttagaaagtaatgttaagtaaaatgaagaaaataaaaaccatctgtactccctccattctagcattaactactatttagattttggggataaagttttcctgtctttttacattaatacaataatagttaacatttattaagcattttctagtaccaagtactattccagttgctttacatgtattcgtctaatcttcacaataacttcaagggggcaggtattattgtcctcattttacagataaagaaaatgaggcaccaaatacatgattggtggggtatattttagttttttgaaaatgctatttatatagttttataccttgttttttcatattattatccttctgtgtatacctaatattctattatgtgcatagttcctcatatacttggtcatatcgtaagttttggattttaagttctttgcattgttaattataaggtttttatgaatatttatttagcagaatttctacccacctcctcctgatcttcttccttctaataatttggcaaccaaaaattgatagttttaatttgcatttcattgattacccctgatatagaattttttcatatacttatgccatttttttttctattttatatattaccttttcattacctagttatctattggtgttcattcttttctctggtgacttacaagttcattaagtatggtagtgtgcttaggaaactcttaccctaccccaggattacctacaggattactcactctttcttacgctctgactttcttatagttacatttaattctgtattcacttggaaatgggtagagaagaaggatatggtgtgaggagggaaactacctcctttcttcccctccaaaattacttatttgacataatacagttattgaataattcatactttcccccattggtttgaaatgcaaacttcattatgtattactttgttacatataatcacttaagaatttctcaggtctcttcagttttttcgttgatctatttgttcagactccagaacaaaatttagtaactattctgtggtattggttttaatcagtaatcctcatttgtgtcctccacctgtaaatataataaatttccctttttccttttatatcaataagttattgctacaatgattaccatccacagcttcgtatctgcagagtaatgatctaagatatttatttctggccagataattctttgcaatctattatgtttggctgcaaatgaagatactgaattatacaaggcagaaccttaagttcgtctggtgctctgtaccaacatggaaatagtgaatatgtaaatgtattaaaatgagatcactctaggaacctgtctgcattcagaaagaattttgactaagcttatatttaattaatcatgtgcatatatacttttcaatatcaagtcttattacttgattcaaaacaagtgaccaattctagtatgaagtttttgtgactacttaataagaagtaattttatggcttttgtcataaagcgaggcttgtttcatttatattgggttttgtttcttcccctcctctaggtagcctttccagtaaatatatgactcagggaaaagcctcagcgaagaggacccagcaggaatcatgagggaaggaaaatgcagcactctaaatggccactcaggcgttcctattcactcggaaaattaggttcatttcacaggacacagcagtgtagatcaggcttcaacttaacatttaagggaaatgtcagatttttttttaatttaatgaaattgttaatgaggaaaaatttttaatatagtcttatctaccacacatccccatagatttaaggattttaatagaaagtcatgatgtatgtatttaagccacgttaaaagaaaaaatataactatggaccggtattcagtgaatacagtttcatggtttttaattctttcaaagcacattaaaaatggtgtgctgataaaccccaagtaaattaaccctttttccgtataaatccattttttgttttgaagaggggaaattatatttattgttgtttactgaatcctggtgtgaaagcatatcagatatgtatgaactgctactgctgtacttccgatttacggacatcattttattgctatttgtagacgtgataacatgaacatgagtacctatttatgtgggccttcagtggatgggcagtgccactcaggtctctggggtttccctctctaattttaagtaaattgacatataactactatgcttataaaaatgaagtaaggaaaacaagtagtcctgtttgccactaaaaacattttcaaaggaaaaataaaatgaaagtactttttactttttatgatactcagaaattaggatgaagaacttttaaaattgctgaagatcaaagaggttatctctgccagtcacaagtgtggctggtgtcattctgggtctgactggagccctcctggactgtttctttaatttcaaaagccctgcagacatagtacctggtcagaactatgcctcggtttatttatcattttgaaataaaatcaaaatttcaacctgtaattttatctacattattttctagtgaaagattcctaaatttcctggggaaaaaaaaaaaagatcaaggagtgagaacattgggaatgctagtaagaggcgtttaacaaaaaagaagaaaggacaaatatactcccctaaaatagtgtacacagacttccctttgacttgtgcccttgcaatcattggtgtgtgttaacatccagtgtgttccaggctctgggaacgtataaatttgttattataaaaggcacagatgggggtgggggggcggggaattttgtaggcagggaggctcagggggtgcttgctggacgaacattctggatgtttgaggactcagaagacgcacatccctgtgcccttcttttttaaacaattatttgaagacagtctagctaaagacgaatcatatcaaaattaaagacttcagaatttggaggccatggtagaaagaattagtgatcattccctactcattttgaacgcaaactaatgaatgacgcaacctgggctgatgctgctctacgtgaccgtcctcagctgcccccttctggtttcttctctctaactcatgcatgaaagtcgactaggcttacaatgcttgtcacacttttctttgaaaagcccattgatgctgttctgttgttttctagcattatagcagaagacaagtctaagaccaggctgatttttgttctcttgtaggttttgtttttctgcctgggtgcttctgttttttaattttatccctgtaattcagaaagaaaattacctcaatatagaaatacatctatccagtgacttttcatgctaggaaaacttcaagtttaatctctacatgactggcttaatttttactgtcattctggtgcttcctgtttctaatatggattttctcattgcacttctaattttctggaatttacctcactgaccttcctttacctctcatttctttagtttacttatattctcttccttttcataggagccatattttcttgtatccctttaaggatgttaaaagtttcctacattttaatctgatccttaaggtagcttctgcccaaagtactgggtcttttgtttgattttcaatacctcacactggatccatgggacaatgagcagtatttgccagcaggcctggataatggattgcccttgattctttacctggatgtggtcacagccccatcttgctgccccagctgggatgccaaaacgtctgctctttgctaagtccattggcctagctatctttcaagtgcagccggcttatctatcttaagctgtacaaatgccccattaccaaggttctccttgccaccttctctcaggaacaaaaatatgaaatctcttttgtatagcagtggtccagtggccccaatctatgatgtttaaaactcttgcttggctgggtgcagtggctcacccctgtaatcccagcactttgggaggccgaggcgggcagatcgcttgaggtcaggagttcgagaccagcctggccaacatggcaaaaccccgtctctactaaaaatacaaaaattagctgggcttggtaatgggcatctgtaatcccagctactcagaaggctgaggcaggagaatcacttgaacccaggagacggaggttgcaatgagccaagattgcaccactgcactccagcctcggcgacagagcaagactccatctcaaacaacaacaacaacaacaaaactcttgctcaatgtgtgcaggatcagcagtgtgcaaaaatgtttttaaatgttcttagataacttcagtgtatttttcttcttgaaatatgtttgacaaatggcttctacttttaaatctttcctgagtggaaaagatcctggataaatacatcaatagagttcagtgttacaagcaaaaatatacacacacacgttgaaaacagaatttatcaaacccctgtaaaactgtaaagccctcagtagttttttctttggaagcaggcatatttggacagcagcagtcaagaactacatagactttccactgaatggaactctagacttagacaaggtctggcccacctcgttttccagctgtgtggcagtcccctaatctcaggcagttcagtttccattcctataaaatggaaaccattcttggctttccacacagttgtgataatcaagtgaggtcttaccaggaaaacacttctttaaatgtctagaactatgaaactaatgcctgaagtgcggggtgaaacagttccctattgcaagttctgtcacatattagtggaaatctaaaagtggttacagcttgtaactcttttgacacttcccatacccacctcattttgacaccactggacagctgctgctctgagataagctcacatactgcttaaataatcgtgaaaattatttattctaacataacattatttcagggacttgtgccagtttcaagtgatattagaaactaacaagtagattatgtgacttaatgcttatgtgcaaaacaactaaccaagttaaaaactgaatagtggggttttcttttttgtttgtttgtttttgttaaatagtgggtattaaatagaggaaagaagtctgttaaacatacacaggatcctgaatcagaaaattgaggactagatgttttcaatagtgtctaatgctctctactaaaatccttgagtttcagcatctgtaaaactgccatgccagtgcttctgccctactcagttcaaagttgtgaggctagtatgagataatataatatgctcatggagttttctgaatcttgtaaagtgctgcacaactgtgtaatgtgtcaataactgaaaaaaaaatgacagcatcttttatttttattaaattttaattttagggctgttttaggttcacagcaaagttaagcagaaaaacagagctgcatatatcccttgtttccacatgtgcctcactgtcactctgcaccacagtggtacacttgttacaatcttaaacctacatggacacatcattagctctcagtgcccatagtttaccttagggttcactcttggtggtgtacattgtgtgggttttgacaaacgcataatgatatctatccaccattatagtagtttcacaatacatggcatctttaaatactcattaacaattaccatttgagtgaggctgtgtgccttgcacccctctaagggcttctcctgtattaactcatttaatcttcacaatatctgtaggagggaggatatgagatcccaaacccccaggtagtcaaagatgaaggccaagaaacaaacccaccacaccaccacctctctatgtccctccctccctcccttcctccctcccatcactttttcagtttctttctttcgagatgcagtctcgctctgtcacccaggctggggtgcagtggcgcaatcttggctcactgcaacctccgcctcctgggtagctgggattacaggtgcccgcaaacacgcccggctaatttttgtatttttagtagagacggggtttcaccatgttggccaggctggtctagaactccttatctcaagtaatctgccggcctccggcctcccaaagtgctgggattacacgtgtgagccactgcgcccggcccccagtttcttttattttctttctttctctctctttctttcttctttctatctgtctgtctgtctctctcttcctatcttccgttctttctttttttttttgagacagagtctcactccgttgcccaggctgggagtgcagtggcacgatctcagctcactgcaacctccgcctcccaggttcaagcgattctcctgcctcagcctcctgagtagctaggataacaggtgtgcaccaccacacccggctaatttttgtatttttagcagagatggggtctcaccatgttggccaacctggtctcgaactcctgacctcaggtgatctccccgcctcggcctcccaaagtgctgggattacaggcgtgagccacgcgcccggcccccagtttatgtgcagataaggcttaggggaaaaaaaaaagcgtcctcttattgtcaatgcgattgcatttctgtagcaggaagtcagaactacttgatggaattttgaactatcctttcagaaactgcaggagatcgaagataaacttggctttaaaaaatgtttcactgattagttcttcccacattcaaacactgcgaatctgtcctccccaggactgcttcatagacccctcctgccctttttccttcacttctagcacttcaatgacaaatgccacctgtcttgatgtcctcctctcttcatctgctagccctgtcctgccagtatctcattcttccctggcccctctttacctggcttcctgtgtatgcctgggtaccgcgcctgtgcagtgtctggtgctcaggaatactgcatcaaaaggcagaattaagcccctgagcagccaggacaaggtctgacaacacgttttaaatcgagtaattgttgctcgctataaatgtgactattcacactgctgcccagtcacattttcaagtagggttggttcccagttcagcaccagaatgaaaactgcattagtcaccacccttcagcatccccagcagtacagcacgctggggagaagggtggagggtggcgattatacaactctgcggtaacgccatgctcttaagaacagcctaattggaccacaaaagaagaatgaaaatggatgtagatgtctgggcatcggaacgatcactctgcatttgagagcataagctcccagtgcagggttgacttatgcgtccttaagtgtcaccgcctatgatggtgtttgtcacggtgagtattaaagcagggggtgacgctgcaccttgccccgggggcaggtggtgaagctacgtgcatccggagtcagcaggtctgaggtcattcctcgccccctcccgcccgctccccgacgtcacgccgactccgtcctcggcggtgaagacattcctcccgggccctgcgccctgcagcgtggtaaccccactgccggagaccgtgcgcaacccagctgctagacccccggcgttgagcggcaaaaccccgccccgagcggcttgccccgcccccggctcgtcactcatgcaactcacccaatggtggcggcggggggcggggctaggactgagggcgccgtgcgccgaagcttgtggcgtcaatgcgcccgccgtgtccatggagagaagctgaggcggccgaccttcggcccgaggcaccggggcgccgggacggcgaagatgtcggcttccttagtccgggcaactgtccgggctgtgagcaagaggaagctgcagcccacccgggcagccctcaccctggtgagtgctcgcggcgcgcggcggggcccgtgacattgctcgtgtccgccccgtgcaaggggaggtcacggcggccgggagtggggccgcagggacgcggacacgtcagacctcggcgtcgctccgacccgccgcacagcctcgccgcctccttcgcctccggcccctctttgcaacgataaacaagtcccgggcggggctgctctcttggccccggaaactacgtttcccgtcaggccgcgcggcaaccgcgtgcgggccggaggggatcccgggggtgggcgtccccgggggccgatcgcctccacactcctgccggcctgcgctgttcggccgttccggttaagcagaggctgaacgtgcccggtggcgggggttcccggtggtggcccggagtcctagcctggaggtgcgtggggtggggagggaccaggctgtccgaaggaccgctgtgtcggggcgacagcgttcgcagagggcgagcacagcgacaacaaagcccccggctcctgccgaggtcacggccgcggcgcgcaaagcgttacttgccggtgtcctgggtgattgaggcctttgaaactccctctgtgcctctagcaagcctaggctcttaggacaaaagatgatttcccagagtgagtttacagccttttctgggtgaaaggtcaaacactcagagggcaccagagtgcaaccattgattacttagagaattcactgagctcagtgttccggccgcaccgttcagttttttagtggaaggaaaatccacataacataaaattagtccttttaaagggtacaattcagtgccatttaagacattcacagtgtcgtgcaaccatcacctctatctagttccaaaatactttcaccccaaaagaaaaatttatgatcacgttcctacatacactccccttttagtgaaggagacgactttatgcaaccattcgcttagagactgggaaaaaaaacgatttaaattgactcatcgattctgttgcatctaatgccaaaagggcctattaccagaaaataagtttgtagcaaagtagaagaaaattgtgatcaggtgagagaatttatttttataatcaattttttaggcctttgatattaccctgattatatatggtactactagtgtactgattatgtatcattctatattacctcttttctgtaggagcaagcttattttcatacaccgtgggatgtagaattaaacaaggttttaagaactagagggcacaactcattctttgtgtctctttcaatctcagtaagaattattcagaattcttccactggtaatggtagatccaggaagagccagaaggttcaggaacagtttttgccttttcttttttgctttttagcaaccctattaactgggtttttttttttttgttttttgtttgtttgtttgtttttgtttgttttgtttttggagacagggtctcactctatctcccaggctgtagttcagtggtgcaatcatggcacactgcagcgtcaacctcctgggcccaagcgatcctcccacctcaggctcccaagtcgctgggaccaccggtgtgcaccgtcatgcatgcacctagggtctccctgggttgcccaggctggtctcgaactcctgggctcaagcagtccactgcctcaggctcccagtgtgcagggattacaggtgtgagccaccatgcctggtccctgatgtctttctccatcaccatttgacatgttacctcttccttcagaatttcttttttttttttttttttttgagacagggtttcgctgggttgcccaggctggagtgcagtggcgtgatctcagctcactgcagcctctgcctactgagttcaagcaactctctgcctcagcctcctgagtagctgggattacagacgcccaccaccatgcccagcttatttatttatttatttttgtatttttagtagagatggggtttcaccatcttcaccaggctggtcttggactcctgacctcgtgatccactcgtctcagcctcccaaagtgctgggatcacaggcatgagccaccgtgccttgcccttccttcagaatttctatgtcagtccctttctctccattcctagtcattcagcagacatttatcaagatctgctgtgtttcaagacaaatgaatgagttatacagttcccagcctacggggcacagtcgcaggccaagcctttgccacctcttactaggagtaatagcactgcacattctcaggcttggtctctctccacacttgctcccctctgcttcagtacatgttatcatagcagttctcaaggtatccatgttgcctgactcagctgttttgattaacttgcaggagtctactgtctgtactctgttgtcctacttaagtatggctgactttagaagcttctcagaagctgtaccagagagaaggcacatcaatgctgttttccacacagcctgtgttggtgggcttgcagtcattttagttccagcattcgtgccctagtcaggacactatggcatgtattgctctttgtgcttagtttatcatcagcatgtatcgtcaagtgcaaaagtagtgatgccgtcaaaggcctaatgaatggagacagataagagagcaaacaaaagtatacgtaattcagtaaaactgattggaagaggtaaatgttacttgggtctaataagtagagacagataagagcaaacacaagtatacctaattcagtaaaactgattggaagggataaatgttacctggatatataaattttgatgttaggaatttgacatgttgcaacatttgaaaagtgctatatgtgtggagtctaccagatgtcaacaaaaggctaggaaaagtaactgataatataacacagttcaatgctgtcattatcagattatctacatcttccctatttccctacatatctagaaattgacaagtggaattgaacttgcaggagccagatgtgattaaagaatctgaagagtaaatagtgccctgcttgcagacagatttatttccatcattgtacaagtcagagcaactctaatttgtaggactggggtggatcacagctgtgcattaaaactcaaccaagttctatgagagaatgatggtgcacagccactatcattcttgatgaattcattgtgtacggaaggtgccttagggcttaactttctattggagtccagttgagaagctaggaaatgcttaatgctcagtaaggaactgtgtgttagttcattggactagaaccagaagtccttttgaacagtgaccaagcactaagatttctatacgaaggcagtttaggaaatactacacaagaagcactggaagtagcctagcagtctaacagtgaaagaacggttaagtacatgagagtagatcctgttggtgaaggatgtagtcattgtaaattatggttttttttaagtttcagcgttataaatcttcattctttgacttatgctgtgcaaattatttaatctttaatacctaaatcacaatggcaggaataaaaagatgttacgtttaaaccattaaacacttagaaggtgctcagtaaatggtgaatatatgtttattaccatgtatcaaatgaaaaaataatttgttaaattgtttcaatggaggctgcaaaattatgtatatatgccatgattacaaacctttttctttttagagacaggatcttcctctgtcacccaggctcatatgcagtggcatgatcatggcttactgcagcttcaaactcctgggctcaagcaatcctttcacctcagcctcccaagtaactgggactacaggcacatgtcaccttgactgctaattttttttttttaatttattgtagagacagggtcttgctctgttgcacaggctggtctcaaactcctggcctcaagccgtcctcccaccttggcctcccaaagtgctggcattacaggcatgagccaccacacctggcctacaaatatatatttgtatattatatgtattttggatgtgtatatacacatatacacaaataagaaaagacaaaagagaatgcttttgtcttttcttattttgacactctaatgccagccatggctgttaaagaatgattttaataaaatacactgtacttgttcactggctctatttatttaccatcttttgttcccccagaaaattgatatgttgacattaaaatgccatgtttgtagagaaattaagttgtagttgttggcacatgtttagtatgcataatcacagagttaactttagctttgaatttaatttaattttcttaaacagcaaaaaatgaaaattgcctggggagttacttaaagaaatacaggattgagaatgaaaagtttctcctacaaggattagaaagcgtgttgctatgaagtagtgataaaacattcatctacaatgccttttcccttaattttaacagcggaaacatcttggaaatatatttatttttcaattaggccaaaataccttacctcaaagataacctctcactttaaaagtcatattcctgtgatttgcatgtgagtaaaaaccatcatattttagtgggcttcaggaagctcttaaattttaaaacatgggccaaat

SEQ ID NO: 417 - DNA, 4100 bp, Homo sapiens
ctgtgtaaagtgagcgcaggaaatgaaaatgcttgtctgacaacaaagcatttaactgcccttggaaaactagaaccaaagctggttcctttggtgattgcatttaggtactgggcaaagctttgcagtatagatcgccctgaagaaggaggtctgccaccttatgtgtttgccctgatggccattttctttcttcagcagaggaaagaaccccttttgcctgtatatctaggatcatggattgaaggattctcattaagcaaactagggaatttcaaccttcaagacattgaaaaagatgttgtgatctgggaacatactgacagtgctgcaggggacacaggcataacaaaagaagaggcaccaagagaaacgccgattaaaaggggacaggtgtcattaatattggatgtgaaacaccagccttcagtaccagttgggcagctctgggtggaattgctgcggttctatgctttagaatttaatttggctgatttagtgataagtattcgtgtcaaagaattggtatctcgggaattgaaggattggcccaaaaagcgcattgccattgaagatccctactctgttaaaagaaatgtggcaagaaccctaaatagtcaacctgtgtttgaatatatacttcattgtttaaggacaacatacaagtattttgctcttccacacaaaattacaaaatccagccttctaaagcctctgaatgcaattacatgtatttcagaacattctaaagaagtaataaatcatcatccagatgtacaaacaaaagatgataagctcaaaaactcagttttggcccaaggtcctggtgctaccagttcagctgcaaatacctgtaaggtacagccacttactcttaaagagactgctgaaagttttggaagcccaccaaaagaagaaatgggaaatgaacacatcagtgtccaccctgaaaactcagactgtatccaagcagatgttaactctgatgattacaagggtgataaagtataccatccagaaacaggaaggaaaaacgagaaagagaaagttggaaggaagggcaagcatctgttgactgttgatcagaaacgtggagagcatgttgtctgtggcagcacacgtaataatgagtcagagagcactttggatttagaaggcttccaaaatcccacagctaaagagtgtgagggacttgccactttagataacaaggctgatcttgatggagaaagtacagaaggtactgaggaactagaagactctctaaaccactttacccactcagtacagggccagacatcagaaatgattccctctgatgaagaggaggaggacgacgaagaagaggaggaggaagaagaacctaggctcaccattaaccaaagggaagatgaagatggcatggctaatgaagatgagttagacaacacctacactgggtcaggggatgaggacgccctatctgaagaggatgatgagttaggcgaagctgctaagtatgaagacgtgaaagaatgtggaaaacatgtagaaagagctctcctagtggaacttaataaaataagtctcaaggaagaaaatgtatgtgaagaaaaaaattcacctgtggatcagtctgattttttttatgaattcagtaaacttatcttcaccaaaggcaagtctcctacggtagtgtgcagcttatgcaaacgagagggtcatctaaagaaggactgtcctgaagacttcaaaagaatccagctagaacctctgccaccattaacacccaagtttttaaatatcttagatcaagtctgtatccagtgttataaggatttttctccaacaattatagaagatcaggctcgtgaacatattcggcaaaacctagaaagtttcataagacaggactttccaggaactaaattgagcctgtttggctcctccaaaaatggatttgggttcaaacagagtgaccttgacgtctgtatgacaattaatggacttgaaactgctgagggattggactgtgtcagaactattgaagaattagcaagagtcctcagaaaacattcaggtctgagaaacatcttacctattacaacagcaaaggtgccaattgtgaagttcttccatttgagaagtggtctggaagtagatatcagtttgtataacacattggcccttcataacacaaggcttttatctgcttattccgccattgatcccagagtgaagtatttgtgctataccatgaaagtatttacaaagatatacaaaggtgaaaagaaacctgaaatatttgttgatggctggaatatttatttttttgatcaaatagatgaactgcctacctattggtcagaatgtggaaaaaatacagaatctgttgggcagttatggttgggccttcttcgtttctacacagaggaatttgattttaaagaacatgttattagcatcaggagaaaaagtctgcttacaacttttaagaaacagtggacctcaaaatacattgttattgaagatccctttgatttgaatcataatcttggagctggattatcaaggaaaatgacaaattttataatgaaggcttttatcaatggtagaagagtatttggtattcctgtcaagggatttccaaaggactacccctcaaaaatggaatacttttttgatccagatgtgttaactgaaggagagctggccccaaatgatagatgttgtcgaatttgtggaaaaatcggacacttcatgaaggactgtcctatgaggagaaaagtaagacggcggcgagatcaggaagatgccctgaaccaaagataccctgagaacaaggaaaaaagaagcaaagaggacaaagaaattcacaacaagtacacagaaagggaggtgtcaacaaaagaagataagcccatacagtgcacacctcagaaagccaagccaatgcgggcagctgctgacctggggagggagaagatcctcaggccaccagtagaaaaatggaagagacaggatgacaaagacttaagagaaaaacgttgttttatttgtggaagagaagggcacattaaaaaggaatgcccacagtttaaaggctcttcaggtagcctttccagtaaatatatgactcagggaaaagcctcagcgaagaggacccagcaggaatcatgagggaaggaaaatgcagcactctaaatggccactcaggcgttcctattcactcggaaaattaggttcatttcacaggacacagcagtgtagatcaggcttcaacttaacatttaagggaaatgtcagatttttttttaatttaatgaaattgttaatgaggaaaaatttttaatatagtcttatctaccacacatccccatagatttaaggattttaatagaaagtcatgatgtatgtatttaagccacgttaaaagaaaaaatataactatggaccggtattcagtgaatacagtttcatggtttttaattctttcaaagcacattaaaaatggtgtgctgataaaccccaagtaaattaaccctttttccgtataaatccattttttgttttgaagaggggaaattatatttattgttgtttactgaatcctggtgtgaaagcatatcagatatgtatgaactgctactgctgtacttccgatttacggacatcattttattgctatttgtagacgtgataacatgaacatgagtacctatttatgtgggccttcagtggatgggcagtgccactcaggtctctggggtttccctctctaattttaagtaaattgacatataactactatgcttataaaaatgaagtaaggaaaacaagtagtcctgtttgccactaaaaacattttcaaaggaaaaataaaatgaaagtactttttactttttatgatactcagaaattaggatgaagaacttttaaaattgctgaagatcaaagaggttatctctgccagtcacaagtgtggctggtgtcattctgggtctgactggagccctcctggactgtttctttaatttcaaaagccctgcagacatagtacctggtcagaactatgcctcggtttatttatcattttgaaataaaatcaaaatttcaacctg

SEQ ID NO: 418 - protein, 991 aa, Homo sapiens
MAIFFLQQRKEPLLPVYLGSWIEGFSLSKLGNFNLQDIEKDVVIWEHTDSAAGDTGITKEEAPRETPIKRGQVSLILDVKHQPSVPVGQLWVELLRFYALEFNLADLVISIRVKELVSRELKDWPKKRIAIEDPYSVKRNVARTLNSQPVFEYILHCLRTTYKYFALPHKITKSSLLKPLNAITCISEHSKEVINHHPDVQTKDDKLKNSVLAQGPGATSSAANTCKVQPLTLKETAESFGSPPKEEMGNEHVHPENSDCIQADVNSDDYKGDKVYHPETGRKNEKEKVGRKGKHLLTVDQKRGEHVVCGSTRNNESESTLDLEGFQNPTAKECEGLATLDNKADLDGESTEGTEELEDSLNHFTHSVQGQTSEMIPSDEEEEDDEEEEEEEEPRLTINQREDEDGMANEDELDNTYTGSGDEDALSEEDDELGEAAKYEDVKECGKHVERALLVELNKISLKEENVCEEKNSPVDQSDFFYEFSKLIFTKGKSPTVVCSLCKREGHLKKDCPEDFKRIQLEPLPPLTPKFLNILDQVCIQCYKDFSPTIIEDQAREHIRQNLESFIRQDFPGTKLSLFGSSKNGFGFKQSDLDVCMTINGLETAEGLDCVRTIEELARVLRKHSGLRNILPITTAKVPIVKFFHLRSGLEVDISLYNTLALHNTRLLSAYSAIDPRVKYLCYTMKVFTKIYKGEKKPEIFVDGWNIYFFDQIDELPTYWSECGKNTESVGQLWLGLLRFYTEEFDFKEHVISIRRKSLLTTFKKQWTSKYIVIEDPFDLNHNLGAGLSRKMTNFIMKAFINGRRVFGIPVKGFPKDYPSKMEYFFDPDVLTEGELAPNDRCCRICGKIGHFMKDCPMRRKVRRRRDQEDALNQRYPENKEKRSKEDKEIHNKYTEREVSTKEDKPIQCTPQKAKPMRAAADLGREKILRPPVEKWKRQDDKDLREKRCFICGREGHIKKECPQFKGSSGSLSSKYMTQGKASAKRTQQES

SEQ ID NO: 419 - DNA, 26453 bp, Mus musculus
  misc_feature (1)...(26453): n = A,T,C or G
tgaactcttactttgcatttcagctagnnnnnnnnnnnnnnnnnnnntagagcatgtagactttaggatgaagctcagaggcacttacttaaaccgcagtcacgggtctgaaacctatttagggaaaccacagctgttgctctgggaggctagaggagggacaatggagtcggtaacttagtaagacatcctaaggatatgtattagtcagggttctctagagtcacagaatttatggaatatctctatatgttaagggaatgtattgtaatggcttacagtctgcagtccaactaacccaacaatgggcaactgcaaatgtgaagtccaagaatctaatagttgctcattcccacaagagtaggtgttttgcctggtcttctgcataagctggaactctgaagaagtaggttccaacagatgtgctgcaagtaagtgctagcaggtaaagaaaaagaggaggaggatggagaggaagaggaggaggaagaagaaggagaagaaaaaggagaagaagaagaagccttccttcttccattgtccttatgcaggcccagattaccaccacatctaggtctaagctgctttttatttggaacttgctctgtcccagatctgcttgcttctgtctcttgagagtaaagtcgtgtgtatcaccttgcctgctcctaagcttttcatggccactatacctcaagatccaatcaacagcgtgtcttccagcctcaatatctggatcataagtgtgccctccatttctggattgtaattcattccagaaatagtgaagctgacaactgggaatacccatcacggccaaattttgggtagagttctttggctgagtttttgaaggaatcctggagagaccctgcgatgcttaactacatggttctagttagccccttttttgtgatctcaaaaacatataaaacattttatgtactgggctttggagttgttgaataaatgaaccccaagtttttagtgtctgagattctcactcaagcatggtacctaattaggcttcaaagcctgacctcgaatcatcctgaggaaggtgcaaggcttttgtctcctagacacannnnnnnnnnnnnnnnnnnncacaaattgtcccctgacttctatcatgtgtatgatggcccatgcatgtgcaactcatagaaatacaaaataaatgaagttattgataaacaaataaataaatggcaccaagaacctggagacacctggcccagaccccgaccaccggttatgcttgcttgggtcagactatgtattttatactgaactcttactttgcatttcagctagcatcttagcagtgaaccccaagaaacaatagcttccttattcagaaaaagattggttcttcaaaggcatggcttcttcgttagagcatgtagactttaggatgaagctcagaggcacttacttaaaccgcagtcacgagtctgaaacctatttagggaaaccacagctgttgctctgggaggctagaggagggacaatggagtcggtaacttagtaagacatcctaaggatatgtattagtcagggttctctagagtcacagaatttatggaatatctctatatgttaagggaatgtattgtaatggcttacagtctgcagtccaactaacccaacaatgggcagctgtggatgggaagtccaagaatctaatagttgctcattcccacaagagtaggtgttttgcccggtcttctgcataagctggaaccctgaagaagtaggttccaacagatgtgctgcaagtaagtgctagcaggtgaagaaaaagaggaagaggaggaagaggaagaggaggaggaggaggaagaagaagaagaagaagaagaagaagaagaagaagaagaagaagaagaagaagaagaagaagaagaagaagaagaaaaaggaggagaagaagaagccttccttcttccattgtccttatgcaggcccagattaccaccacatctaggtctaagctgctttttatttggaacttgctctgtcccagatctgcttcctttttttttttttttttctttttgcttgcttctgtctcttgagagtaaagtcgtgtgtatcaccttgcctgctcctaagcttttcatggccactatacctcaagatccaatcaacagcgtgtcttccagcctcaatatctggatcataagtgtgccctccatttctggactgtaattcattccagaaatagtgaagctgacaactggcaatacccatcacggccaaattttgggtagagttccttggctgagtttttgaaggaatcctggagagaccctgcgatgcttaactacatggttctagttagcccctttttttgtgatctcaaaaacatataaaacattttatgtactgggctttgaataaatgaaccccaagtttttagtgcctgagattctcactcaagcatggtacctaattaggcttcaaagcctgacctcgaatcatcctgaggaagggtgcaaggcttttgtctcctagacacacccaggaggcacaggggaaaatgccctcctgcagtctggtggggcaggaaggttcagatatcatccgggactcggtagcataccttctgcatggctcatctgtcttttcctccttccagggtgacaccagatgagctggcatctgcatcaaagtcaagagactagcccaggggagtcttaaagcttgatttcctatggccccaataatcacattctacttccccaggtgcccgggagggctccaagagttgaatttgctaagcaactgatgggggctggaagaagagtagacagcaaaagccttttctaagccatgctgccctctcttgaacttaagttacttcttcactttagggagggacctgacatgttgtcaatctacagcaccggcatcgcttaagaacttttttccctttggtgtgtgtatggtggggcggcggggagatgatggcccacaacttggtttttttgtttgtttggtttttttacttcttaaattttattatttatttggggtttgtttgttgagacatgttttctctgtatagtcctggctgtctgtcctgcagctcactctgtagaccagactagtctcgaactcacagagatctgcctgcctcagcctccagagtgctgggattaaagacgtgcaccaccactgccccccttttaaaaagcaaattctagagactagagggatgatttaataagtaaagtgttttctgttcaagtataaaaagttgagctcagatctctggcacccacataagagccagacacaggagtataagtctgtaaccctagagttaggttgggaaaagaggccgagacaggcagatctctggacctggatgactaacaaatctagccaaattgggagctccagcttcagtgagagagcatctcaaattattattattgttgttgttgttgttgttgttgttgttgttgttgttgtatgaaaagtgacttaagacctctggcttccacatgcacttacttgttcacacatacccatgtatgggcacctgtggacacacatacacacacaaaagcaaattctggagctctgtcccaagcctactgaacaggaatatccagggatgggtttcaactgtctgctcttccaggaagtttgagaaccatcagacagttgttctcagaatgacaggaggagcatgtgtgaagtgctcagagttgtgcctgaagcttcagtgttgctcagctgtgacaccacctgattcagcgctgccacaataagaatctcttctagtaatgctttcattgccctagtgccaggttctcatggtgatgttcttcccctgaaacaacacgggtcaggtgtgtatgcacctgactgtcacactacaaagattttcactgtctttgccatgaaccataatgagacacatggaatcgggggtgggggagtacaagtccttgcatgaataaggaaataattgatcgagtctattgtaatagagagatacccaagcctgaactggaaacactgcagaaaaaaaaaaaaaactgggtgagccatgctttcctaggccaagatcatgggacagatggttgtggaaggagtaaaggtcatagcagaaatttctgtgtagggggtctcgaaacttacttaaagcactgtgccaacagctggctgggagatggatcagtgagtatcagcacttactatccatcgcagtgaaatgagtttaattctcagaacccacacggtcaaaggaaaaactcagcttctgcaattgtcttctgacttccacacgcacaccatggcttgtgtgcatatgggtgcacacacgtgtgcatgcacatacacacttaaaatagtttttattaaaagagtttttttttttcaaaactttgggtcaaacattgcaagggaaagttgaggcagaaaatgcctgtagtaaaatacacaaggtgcaagtctgagacttacgtggaacagagaagtgccagtactgtgggaagttcccgcggagcctaggaagtgacctagttatgacagcctcaactaatagggagcacagagtagttcttcagttctcatcagagaaacagacactgaggctggcattatggtttggtagagtgcttgccgaggatatcctaccaccacataaaccaggcaggatggcacatacacacctatcatctcagcacttactggagaagcatgtgaagtcagaagacacaagaggccctttcaaggaaagaaaggagggagcgagaaagagagacaagagagagggactttttcttaggtcgcatgtggaagaatgaatataattgtcaaagatatgagatgtaaattcctgcaatcagaactttatcttctgcagcaaagtctttgcaaacgtggtggtaaagggaccttgggaggaagagattgtccctgactgattacctgttgcagtcccagacactgtcacacggtccatggaggacaaagagaaagataggacccagacagaagaagacagccttatcaccgagattagaacggtgttgctattagccaaagaagcagcacgggctgctgacatcccagcgaggacaattcagactcgtgacctccatatctgtgagaaaataaacccagttctggcccgctcagtgggtgagggaaacaaccgcacattgtttctttcattatccttttctgttagatccctggctggccttgagcttgctgtgcagcagaggatgacacggagagcctcattctgctccagctcctaagagatgagattccatgcgtgcaccattatgcgggttattcagcactcaggatcaaacccagggctcccagcatgctgggcaggcactctaccaactgaactaaatccccagtctggatagggtttataaacaataattcttgccaggcgtggcggcgcacgcctttaatcccagcactcgggaggcagtggcaggtggatttctgagttcggggccagcctggtctacaaagtgagctccaggacagccagagctataaagagaaaccctgtctcaaaacaccaaaaaataataataataattcttggctttgtgaattttaagattttttggaggggtggttggttactttggggatcattatataaagtgacagacatcatcatctcgaatatcactgcattcaacgtgccggttctacaacagcatatacacgtcagaaaaataggagttgggaaattcagccaactgaactttattaaagatggagctaaagcttagccacataaccaaaacatggctggtttgataattagcattcatcaagattattttaccaagaagtcaaaaaaataagagagggggaagaaaaagtgtttcgtgggttaatgcactagtctgttaattagaaatgtgctattagtaacggtggtgctctttttcctgtttgaaacattttatgggctggagagatggctcagcaggtaagagcactggctgttcttccaaaggacctgggttcaattcctagcacctacatggcagctcacaaatgtttgtaactcctattccaagggatccaacaccctcctactgacaaatatacaatcaaaacaccaatatacaaaaaataaaaataagttatttaaaaaacatttggttttagttattggtgtggatgatatttctaagtacattagcatggtatcagtagttagagacactctagtttagaataatagtggccttcactcctatttagtatctatctgtctcccatgtctcctacagtcaatattctttggctttagtttagatttgggaaccatagaagggcctgatgcttttctccagtgcaatcatacccacatacaaaaagacaagaggatgccttctttagagcacttctgcctggcctgctgccaggctgttgctcaaggcacaaagcttaaaatagaggcaggtttttccacccagtgcaatcttgggagccatggcccaaaggcagctgtaaaacccacgtgttaaaataacttagattgcttgtgatagactgagtaaacaaacatacaaaggaacaactaagcagccacagaatctgacccacagaagaaaagaaacaattgcctgggtgaatggctctgaattggcaggacttactcaatagctaatgacttcatttttcttcctctacttcctaccctggactaacctgagaacaccagagatggaagaccagagatattctccaaacccaagtccccaagtcaatcatatagatgttccatttctggtcactcctctctcaacttccaatcaatcagggcatatgcaaatggtttctcaccctcaccccaaagcatcagtttcttgtctttatggtgtcttcttgttatagcaagttctaagtgtgcttctccacaccattgcattgtgttgtgtccttattcccatccattaatgattattttgaaaattgtgattattgccatcaaaaagagtttaaaaattgttttcttttgttttttttgtttgtttgtttgttttttgtttgtttgagacaaattttctctgtagttttggctgtcctggagctcactctgtaaaccaggctggccttggactcacagagatccacctgcttctgcctcccaagtgctgggattaaaggtatacattaccatcacctggctgctaaagaaaacagatttttgatgtgaaaatataactcagtggtcttgtccaaaaccatgttctatcaacaacagaatttattccagctgagtttggtggtagatgcttgtaaggcctgaggttgaaacaaaaagatttttggcctgaggccaagcagggctacatctagtaagactgtctcaaaataaataaatggatagatagatagatagataattgcctgtgtttctagaaagtttgtctttttcactttgttctttttaaataagcacacaaaatgtatctatcttcttcacagtaagtccatttgcctgtgtgcctcttcctcacccgtgtgcagttgtttgcaggagccaggagagaacatcatatcctccaaggagttaaacgttactagcagtttgtaagcttcggtttgggtcctgggaactgatggtttcctctggaaaagcagggagggttctgaactactgagctcacctcatttttgtttaaaaaaaaaaaaaaactagaaaatagttatggaggagacaaggaatgcttattattttttccataataaatactcttttcattgttgtcttatgaaatgggtctcagtatatagccttggctggccctcactatgtagactgggctcaagaaatcagagatctgcttggcttgacctcgagagtgctagaatttaagcatctgccaccaggcccagtatgaatatgctttttaaaggttttttggggtttttttgtttgtttggttggttggttnnnnnnnnnnnnnnnnnnnnnnnnnnnnnnnnnnnnnnnnnnnnnnnnnnnnnnnnnnnnnnnnnnnnnnnnnnnnnnnnnnnnnnnnnnnnnnnnnnnnnnnnnnnnnnnnnnnnnnnnncactagggaggcagaaacagatttatttgagttccaggacagcccagtctacaaagggagttccaggtcagccagggaatcaaaaatcctgtctcaaaaaacaaccacaacaacaaaagcctcattttcggggaggtgtacatgtgccaacagcacatacaaaagacagagaacaacttttggctctcttctttcaccatatagatctctgagatagaacttaggcttgggttcaggcaactctttaacactaagcaatctcaccaagccctgaacgtgatcttttaaatcacttttaaaaaaatacttcttttagggccaggaggtagtggcgcactcctttaatcccagtacttgggaggcagaggctggcggatctctgtgagttttgaggacagcctcatctatagagcaagttccaggacagccaaggctacactgaaaaccctgtctcagaaaatattttaaatactattataaaagacattacaagtcaggcagtggtggcgcacgcctttaatcccagcacttgggaggcagagacaggcgggtttctgagttcgaggccagcctggtctacagagtgagttccaggacagccagggctacacagagaaaccctgtctcgaaaacaaaaacaacaacaaaaacaaaacaaaaaaaagacaatacaaatttttaaaaatcacatattgaaattaaccaaactcaaatattataaagcttctaaacagaatagccaataaaaaaaaatcttatatggctaaaaaaaaattacactttaccgaattattttctttcaatcttacctatacctgtatatatattttttctctatccaagtaatttcttcaagctacacaactacagccttctattaaatattactcttcttgagtgaggaagaggaaactaaagcggatagctcggagatagctttaatcccggctcttgagaggcaaaaccaggatgcctgtgattgcctggtctacattattaaaccctataacccctatctcaaacacatacttatatcttttccagcgaatttatcaaattccagaagtggcgcatgcctttaatcccaaaacttgggaggcagaggcaggcggttctgagttcgaggccagccttggtctccagagtgagttccaggacagccagggctacacagagaaaccccgtctcgaaaagacaaaaaaaaaaaaaaaaaaggaaaaagaaagaaaaaaattgaaagtaagaaaaacaattcataatgtaaagtaggaaaacagtctccatcgttctcaaccgctttttttcttttcttttctagccaccatcctacaaccccacccccacccccgcgtccccgcctgccacgaaaagaatttctaccagacttgagagaaatgctcctaaggaacaatccatgtataggtaaggcaggaagtgcggcgttagaagccacgtgctgatctaaattctatggacgcccgtccagccagaccctggagaggtgactctgtcctccgctctgtcttcttccacttacatcagcattgttgtgggttaaacagaaaccacgggttatgcaactctccaccctgcacattttaatctacaactttcatacaaaaggaaaggtacggctgaggtggaaattccacagcaggtcttttttttctacgcttttcttacagaaccaaggcaccacgctggcgtgaaccctccaaagtggatcagcctcgccccaaggcttgcaccacaggacaggttacgacccggcggcgtcacgcgcccggactcccgcaggctccgccccgaggcaggcatagccaatgacggggcgggggcgggccctgtcggggctgtagcctgagaggctttaaagcctgagcccggcgctgctcctccagattctcggacctcggcgacctccggggatccgagtttgcagacttcttgtgcgcagctagccgcctcaggtgagtgacccccgcgggtttaaaggcttcccgagcaagggcaggtaggggaatctagaatgtgggaaccatagcatctgcaacccggactggagacccccggatgggccaggatctcgaggatgtgtcctcggcctccccgaagtgataggcccttgttgtcgagcggggtcttcatcaggtcatgtgactccgggctgccgggacccgtagggacagcgggaccccctcaagctggtcacgggacccagggctccttatgccgccataacattcgcgggcggtggccgcgagcgcggagcggacgcccatccccctctcccccggacgggcccagcttggcccctaacccgaactgagatcgcataaggaggcatcgccttgaggcttcagttcgcctgatgtgcagctgtgcgttaaagtgtgtggtggcagcccaccctctgggtattcctgtatgcccacttggggtcactaatacttgtcaataaatgacctggacccagttgtcctcttaagattttgacgcatacaatatcggaagacttaagactaccgtggccctataataagagaaaggtggggagggggggggctgtcgagatggttcagcgggtaagagcactgaccgctctttcaaaggtcctgagtgcaaatctcagcaaccacatggtggctcacaaccacccataatgagatctgacaccctcttctagtgcgtcaaaaatcagctacagtgtacttatgtatgataataaatcctaataaataaaagagaaaagggtttatccctgttccaatgactactaggctgtttttgtttcagtagctagagtctagtaacctccaaagattaattcctgacttgtttttctccactcataatcacatttgttaacacgtgcaaggatgcttcaactcagaacggtttactgctgggctggtggctcatggatccctaaacttgagagatgggtcattgaaaaagtttaaagcctgaactacatgagaaactgtccttaaaagagaaagcttccgtgggattctcatttcctctttttccttccctaggtgtttgaaccatgaatcttttactccttttggctgtcctctgcttgggaacagccttagctactccaaaatttgatcaaacctttagtgcagagtggcaccagtggaagtccacgcacagaagactgtatggcacggtttgtagtgtttacattgtctagagagaatggtcttccttgcccttggaagtgttcggttggttggttgggttttgtttttgtttttctgagtcagtgcttctctgtgtgtccctggctgtcctggaacttgttctgtggaccaggctgtctgtgaactcagtgctgggatttaagtcatgtgccaccactgcccacctctttctccccccacaaaccccctctctaaccctcagaagtttatagccagagagtagtctctagaggccagctcttagcaggaatagcccaatcatacatccattgtgagcagagtagagcacatacatccctttgtgtgttttcgggaggagtggtgcctttcagagtgtgtagctcttcctgttccagtagatccatttggtcagatggattggtttttttatttaagatttatttagtgagatatatgtcactcgtgatatataccacacttatgcctgggtattgtgtacattctggagctaaagttagaaagtaccatatggccaggcagtggtggcacacttgggaagcaggggcaggcagatttctgagtttgaggccagcctgggctatacagaaaagaaaccctgtctcaaaaaaagtaacatatgtgagtgctgagaattaaacctgagtcttccacaaatggtcttaaacacagccatctctccagctccatctctgcctctggaattaaaagcctgtgccaacatctggctccccctgtctattaacaaaaaatgaaaactgccaattctgtgcttgctctagaatgaggaagagtggaggagagcgatatgggagaagaacatgagaatgatccagctacacaacggggaatacagcaacgggcagcacggcttttccatggagatgaacgcctttggtgacatggtcagtggggacatgatgcgaactcttgaactcttgagccctctcctccattttctttctacaaagtctcaccttttttactttttttttctcccttcccggaagaccaatgaggaattcaggcaggtggtgaatggctatcgccaccagaagcacaagaaggggaggctttttcaggaaccgctgatgcttaagatccccaagtctgtggactggagagaaaagggttgtgtgactcctgtgaagaaccaggtatgagggcttgagtttgatccccagggtccacacttggaagagactcgaggtgggggtgggaggggagtgcagcatcactaaagataatgatttgattaccctcccccagcagccatcaactgagaggagccaggccccacgagactctgtcctctgtgctttagccttgaccacagtgttttgtcttgtctgctcttttggagtgtgaatgagacaggatctcacaatactagcccagcccagcccagcctggcctcaaacccaggatcctcttgccttaatctctctagtggattgcgggcatacattgccctacccagattcctgtcttactgttttgttttttttttttttttttttggttttttcgagacaggatttctctgtatagccctggctgtcctggaactcactttgtagaccaggctggcctcgaactcagaaatccgcctgcctctgcctcccgagtgctgggattaaaggcatgtgccaccacgcccggcttggtttttttttaagtatgcatatatcagggggggggggagatgtggcacacacttttaaccccatcacttgggaggcagaggcaggaggatctgagttcaaggctatactgtctacagggcgatttctaggccatccagggctacatagagaccttgtttcaaacaaacaaaaagtgtgcatgtataaaggctgttgtgctgtttctcttactagcctttttctctcttcagggccagtgcgggtcttgttgggcgtttagcgcatcgggttgcctagaaggacagatgttccttaagaccggcaaactgatctcactgagtgaacagaaccttgtggactgttctcacgctcaaggcaatcagggctgtaacggaggcctgatggattttgctttccagtacattaaggaaaatggaggtctggactcggaggagtcttacccctatgaagcaaaggtaattggtttgttttatcctggctttgttttcagaaaaggaagcattaccagatgtggttttcagagttcatactttagtgggtaactcacagcattctagttcgagggatggtttctgagtattgacctcacaaggcgtgagctgcaagtcactgttttgtttctagagctcatgttctaagaggtaaacagttgtgatcaagtctcccccttaactttcaaaggacggatcttgtaaatacagagccgagttcgctgtggctaatgacacagggttcgtggatatccctcagcaagagaaagccctcatgaaggctgtggcgactgtggggcctatttctgttgctatggacgcaagccatccgtctctccagttctatagttcaggtaatggtcagaattagcacctccctgactttggcgatttatgttgggggaggggtgtgtgcagatgcccttgggagtcctgaagcatcagaccccctggtgctggaccgaggtagttgtatgccatctgtctagtatgggttctggaaccaaactcaggttccctgtaagagcagggaatgcacttaactgctgagaccgctctctccagcaccctctgcttttcagtgttttaatgcattgggggtggtgggcgtggttagagaaaaacttgcaggagtcatttcttctcggtgtgtgtggcttccagaatcagaccctgagccttgttaacaagttcctttccctgttgagccatctcaccatctgaaatatttcttttactattgtgacttactctatagatagaacatagcttacataaatcttctccaacatatggatctttttccaagagattttttttttattgctataattatggccttaaagaacctgtggttcagctgtaaggctgaagggggagggagggaaagagggagagcttttctgtctataaactttttctttagatttaagagtagcaaggattatggttattaatctggctagaaaatggatcctaccattataggctttaaaacaatagaatattttttaattgacgggagtggggatgtagctcaggtagtttttccccagcattctttaaaccctggttcagtcttggcactacataaaccaggcatggtattcattcctgtaatcccaacacttaggaggcagagacaggagggtcaggagtttaccccatccttggctacatggcaggttgggagaaaactccatcttaaatattgtgataggatttcactgtcaccttgcctagcctggaactctgtgtacggcaggctggccttgaactcaaagagagctgtctcctcctgagttctgagaatgagtcatgttgccaccacacccagcatagccactactggtttttgactattatcttcacagcttgggatctgtgaagctacagaattttgagatatagtcctgttgtgggggatagaatgggcttctgtcctgtggtgacaggaacctcttattcagtgttcatttttctctgccaggcatctactatgaacccaactgtagcagcaagaacctcgaccatggggttctgttggtgggctatggctatgaaggaacagattcaaataagaataaatattggcttgtcaagaacaggtaagagactctaaatgttatactttaattgaaaagagtattcattggggggaatcaatatgtagatgcaagtccacagatgtttaagttttaaaatcctggaagctgttctcagtcagcgtgaaagccctgcatttaagattctaaagtaagcttgttggggagacctacatgtatatgtaatggtgaatttccaaacttggctccaaaatttcagtaaggctgtatgatttcagcatgctctttttttttcctctagtttttcaacaagaaataaccagcagaaagtacagcttgtgtgcctccctgcattatctgcattttgctgtcatatctcagaaccttttaaagcctgtcagaattaattttcacaactatctttcattgagatgtaacgggaagtggaaacatactcttctattaagctccctagcttgcctcattttcctcttaaaagagggagctaagtctgtagcatagttggtaaagtgcttgcctacaatgcacaaaactctgggttcaattcccaggaccgcatacaacctggcatggttatcccaacactggccttagtgtcatgcttttagaaaattggtggcattaaccttggttacacacgaccctgtctcaaaataagtgaggggcttgggcaatgactcggtggataaggtacttgccactcagtcatgaggacctatgtatgcttggattcctaccactcacatatgtgctgcattacacaactgtaaccccagttctgggcactagggggctgtgagctccaggttcagtgagccacccctatatcaaaaaaaataagagcttgatagaggaaggtagcagtgtctgcctcctgcttccacgcagttgaatgagttgaagacccacaggaatgagtgcctctatatattctatgtgtagatcttagaaccctcagaggtaagtgcactcctattttttaagtataaactattaattctctcatatctccttggatctctttcagctggggaagtgaatggggtatggaaggctacatcaaaatagccaaagaccgggacaaccactgtggacttgccaccgcggccagctatcctgtcgtgaattgatgggtagcggtaatgaggacttatggacactatgtccaaaggaattcagcttaaaactgaccaaacccttattgagtcaaaccatggtacttgaatcattgaggatccaagtcatgatttgaattctgttgccatttttacatgggttaaatgttaccactacttaaaactcctgttataaacagctttataatattgaaaacttagtgcttaattctgagtctggaatatttgttttatataaaggttgtataaaactttctttacctcttaaaaataaattttagctcagtgtgtgtgtatgtgggacttcagtgtgtaatgtgttgaccaatgtttgggactaaatactgattcagggtgtcatggtacagcaagaaaaaggtggcaggtgctctggagccttcggatttcacctcagtgtcccatcagattaggcatgtgtaagtgaatctagcttggaataattgttttctttatgtgtgtgtacatggtaaatgtgtggagttcagagaacaactcagttccacagtgttggtcctacaggtcctagccatcaaaataaggttgtcaggctgggccacaggtgccttttactactgagctatcttgccagccccactagtttttaagtgacataattacgtatgtttatactataatgtgtttttgatatgatgtgtatactacaaaatgatctgatagggctaataagcttacctcaaatatttaattactttgttgaacttttctagctgtttttaaaatacacagtatattattgttggaaactgtcctgttatgtagaccaggctggccttaagcccatgatctcctttcctcagccttctaagggctaagataaacatgtaatgttatacccagtctcaagtctcatatctggcaaaacttgacagtccagaagaacatgagtaaatcgctcagcacaggagtatcaacttttctaattctgtgacctttcaatatagttcctcctgtgtgactcaaaccataaaattatttttgttactactttataactaatattgctacagttataaatcataatgtagatttttttttttttttttttggaaatagaggtttgtcaaaggagtcacagcgctgagaaccactgttctagaaacttgcaggttttacatattaggctgactggaagaaggttgaagtgctagtttcagtagtgcctgtccacattgccagtgaagaccacaatcctgctatgtagttctagaaagggccatacacaggtgggctgtaggctgacattattcccaattggcctgagaaaccccatgctacccaggaatgacaaaaaaataaatgaataaatacattaagcagttgtgattaacttcccaggtgatgacaatactggagatgggcatgcccctgaggtagaatgatccaggcatgggcgtagccagccttgaaaatgtcaatgacttagcagggttcttttcaaaactgaatttttacaagggagttcatagatggaccttgatggaaactgactaccagaaaagactcgatctctctgccatgttggggtcagcaaacaaataccacaagataaatgcacttcagcatttcaattataccatttgtatgccctctgccttgctactttcacaccagattgtctaaaatgcctgacggatgccgcttcatgaaggaaggaaggattcgtgttaggtcatagtggtcagaggggtacaggtcatgatggtgatggggcacgggaggaccagaacagtttgtttcactggtcaggaaggaaggtcaggaagcaaggtgaaggctgatgctcagctggcttttttgtttccaaatccttttattatctgagccctgagtatatgctatggtgccatccacaatcagggtagatcttcttatcttagtcttctctgaaaatgtcccactgaacacacagcatctcttagattatttttattttgggtgttgaagatggagtatgggtatgtgtttgcatagcacgtgtgtgtgtacttaaaaggtcaaagttcagtggctttaatcaccttcttcgtgggtgctaggagttgaacttgggtcctctacaagggcaggaagtactcttagaccatgaagtcatctctccagccccctgttgcatgccatgtggctgaaattgacatctgatgacatgaaggaacagatttacaaattggccaacaaaggcctgactccctcccagataggtgtgatcctgaggggctcatggtgtggcacaggtcagttttatgactagaaataaaaccttgagaatccttaaggccttgcctctgatgcccctgaggatctttcccatttgataaaaaaaagcagttgcagtccgaaagctccttgagagaaacagaataaggatgctcaattccacctgattctgatagcagaattcactggttggctggatactataagactaagcgggtggtacccacccaattgaaaatatgagttgtccacagtctcttttgtgtacacaagcaacaaaatcactttgagttaaaaaaaaaattcaggggactggtgggggctggtaggatgtgctgtacttcccagagcaaaggtggttatcatgaagctaaatgaaaacagccctgaccttatgttttgtgacagggtctagcactgaacttggagcttattactttggctagtcagactggccagtgaacatcagggctagagtacagacatgtgctgccgtttggcatttatgtcagttctagaggatccaaacttgggtcctcctgcatctctcccacttctaggtgatgtcaaacccttctgtcttagttagggttttactgctgtgaagagacatcatgacaatggcaactcttatgaagaaaaacacttagttggggctggcttacagttcagaggttcagtcccctatcatggtgggaagcactgcagcatgtaggcagacatggtgctggagaaaaagctgagagttctacattttaatcaacaggcattaggaagagaactggtgtgagcttttgagacctcaaagcccacctcctagtgatacttcctccaacaaagccacacctactccaacaaggccacatctcccaacaatactagtgccgatggggccatttttattcaaactaccacagtagaaactccttggccctgataggcttatagctatcatgcatttgatagttaaatgcattgtccaacttcaaaagcccttatagtccatcatagtctcaacattgtttaaaagtttgaagttcagagtctctttgagactcatgcaatctcttaactgtaaacccctggaaaatcaaagtaaaaaataaaataacatactttcaacatataatggcatgagatatatgttgctattacaaaaggaagaaaaggaagactaaagaggaaatactggattttccaaggcccagagcgcgccttcagttcagctgactgggcaaacagcactatcaaaagaaaccagtaagtatggttctttctatgacacctggttgtgttgggattccattttgaggatctaatgagacacatgaactcctgtccatagcacaagggaaacatctcacagcccacttggttcttggccccctgtgtattgttttgtgttttgtttgtctcctgtccagagcactagcaagaagttacactatttgtgtggttcttgggtactgagagccaagacagaaattacagttacaagaagatttttgagctgagccaaggaagcaaaagaatgaaggagcaggtgcaactgccagtgggcattacttgctaatgtttctctcagctctctcctgcattgtcctctgtctatgtccagtactatctctgaagctctggctgccacctgctcccatatggcagagcttggacaaggtagccaccctccacagcatgccacctttgctggctctgtctactcactatcacccatgccaaaatccaccacattcgctgcttctgctgcttgcattgccctgatcctgccccggccgctggattcagtttttagatacagataatattgaaatattgtttttttctgttatgatttattaaaaagctggctctgaaattgggtatggctccccacttctagactcaaacatgcttgtttaaaaattttctgtcctatgtcagtagagctacctgaatgaaaaaaaggcaaagcaaagtggctaaaacaaaatcagcattggtttcacttaattgcctaaaagttttgctaagctataagctataatcttaagatttgtaagactattatgtgaactttctgtacctcaatgtttataagtttattggagagatagctcagaggttaagagaactgactgttcttccagaggttctgagttcaattcccagcaaccacatggtgtggcccacaaccagctataatcagatctggtgctcttttctggcctgctgtatgcaaaataaataaatctaatgtttgtgtatgtgtgtgtgtgtgtacatagatatagatagatatggcttagagcttaagagcactgactgctcttccagatggtcctgagttcaattcccagcagccacatggtaaacatatataatggtatctgatgtcctcttctggtgtgtctgaaaacagcaactgtgcacacacatacattaaataaatatatctaaaagctttttttaaaatctataatatcattgggtggtagtggcacacacctttaatcccaacccttgggaagtagaagcaggcagatctctgagtttaagaccagcctggtctacagaatgagttttagaacaacaagggtgacacagagaaaccctgtctcaaaacaagacaaaacaaaaattgtgaaatctgtaacaaaagttgatttaaaacttacaacacagggttgatagctaagatttaaatataggcaaccttaccattcatgctgtaaaactcagcacatagcaccaccagacaaaatgaaaacaaagacctaatccatcaaagcccatagttctgggaaagtctccagatgtactaacccagcttttttacttctgcagttctgtttctggctaactgttcttgttaactgaagtatgccaacccatggcattgggtttttttgtgcttaaaaacctactctgagaaaggcttagggctaggctggaatccagaacacccagtggagtcatctgccaactaataaaggcctttggaaaaaggaaaaagctaaagagttagggccacagctatgagcaccaaacactaacactagaaactaggatattgctatcgtatgatgcagcctggcaaagtgtccatagaatgtctctcttcacctaaggtctagtcatgctaacagagcctgatgtaagaatgtctgtctagcttctttgtctactttgttaagcttgagctattttgataaactgagtcattcaagaaactctcctattttgtcatggagcactgtgaaagggacagaaaaataaaatcaccagcctctctagggactgtattcatgacttaaagttttattttattactaaaagagtgtcaatccaaaaaaaattggaattttttaaagggagaaacttaatagggataaaaagcaaatcctaactttataaaactatgtgatctaaactgttaaacattactaagacatgcaagttaatagtcaccttatacataatcaaattctttaatatgttcaggattatacttataatcatgccaagaacaaatatttacaaaagcaagttttatttggccatatttttttccatagtcaagcctaaagcaaaaaaaaacctaaaaagtttaaagtttatttaaaatcaggtatacttaatagatgaccctcgaaacttttcagagatctgcagaatccagcatttaaagtcgttagtggggaggtgagagcagaagggacggggatgtgagagacaaggtggccacattgtttccaggataggaagtccgcacagagtcacgtgagcaaggcaaggctatgagaagaccgagagggattcagcagtgatcctgaaatgcagccgcttggtttccagaagtaaagcaacttgctttttgaaacttgcctacttaacagattcagagactgcctgtgagcagtaactgggatgctcagcagtcatgagatccactcaatcatgtgacctggtcccctcggaaacctttaagaaaggacacaaccctggcacacagctcaagctcccagagccccctttatactgttgtctgcagtgtaagtattttagataagcctctatctaaaagggcagctggcctcaatatccctcttgaaccccaaagccaaaacctctcctagagaagctgtgaaatccgcaccaatctggataataaataatgaatggaggcaagtgggtttgtttttttgtttgttttttttaacaattttttattagatattttcttcatttgcatttcaaatgctatcccgaaagttccctataccctccccctgccatcctccccaacctacccactcctgcttcctgtccctggtgttaccctgtactggggcatataatcttcgcaagagcaagagcatctcctcccaatgatggctgactaggccatcctctgctacatatacagctagggacatgagctctgggggtactggttagttcatattgctgttcctcctatagggttgcagaacccttcagctccttgggtactttctctagctcctccacttgtgattgtgatccatcctatagatgactgtgagcatccacttctgtatttgccaggcactggcatagcctcacaagagacagctatattagggtcatgtcagcaaaatcttgctggcatatgcaatagtgtctacgtttggtggttgattatgggatggatcaccaggtggggcagtctctgcatggtccttccttctgtctcagcttcacactttgtctctgtaactccctccatgggtattttgttccctattctaaggagtgacgaagtatccacactttggtatttgttcttcttgagtttcatgtgttttgtaaattgtatcttgggtattctaagtttctgggttaatatctacttatcagtgagtacacatcgtgtgtgttcttttgtgattgggttacctcactcaggatgatatcctccagatccatccatttgcctaagaatttcataaattcattgtttttaatagataagtagtacgccattgtgtaaatgtactgcattttctgtacccattcttctgttgagggaaatctagattctttccagcttctggctattataaataaggctgatatgaacatagtggagcatgtgtacttcttaccagttggaacatcttctggatatatgacaaggagaagtattgctggatcctccggtagtactatatccaattttctgaggaaccaccagactgatttccacagtggttgtacaagctcgcaatcccaccagcaatggaagagtgttcctctttctccacatcctcaccagcatctgctgtcacctgaatttttgattttagccattctgactggtgtgaggtggaatctcagggttgttttgatttgcatttacctgatgattaaggatggtgaacattttttcaggtgcttctcagccattctatattcctcagttgagaattctttgtttagctctgtgccccattttttaatggggtgatttgattttctgcagtccagcttcttgagttctttgtatatattggatattagacccctatcggatttaggattggtaaaaatcctttcccaatctgttggtggcctttttgtcttattgacagtgtcttttgccttacagaagctttgcagttttatgaggtcccatttgttgattctcgatcttacagcacaagccattggtgttctgttcaggaatttttcccctgtgcccataactttgaggcttttccctactttctcctctataagtttcagtgtctctggttttatgtggagttccttgatccatttagacttgagcttagtacaaggagataagaatggatcaattcgaattcttctacacggtagcagggggtggggggtggggagagagcaagtgtttaatggataaaacctcacacaatagacaggaatgcccgctcctagtggcaaccctagggcctccaaagacaatggagcacagactaatccacctggattatgatcatgataactgctggacaaagagctgccctgtgcctttcctgcctctggagcccaaactgcggacactgttgggttgaatgctctactctacctcatcaaggtgggtcagtttcgccaagtttttccgccacaggaaaatgtctcagaccttctgggtctgacgggtgaagactactgctgtcctgtgcagcagctgaagatagaatgctgtcctatatggcagctggttacaccttacaggttatacttcctgctataatgccttcttctcggatctctgatgctgttggcaactaactgtagctttatcagtttaacatcagctgccccgtcaatgaattttgtataagaaaaccggacctcaatttttctagataggtctcctgctgagggagacaaactcataaaaggaagtttcaatgtaacttttttttttactatccctttattgagaaaaacttgcttcaccatggatgactgttctcaataatcagccacttatgttttatgataaatgattaattatttttaattttttaaattattttatttacatgagtacactgttgctgtcttcagacacactagaagagggcatcggatcccattacagatggttgtgagccaccatgtggttgctgggaattgaagtcaggacctctggaagagcagtcagtgttcttaaccactgagccatctctccagcacacaaaaatgtttcttatcatgctcaaaacatctctgttcaatctatccagccttctggacaaagaaaaaatatattaatttttttaattcaaaatcatttttgggtccctaagcttttactgtgactcaaaggccttagtctactccagaagtttactcatctcttctataacttaaaaagttcacatgagcttcaggtcctttatgatccttaaccttaacttctgtgccactctctgtcttggcagatttcctctcagctgacagacaccatccagaaattgacggcagactacaaactactccaaagttgacctacacacaccagctctgagtggtcctaaaaaccagaaaactctgaacttcatgaaagctgatgtgaaccagtctagctgatgtgattgctccctgtctctccagctgggtcagccaaccagatgtttctgatgcatgctgcagtgcctgagtctgaccccagcctttgactagcattccagcctcctgacacctgactgtgacattctaatttcagttgagaagcagttacagaagacactatgccaccccttatcctcaacaagaaactggaatgttagatctgaaggaagctccctggcaaagaggacaaaatgagtatctatagtgcctatgggcacactaggacttctgcagccctccagagacctcattatcaaaaatgtacctgctaaaaccaaatagatcaaggcctatcaacaggtagattcattagctgaagtaggtctaccatatgatagggcgctggacctgcatgaggaggatattgtgcagctttaaaagaaaattgttttcttgtgagatggttcagtgaataagagcaccgactgcttttccaaaggtcctgagttcaaatcccagcaaccacatggtggctcacaaccatccgtaatgagatctgacgccctcttgtctgtctgaagacagctacagtgtacttattatataataaaataaacaaatatttacaaaataattcttaaaaaaacaaaacaacaacaaaaaaggggtacaaatggttcttgaggtattatgacacctgtggttgtatttgacctccatatacatgaacacacaaacacacacatatagtcacacacatatatatacatagacagacatagacacacattcacacttacacacagaaacacacacatacacacacacacacacaaaagaaaattgttgtttctatgcaaatcacttggaaatcattagagataatttggctgtacttcagaaaatataaaagtctcagaagagaaaagacccaa

SEQ ID NO: 420 - DNA, 1374 bp, Mus musculus
cggcgacctccggggatccgagtttgcagacttcttgtgcgcagctagccgcctcaggtgtttgaaccatgaatcttttactccttttggctgtcctctgcttgggaacagccttagctactccaaaatttgatcaaacctttagtgcagagtggcaccagtggaagtccacgcacagaagactgtatggcacgaatgaggaagagtggaggagagcgatatgggagaagaacatgagaatgatccagctacacaacggggaatacagcaacgggcagcacggcttttccatggagatgaacgcctttggtgacatgaccaatgaggaattcaggcaggtggtgaatggctatcgccaccagaagcacaagaaggggaggctttttcaggaaccgctgatgcttaagatccccaagtctgtggactggagagaaaagggttgtgtgactcctgtgaagaaccagggccagtgcgggtcttgttgggcgtttagcgcatcgggttgcctagaaggacagatgttccttaagaccggcaaactgatctcactgagtgaacagaaccttgtggactgttctcacgctcaaggcaatcagggctgtaacggaggcctgatggattttgctttccagtacattaaggaaaatggaggtctggactcggaggagtcttacccctatgaagcaaaggacggatcttgtaaatacagagccgagttcgctgtggctaatgacacagggttcgtggatatccctcagcaagagaaagccctcatgaaggctgtggcgactgtggggcctatttctgttgctatggacgcaagccatccgtctctccagttctatagttcaggcatctactatgaacccaactgtagcagcaagaacctcgaccatggggttctgttggtgggctatggctatgaaggaacagattcaaataagaataaatattggcttgtcaagaacagctggggaagtgaatggggtatggaaggctacatcaaaatagccaaagaccgggacaaccactgtggacttgccaccgcggccagctatcctgtcgtgaattgatgggtagcggtaatgaggacttatggacactatgtccaaaggaattcagcttaaaactgaccaaacccttattgagtcaaaccatggtacttgaatcattgaggatccaagtcatgatttgaattctgttgccatttttacatgggttaaatgttaccactacttaaaactcctgttataaacagctttataatattgaaaacttagtgcttaattctgagtctggaatatttgttttatataaaggttgtataaaactttctttacctcttaaaaataaattttagctcagtgtgtgtgt

SEQ ID NO: 421 - protein, 331 aa, Mus musculus
TMNLLLLLAVLCLGTATPKFDQTFSAEWHQWKSTRLYGTNEEEWRRAIWEKNMRMIQLHNGEYSNGQHGFSMEMNAFGDMTNEEFRQVVNGYRHQKHKKGRLFQEPLMLKIPKSVDWREKGCVTPVKNQGQCGSCWAFSASGCLEGQMFLKTGKLISLSEQNLVDCSHAQGNQGCNGGLMDFAFQYIKENGGLDSEESYPYEAKDGSCKYRAEFAVANDTGFVDIPQQEKALMKAVATVGPISVAMDASHPSLQFYSSGIYYEPNCSSKNLDHGVLLVGYGYEGTDSNKNKYWLVKNSWGSEWGMEGYIKIAKDRDNHCGLATAASYPVVN

SEQ ID NO: 422 - DNA, 25667 bp, Homo sapiens
cagcaaggaagggcggggcacggtggctcacgcctgtaatcccattactttgggaggtcgaggcgggtagatcacttgaggccaggagttcaagaccagcctggccaacatggcgaaaccttgtctctactaaaaatacaaatattagccaggcatggtggcacgctcctgtaatcccagctaccggggaggctgaggcacgagaatcacttgaacccgggaggcagaggctggagtgagccgagattgtgccactgcactccagcctgggcaacagagcaagacagagcaaaaaaaaaaaaaaaaaaaaaaaaaaaaagcagcaaggaaggcaaggaaggaaggaaacaaaagagagagagaaagtgggaaggttacagtcctagaataattaacattcctttcaatggaataacttaatcttaggggaaaaaaattacccagtgctcttcatttttctccatttccctggaattgtgaaaagttcaccatgggcaacatgactctaaaggtttattgctgtgttttgtttgctcaggagcctttgctctttgctatgcatagaagttcaggaaaagccctcaggccccgtctcatgacatatttcatgacaatgtttattccatcccctgaacactgaaacttacccaaggtccctgcgggagggccacactttaggaagcacagtatttctggttgctcttaacataggggcataggatccaacagtcaggaggaaatgggatgtctcgaagttcagccagagcatcacccgccatgaaatatgagggtcagtcggtctccgctcaaatggtcccagagatggaggattggaaaagcagattttaattcctacgtgagctgacacttaccacctgtatttctcatcccttgttctgtcttccaggctataaagacgccttgaatcctcctccacgatacccgccccactatttgttggcacagctatgatgctgcttatggattgttttcactcctaaagacagtggcgcaaggcaaggtgacctggagcgaggccatcctgagtgcccacccagcttcccaggagcctgttggaatttggaaggacatttgcctctgtttataaagactggctttttgctgaaagccagggtctcaaaaattttgttttattaatagaagctaaaccccaaacatttggctctttttcattccatttcccctttcacaatcttaactattcccaagacaatggatacctctgcctgtatcaagggcagattgtcaataagaaagtcaacaggaaataaacattattatttcaaaaatactatccttatccattttaaattaaggggctaggagaaaaggatatgaggatttactgttgaatgggttaggagtttcagtttgggatgaagagaaagttctggagatggatggcggtgatggtggcacaacaatgcgatgaacttcatgccgctctcaaaaatagtgaaaatggtcaagtttatgttacgtctattttactataataaaaaaaaaattttggttttcagtgggcaggtgaataaggagaccctcttgccacctcttggcaagagcaagaaaggagattggaatatcagcagtgtgagctcttccaagggcagtggtgacagcctgggagactggtcagcgtagcaagggcaggtgcaggtccctggtcctagaatgtgagtgtggcaagccagccttaacttctgcctgcctaggaggcatcctaggaggtgagccttagtgagcaggggtgagctctgtttgtcctgtatgcagcagcagattatctgtctgctcatgcagactatgtagattgctcagagttgctagagggagggcctgtggggcctgaacttcagcctgcactcagctcatcaagccatgggctctctcagggccatgtctgtccaacccttgcaaagcctctggatgggtgatcctgggcactaaaccttgaccattctaaaatactatttggcacagcctggatgaggtctgtacatagagtgtgtagatccctcaagttccctgaacactccgccatgcaagtgatgcagagaagtcagctaggaggaagacaaggtgtggggaagaacagcaccagccaggaagcatcatcccaaatctgagttcatgaggctgatgaagagaatgtccacaccattaaagagattctagcattccttttctatgtttgtcaacctttgtccttgttagtgcctgaataaaactgaacatgagaatgtggccatgggaattatagtataggcctaaggagaggttgtaaacttcaggcttcatcaacacttgaccatttcctcccattttctgggaactaattagcccctttctgtttcacccatgcagtaccccggctattgggcttcattactccagtatgctttccagaactatcatattcctttaatcttcttgaaataaatttggcttggatcgcactcccctaaatctagtctctttcattgtccagggagccacccctcctcccatggttgtgcaagtgtctcggggtcttctgagcagtctgcgtttgctgcctttggtcatcccaacctgtctgacctgccttctcaccctccatgcaagcctgagtgtgggaatattccagagcccacatgctctaagctcagccatcccaggtatgagtgcaaggaggctacagccctcagcctcttgcagaaaacccctgttgctccccaagtttgggaggtgactcttctctcctctttctccaactccaccaagctatggacaattaattccttgatgacactgacctctaggttcataagagaggttttcagactggctccaggaattgagaaaatcttttcctctctcttcagccttggcttttggatcattgtgaactcagaaatctatcgggaaagtctaattctgaacactgattcttttttctctttacattcctattgttaaaattctgattatctgtgagaaaacaatatccctgtctgtataggggtgatgtccttgaaaagggaacacaaaaaaggaaaaaaaatcatatttgcacaataaagtatcaccccccttgtgttatatacaccacaggtctgcaggcatgagactgaggtcagactgtgagtattctcccctccatcccaccctccacctgctctgtgacctgcgtcagaaccccagggacaagataagatttctccaaaactcaatggagagtcacagaaaacaggaagtgcttttgaggaagttttgaatggaagcaggaggtgagagttgggaactgtatgctgggaaatgacctctcggctgggactcttgggagggtgtgatgtcttggttgctgctcctgtgaactgtggagaaggtcaggtttagcgtaaactgtcccctgtggtcctcctgcaattctcctaatgactgtcagccctcagtaccagggtcccatacacccctgcagcactgcatccccatttgttggagttccacctcctgagaccaaatcctggcttcctcactgactagccctgtgcccttgggcaagctccgtaacctctctaacctcactgtactcatctgtaaaatggggatgagggttattctgataatcaaatgccataatacacaacaaggcgaatgtggtgcttggcacgtaagtcagcagtgtgttcccagttgaccactggtttcaggaggccaacaaggacagtgggattttaggtgagtctttgggtattttccccccatttgtcttgcttatctgtattatctatgtttttcataatgatcacttgttttatttgtttttcacctaaaaaattattgaaaaataacagatgaaactgctggaaggataaaaggctaaggtcctctgagaatccttgaaaacggccaccagcaagttattcattagaaatttcaaagggaaatttccaaaccaagccacctcaatgacaggcttagtgctctaggaacaaggtggaggggatgtgggccattattgtttataagccagagagatggtgggttacttgctctatctggtaattaaacattcacatattctacattttttaaataaatcaatgcctttttcatcaaattacgaacaggccaggacactgaagtttgaaggcaaatgttcattcctgtctgctccacatctggctttccaggacaacacaatggtcagtccactaaaagtcaaggaagtcctgatttttctggctagaaatcaagaaaagtcattttttgatgtgcttattatgtttctgagaatatgcaagagaagaaggagaaaaacacaagccttccagatgggccactgccggttaagcttgcattttagggagaggtgatgcccacctttaacctctttcgaggcatcacacacttttgggctcaacaaccaaaaaacaacaggggagaaagcaatgatgatgggagctgttttggctgagaaactccaagggcccaggagctccttcaccctacatcaaaccatggaaaagagctcaccagagatagtgggttggcatagctccaggtcatgcttatggccctatatccctaatccatctctctctgctctgtcctaagacttcagttgactggccttccccaggtctcaagggcttgtcacattcttcattacttttctgtgtttttcgacaattctatctaacatcttcagtaatatgtgttaaggtatggctctcataagagtgtttcaatgattcaggggcactctaaccttccaaaacatttgtaagaagaatagtagctgtgtgcttggaactgccttctaagcactacctaacctatctgcttcaatcttctcaatacccacatttttaattcccctttacaagtgaggaagtgcaggctctatacatttaagtgtctcacccaaagtgacatggttgtcaaaaactgaactatgacttgaactccaaattatttaattccaaaataagcggacttaattactctttacttgtgtacttgattattgcctgtgtctgcctgtcagccatcatgctcaccactcaccagacaagtggtacatcctaaataagtattttcagaatgaacgaatactatcttccctcgaggcccagagattggaggcatcatggtggaacagcagcgggtcagtgctttgtttcacagttcactgaaacatcacggccagtggccttgtggcccctaaggagtccagacaactatggagtccttggtacaaaagcaggaattccttgtttacttgcagaaacacttcatgttgagacttttgtagtcttcttccttccttctttccttttttttcttttactgtttctttccttccttccttccttcttttccctcctttcttccttccttcctgcctgcctgcctgcctgcaaagctagatcaaccagcttaagttgttacaaaactagaaaatctgaattaagtagaaatcatgaattgaacatgtttcagagggaaggaactaaatctagcctcaaatgagaagcttatttcccaaaatatgaaagcctttaaaaattatggctagcattgtttttgtttttctatcaggacaccaaaatcaagtctacgggtgtctgattttcagacttcaaagactttggggcatgcctcagcacccagcctcatccctcctcttctcctcttggattcagtcccttctcctgagttgggaggttgtctggacagtgtctttgctatctgcgttgctcctctccccaccacccatgtgcatttgcccctctgtccctcagtgcatttcccccaggatgctctggccaaactgaccaggtgtctccatctctgccccttttctttcccctgaatgctgtccagtgttttctggaacctgtgaacttcccgtgaatgataaataccaagagcttctcaaaatgagaccccatgttctaaacagaacctgcagtcaggattccagggaaggtcagcaggttcccacccccagaagcactttgccgtgtaagacattgtctatggaacatcaatgtcacttagggccttggaaagacattcaggaagggagttactacgcctgaatttctggagatgtgtttagtagggaagaattcactataatccatgaatgattgattgatttctagaaaggctcacgcatgtttctttttgccactcaggactggacctctgaatcagtgcggaatatgaatgagagcggtcaggggagaactggaggatgctggtggaggctggaaggcttgcagtcacctgcctgtgcttatctaagtgatgagaatgtaggagcagcaggacctggcccatcactaccctatgtttgttacaggagagaggaccgtcctcccacaggtcagagctattgttaatcaaggtgacagtgcaagatgcattcccactcctgacttctcgctgtaaataggtttcctgagtggtgttggtttattttcaatttggaagccagttcaatcaaatgtttcactagattcaagtttgatgaaaatactagcaaatcccccaactaacgagtcactataagtaactcaaggcatcagtcctgctccccacataagggagtactggtcctgaggaaatgggaccacatatatagggaacaaaagtgatacaatgggccatgagggtgtgatgagtatcccagtgattgctttgggtaaattttgctggccacatcggtttcagttcctctacatagacaaggaaatgctcctcatgaccgacaacagctcctcctgcaccgaggctgtctagtcattagaatggtctctagaagacaatatcatcagcaatcactgctagcaaggagctggcttctgtggtactatgttgttgctaatagtttttgttagagcaactgcattgtgggagacctgatccagggaagggagaaaccaaagcctgtgctcccaaggaggttatggaaaatgaagaaaaacaccagcccctctgcaggaggaagctggaaatggttggaaggaccacccatggctagagccccagcacttgggtcatgactcaccctgggtaggtcaagtacaggccccacttcttcaggccttggttgtggatcagaccctggattcttcccctccgggtacagcccagttgccatgatgctccttgagtcaatgagctctttggtctgatcttctgctcaagcaaagaaagggtccggcttcagttctcagaggctgataagtaccaaggtggcagaatatgggagtatcctgcaggtgctcccagcatctgccctggctcaggtgccagaggcttgcgattttctagctcttgacctcacaccctcgattgtttgttttccaattccttcctgaataacggggtgaacatgccacccctcctggtggcgaatggggttcctcagaactgggaggccacagtccagattctgaggctcttcactaagcaagtgctggagagcaaagccactcactcacaactctctctctttctctttcaaatttggggaaggggaggccatctgagcagtttctctcacactccccagtaaggaactcatgaaggaccaagtgagctctaagcccccggtagaaacattcagctgttccaatgaacttcttgtgatcctgaaatctgcaaagttagaaccaaggcagacgtaggtactccagttacctaacaccacagaaatattgtttttatttcataaaataataaatttaaatactgctatggtttccttgtttgccccctccaaaactcttgttggaacttatctccaatgtggcagcattaaaatgtggggcctttaagaggtgattaggacatatgagctcttccctaatgaatacattaatctattcatggaataatgggttcatagaccaacaggttatcttgggaatgggactgatggctttttttttttttttttttttttttgagatggagtctcgctctgtcacccaggttggagtgcagtggcgtgatctcggctcggctcattgcaacctccacctcccaggttcaagtgattctcccgcctcagcctcccaagtacctgggattacaggtgtgcaccaccacgcctggctaatttttgtattttagtagagacaggatttcaccctgttggccaagctggtctcaaactcctgacctcaagtgatctgactgcctcggcctcccaaagtgctgggattacaggtgtgggccactgcgcccaggcaggactgatggctttaaaagaagaggaagagacctgagctaggacactcagccctctcgccctgtgatgccctacaccaccttgggcctctgcaaagaatccccacaagcaagaaggccctcacaagatacacttcctggacctcagacttcccagcctcgaaaactgtaagaaataaatgttgttctcataaattacacagttccaggtattctgttattagcaacagaaaagagactaggacagatatcacagttagattgtattctacacattgtgactggttctccagagaagcaatgcataaaaagaggaataatcggccgggcacggtggctcacacctgtaattccagcactctgggaggccaaggcaggcgaatcacgaggtcaggagttcaagaccagtctggtcaatatggtgaaaccccatctctactaaaaatacaaaaattagccaggcgtggtggtgcgcgcctgtagtcccagctcctctggaggctgaggcagaggaatcacttgaacccaggaggcagacattgcagtgagctgcgattgcgccactgcactccagcctgaacaacagagccagactccgtctcaaaaaaaaaaaaagaggaataatctccaaaatagtaaacaaattcctgcagacaggaaatataatggtagatacctgagctaggagagggggaatggggaactattattcaatggatacagtttcagtttaggaagataaacaagctctgggaataaacagtagtaatggttacacaatgtgaaggtacttaatgctactgaactcaaagttggttaaaatggtacttgctatgtgaggtatattttaccacttaaaaaactataggtgattgtgcttctaaaagagttatcagtttaatcttcaatagaaatcaatggactttgttcatttttaacaaagtcaaaatatgcatacgaaaaggttatggggtaaaggcagaggtaattatttttttccccgaaaggtattttctacaatgaatgtttttatgtaataaaaaatgaaatgacaaaagtttagaatgtttgtgggttttgttccttaaatccttaattacataaattaatatctacattatacagattaagatacatatttttcctctatctacaacatttctccattctctgtatcttaaatcctgacattaaatgtcattaaatttcttaaatctcaagagaacgacttggttaccaaggaagatataatccatagcctagagagtgggcgaataaaagcagcttctaatgttctcaactgcttttctcctgtcaaccaaatgtttctgtaaataactcatttctgttggttttgggtaagacgtgggagaaggaagaatccctgaatggaggagtctggaaaggatgcttgacaaaacgcccgcgctctctggagacgcagccagtctcctccctcctagggtctggtcttgacgatagcatctcgtgttttggggatgcctttccttaccagattcttctaaagcccagctgcacccacccttaagtgggagataaggcttctgcccgcgggctctgcgttcgtccacccggccccacgtttgctgtggactaaacaggagccactggactagagtacacttgactctcggctctgcggaccaaaaattccaggactaaggaatagcaaggttaggctgaaacagtccacacagggcttgcggtaaacgtcttttcaggagccactcgcccagtgcagtaagtcgtgtacttagttgactcgagcgctccagggagacgcccgaccctactctgcgccgccccggggcaccagctctgcttcctccaggtccactgaggcaggcacgcccagctctgggacagtcagtaaacaagccacgaaccgcgccagggatcagagcacccagagtccccgcccagctgccggcacagccaatcgcagcgcagccaggcggcggggcggtgccggccgaacccagacccgaggttttagaagcagagtcaggcgaagctgggccagaaccgcgacctccgcaaccttgagcggcatccgtggagtgcgcctgcgcagctacgaccgcagcaggaaagcgccgccggccaggcccagctgtggccggacagggactggaagagaggacgcggtcgagtaggtgtgcaccagccctggcaacgagagcgtctaccccgaactctgctggccttgaggtggggaagccggggagggcagttgaggaccccgcggaggcgcgtgactggttgagcgggcaggccagcctccgagccgggtggacacaggtaccgcagccaggccgcgccgcgccgactcagggcctggcccggccagacagggaagctcagtccccgcacgccagacagcggtactcctgctggcgtcaccgcaaacatcctctgaccgctacagccagtgtgtggcgcaggcgtcatgtccccggccctgccacgcctggagccctggaagctggctgcagggcgctggcttcccgcgtgcggccatatgaccccgtccctgatttaggggagcagtttggggtgtcggcagcacaggcccaagtgaatgaaggagggagcagtgcgtgctctccttcccagtttttcctgggaaagcatttcagaaaggtttcatttaaggagaggttggggcggcgcggtggctcactcctgtaatcccagcactttgggaggctgaggtgggcggatcacctgaggtcagtagttcgagaccagcctggccaacatggtgaaaccccgtctctactgaaaatacaaaattagacgggcgaggcggcgcacgcctgtagttccagctattcaagaggctgaggaagaatggcttgaacccgggaggcagaggttgctgtgagccgatatcgcgccgttgaactccagcctgggccacagagcaagactccatctcaaaaaataaataaataaataaataaataaataaataaataaataggagagattggaaaacttatctcagcttttggtgtttgttagtcaggaagatgtgtgaaggcctcctaactcttggggatctctttgtccctacttgggaatcccaccttatcattagtgaggttttgcctgggcacgaaacctggattttttgcgattggtacaaaacctggatcaaccgtttcccggtttcctagttgttgccttaagcttctcacacacaaggtagtttcataccgttctcataacctaaattgtcatcgcataaactgtttcagctcctacagctctggacaggctgcttttcattttggtgagtccatccagtacctccacgtgccctgtttttctccaggcacatccttggcctcttccacagtccttgggtaaatgcttgggagaataatttaaatatttttattctaccatggtggccctaatttttcagggggcagtaagatggctttttaggattggtctaatcagatcctcatttttgttcccttcctaggttttaaaacatgaatcctacactcatccttgctgccttttgcctgggaattgcctcagctactctaacatttgatcacagtttagaggcacagtggaccaagtggaaggcgatgcacaacagattatacggcatggttagtgaaacttccccagaaagaatagtcttggctgttgagaagttttagtcagagagtagcttctagaggccagcttttaccaatagcctaatgtaataacctaatggcgtggattatgagcacaatgtggacattcatccttgttgtgtctcagtttggagaacagcatccccagaggtgtcaagccttcccttgccatggtttctcttccatctctgtctgcagattcacttggtgaggatgagttgggttttaggtagaagtaaagagcatcagttacatgtttgcctctagaatgaagaaggatggaggagagcagtgtgggagaagaacatgaagatgattgaactgcacaatcaggaatacagggaagggaaacacagcttcacaatggccatgaacgcctttggagacatggtaagtgtgctgtggactgccgagctctgtgcttcctctcttcggttctttactaaggtaatctcttgcttttcaacattttatttccttttccttgaagaccagtgaagaattcaggcaggtgatgaatggctttcaaaaccgtaagcccaggaaggggaaagtgttccaggaacctctgttttatgaggcccccagatctgtggattggagagagaaaggctacgtgactcctgtgaagaatcaggtgagacagtgtcaggttcagacctcccatcttcccaggaaagccaagaagtgattgacatctttgttttggtagactttaaagtgatgtacagttcactttttaacagtattcagatgtgtgagctgttgtcaaagtcttattattttttttttgtggatgacagctttttttaattcccttttcagggtcagtgtggttcttgttgggcttttagtgctactggtgctcttgaaggacagatgttccggaaaactgggaggcttatctcactgagtgagcagaatctggtagactgctctgggcctcaaggcaatgaaggctgcaatggtggcctaatggattatgctttccagtatgttcaggataatggaggcctggactctgaggaatcctatccatatgaggcaacagtaagtggagctccttgtcatcattccagctcagcttttggaaggtggacactttaagagataacagatacctttttcggaattcatatattagggctgggtggggtggctcacgcctgtaatcccagccctttaggaggctgagccaggcagatggcttaagctcaggagtttgagaccagcctgggcaacaaggtgaaaccttgactctatcaaaaatacaacgaaaattagccggctgtggtggtgtgcgtctgtggtcccagctatgctgaggtagggcgattgcttgagtgtgggaggtggttgtgcaaatgcactctccagtctgagtgacagaatgagaccctgtctccaaaaaaaaaaaaaagttcacatattagatggcagaatatatatctgcaaattgtcagtactgtcattataaattattagcctttgcacaatcctgtgattagatgggtaacatatagctgttcttgcttctatgtaacgtgaagaatatacaagccattctaaatatacacatttctctattgtgaaaaatgtcttatggaagtaaacccagaggtctcattgaagagactggagtcaattttcagtttcagattaactaatagcatttcacttcctgggatgatttataacagtggtgacttggaaatactaagctgcacactgctgagtgttgtggttctaactcatgttctccaggaggaggacagcagtaatcaagtcttttttttccctttacctttgaaaggaagaatcctgtaagtacaatcccaagtattctgttgctaatgacaccggctttgtggacatccctaagcaggagaaggccctgatgaaggcagttgcaactgtggggcccatttctgttgctattgatgcaggtcatgagtccttcctgttctataaagaaggtaagcatatttttctttgtagaaattgatgcagaaaaagagtatcatgacatacgagcatgatagactctggtttgcaagtaaagttcagtgtagatatttaggtgcttagcatcatagttgttcattctgtacatgcaatatttatacctgatgtttccatttgacattatgttgcgtatatctccatgaatataagtacttcataactttttataaatagctatatttactgtgtagtttaatatacttaaaatattctgcaattgttggatttttataatttttccaaagatttttacttctattattaaatccgaaaagagccttttgattcaaggattttagtgttctgtgctatttttttagattgatatcctagagtagaattacaagcttacaaagaggggtctttttttcctctaggaaagcttttttttaatgaaggatttatgctgatttctatttctgctagttgtaaatgagagcttaaatccctggccttcttattgttgttaagtactatctggaatgtgtgtcacttcactgaattcagagatgcctcattccctgtgggtgacaggatgggttactgtcatgtgtcctctggagcttctcaccccagccctcattttaccatcccaggcatttattttgagccagactgtagcagtgaagacatggatcatggtgtgctggtggttggctacggatttgaaagcacagaatcagataacaataaatattggctggtgaagaacaggtataaattgccagaaatacttacatttgaaattcaaaagagaatacttatttgcaaacagtgtttggatacagttccacatgcccttaggcatacttctgaaatccccagaagtctaagttgaacatataatattaatgtttgattataaaagtaagaaactgtcacaaatatcttgggagtatgaatatagtatttgttccattgtataaaggtgtatctaaatctgaacagtttttaaattctgaggcatatctggctgcaaagacatcctattgttttcctgtctctgatctgtagttctgtgaaaggtcacagtttggaggctgggatggaaattatgtccaggttatgtcaagaattttttaaggataaacaggaacattgcctgtcctgattctttctgttaagtctatggcctctggcacagtgtttaagttgggtgttcctgttaataaccctttgggctttattctttctctgaaatggaaaacctgctcttttttcagctggggtgaagaatggggcatgggtggctacgtaaagatggccaaagaccggagaaaccattgtggaattgcctcagcagccagctaccccactgtgtgagctggtggacggtgatgaggaaggacttgactggggatggcgcatgcatgggaggaattcatcttcagtctaccagcccccgctgtgtcggatacacactcgaatcattgaagatccgagtgtgatttgaattctgtgatattttcacactggtaaatgttacctctattttaattactgctataaataggtttatattattgattcacttactgactttgcattttcgtttttaaaaggatgtataaatttttacctgtttaaataaaatttaatttcaaatgtagtggtggggcttctttctatttttgatgcactgaatttttgtgtaataaagaacataattgggctctaagccataactgctgtgccagtggctcactaggaggaagagtgggtggccttctgggtcttctagtcacagatgtacagatctcatgtcagctgcccagtggctatgtcttaaccaatccttgattgcagcaaaatttgaaaatgatctatgaggacaaaggaaaattgtttgaataaagaaaaatattcactttttagaaaagtgaacatacatatatataattttaatactagaaaaggactttagtgatcgtgtttatttcacccaaagtggttgcatctcagtcaagttacagggcaaaggtctcagcctgtttctggagcatcttcgcccactgctggtgaaggccctgtggacactttgcagtcaaggtgggttaagaactagtgcattgccaaggctgtttgtttttgggtcctcaagggatgaggaataaacttcagggtttgaggctggggttcagaagtggtgctctggcctcagaaaataaaagacaagtgagaggctagaaatgacaatctgttgccctatttagagcaagctacctgaaaatacctgatttatttttttttaaatagaaaaacttcccacatcgcactagctaaacagcccatacttccatcacctgtgtgttttcagaagtctcttgttccaactgaaggaaatataaagaacagatgagaatgtccaatgaatagactccatatcacagaggagggtaaccaggtgtacaatggagtctcagcttacaaagcccccgggaggttctgtccaagtccatctcgattggaccacatgccttgctggactctcatgtgcccttcccgagtagttgctaaaatttcaaactttttgacctaaaatggcaaatgtggcatctgtgaaattctttgggtattgtaataaaagtcaccaggggtagcaagatttggggaggttcccaggctaaatccctcgtgcaggttggggcttagatttgataaactggaatttatatacaacacccactacatgctggtcatcaccactgtggaagagacagaccctgacctcaaggagctgaacagttagggagagtgaggttagcagggagggcttccaggaagaagttaaagcagatggctagagcagctagtcaataagggaagatgaagaggtgagcatcttagcagagactagcacatcagcaaccctgagaaaagaccctgtggttacagacccagtaaaagtcactgggtccaggtgttgggagatgaagctggtcaagaggtagattttcaggataaaggagccactgggagtgcagtgaacagactgttttggttctgttactgtaaaacaaaccacccagaaacccaatggctgggaaggaacatctttcacatgattctgcctggacttggctgtgtggttttcacgtggaggtctatatctgtgcttgagacatctgcaggtttgagtgaactggacatctgcaaaggctcactcacatggctggctgcagatgctggtgctggctggacgttcaacttgggctattgaccagagcacctgcccggggcctccccatggcttgggcttcccacagcattgatactgggggaaatacatatatagtgcaattcagtgttttaagtttgccaacttggaaggtgtatatatacagctttaaaccctgaatttcacaaatgttcatgattatctctttgttaataagttaataagaaaaataatttccaggagacttggtctcttttctccagtaatacagcttaaacattccataattcacatgtttaagattgttttatttacactttcaacaagtattcattgggcaccatttatgaggcagtgctgtgctgccaacacaaaagtgaagcaaatactcatgaccccttcctctgtagctcatgttcccattgaaaaatcaaagcctggcacagacccatgggtaagtgcagcactagggaggtctcaaaggagcccagggacagtcagggcacacaccagggacaggccaccctccacggtcagagtaggtataagcaggggccatctgatcccaatttcaagcgttcatagctgtcatatcttggaaaaggcatgagagggcagtttctctttgcgctgtattatttcaatttttaggtaatggaccttcattattttcacaagataacagattccaaaagtatgcagttcaagaaaaaagttaaagaattgacaagaaggaggaggaggaagaggtggagaaacagagggtccttagataacttgatgaaggcgagtctcccatttggggactgatgttcctgagatctgtgcagatgctgctcagagggtccatcacacagcacaggcgtggggaagcagcactgcccagctggactccagggtgctccatgcacctctcagtcacacagaacctctctgaggatggtggctgttggctccaattgaccattccctggcaagagaaacagggaggggggtttgctaagcgcttaaggagggatggacaatgaggggatagaccagggacagtgttctaatgagactgctttagtgaggacgcagagtgactctgctcagaactccagaacacttgctcccttcagctgccccactccccacaaccatgcacactcccctcatcccaacctggggcagcatgttgagcacttaacagaactgccatttctgtggctttttcatccctttccttttcctccatattcaggaagaacaacagattactaatcacccacactcagggaagtccaatataagtaggagcaagagcaaatcccgagctttgggtggttaattcttctgaaaaaccatagcagagacttcctgtttccattacaacgtggaaggagttttgaagttgtaaccatccactcacaagtaaaaagctgaacaaattgaaaaatcaacaactcttcttagaatcatcagacaagtgaagacacacagcaaaccactgccttaataattagagaaatgaatgtcaagaatcacagcttacagaaggagaaatttatgagcagagatttccacaggaacaagtgcttagtaaggaaaaccaagctgtaactgaggaattgccacaggtccatgtggacaagtctgagagttaaaattctaggagttgtgccttagaggggctcctcaagttgtagagctccaatagctctaccaggttctcaaagtagaaatctaagacaaattccctcatgattcaggtatgtgtggtggggcgggagggggcgtcatgatttgaaaatatgccagagcattctgttcttcttaacgaggcctctcctcaagaaaaactttttttttttttttttttttttttttttttttttttttgagacggagtcttgccctgtctcccagtctggagtgcagtggtgcggtctcggctcactgtaacctctgcctaccggtttcaagggattatcatgtctcagcttcctgagtagctaggattagaggcgcgcgccaccacacttagcaaatttttgtatttttagtagagacagagtttgaccgggcttagtagagcttagtttgaccgggctttagtagagacatgttggccgggctggtcttgaagtcctgacctcaagtgattctcccatcctggcttcccaaagtgctgggattacaggcatgagccaccacgcttagccattttttttttttaagtcaaagctgacctattggggtttcatcaaaacctaactgaactgggggatggaaatacccagctgcagcctgcttcagccttccatatggagaagggtaataatcaactccagttcactctagccatcctgtctcacctaaaaatggaaaacccgagaagcacttgtgaattccacagcccagggacatggttaggttgattaaaagactgcgacccactcataggactaaggaatacttctcctccctctacatatttccagcgcattcccaaaggcttatttaccagtgtttcttttacctggtacaccataaccctctttctaaagaatattaaaagctatactaaaaggcaaaagtcacaactagaagaggcaaagcaagcatcagaaccagaatcagatatgtcatgaatgtcagaaacatcagaccaggaatttaaaataactatgactattatgataagggctaatagatcaaatgacaacatgcaacaacagacagagaaggtagagagtaagtggaaaattccaagcatccaaaagtcatgctaattcggccgggcgcgggggctcacgcctgtaatcccagcactttgggaggccgaggtgggtggatcacgaggtcaggagatcgagaccatcctggctaacacggtgaaacccctgtctctactaaaaatacaaaaagttagccaggcgtggtagtgggcccctgtggtcccagctactcgggaggctgaggcaggggaatgaacccaggaggcagagcttgcagtgagccaagatcgcaccactgcactccagcctgggcaacagagcaagactccgtctcaaaaaaaaaaaaaaaaaaagtaatgctaattcttagcaaactagtaatggaggggaacttcctctccttgataaataacatctataacaaacctgtagataacgtgattttgacaaaataaaatctttattactaagatcaggagcaaggcaaaaatgtcccctttcaccactccttttcagcatagtactggaagtcttagataatgcaataaaacatgaaaaataaatatatgtctatagattagcaaggaagaaataaaattgtctttgtttgcagatgacctagagaatccagaagaatcaacaaaaacctgttggaactaataagtggttacagcaaggttctaggatacaagattaatgtccaaaagtcatttcctttcctatatatcggcaatgaacaagtggaatttgaaattaaaacacaataccatttatgcaagcaccacacaaatgaaataattaggtatcaatctaacaacaaatgtataagatttatatgaggaaaatgacaaaaccctaatgaaacaaatcaaagagctaaaaagatatctcatgttaattaataagaagactcaatattagcaggactttattttttttcccatttcatttatagactctgcaatttcaatcaaaattcttgcaattagtttggcaattagttctgctgtttgcagaacaaactgattctaaatttgttatggagaggtaggaatctagaataactaacacaacactgaaggagaacaaattcagaggacatagactgcagggtttccagacttcctataaagctacaataaacaaaaaagaatgattttggagaatgaatagacaaatcatccatgggacaaaagtgagctcagaaacagacccacgtaaatatagtcaactgatcttttactaaggagcaaaggcaatacaatgaagaaaagatagtctttttttttttgctggaacaacttggcatccactttcaaaaacatgaatctagacacagacatttgcatgcttcacaaaattaatatagatcatacatccaaatgtaaaacaccaaactataaaactcttagaggataacataggaggaaatctagattaccttgggtatggcgatggctttttagatataatactaaagtacaatccatgaaataaataattgataagttggactttagtagaattaaaaactactccatgaaagacagtcaagagaataatcagacaaacctctgactgggagaaaatatttgcaaaagaaacatctgggccaggcacagtggctcacgcctgtaatcccaggactttgggaggccaaggcgggtggatcacgaggtcaggatatcgagaccaccctgggtaacatggtgaaaccccgtctctactaaaaatacaaaaaattagccgggcgtggtggcaggtgcctgttgtcccagctactcgggatgctgaggcaggagaatggcgtgaacctgggaggcagagcttgcagtgagccgagatcgtaccactgcactccagcctgggtgacagagcgagattcaatctcaaaaaaaaaataaaataaaataaaaattaaaaaataaagaaacatctgacaataccattcaggacataggcacgggcagagatttcataatgaaaacatcaaaagcaattgcaacaagagcaaaacttgacaaatgggatctaattaaactaaagagcttctgcacagtaaaagaaactatcatcagagtaaacagacaacctacagagtgggagaaaatttttgcaatctatccatatgccaaaggtctaatatccagaatgtttgaagaacttaaacaaatttacaagaaaaaactaacaaccccattaaaaagtgggcaaaggacatgaacagatatttctcaaaagaagacatttatgcagccaacaaacatatgaaaaaaagctcaacatcgctgatcattagagaaatgcaaatcaaaatcacaatgagatatcatctcatgccagttggaatggcgattatcaaaaagtcaagaaacaacagactctggcgaggctgtggagaaataggaacacttttacactgttggttggaatgtaaattagttcaaccattgtggaagacagtgtggcgattcctcaaagatctagaaccagaaataccatttgacccagcaatcccattacctaccgggtatataccccccaaaatataaatcattctattataaagatacatgcatgcatatgttcactgcagcactattcacaacagcaaagacatggaatcaactcaaatgcccaccaatgataggctggattaaaaaaagttgtacatatacatcatggaatactatacagccataaaaaggaatgagatcacatcctttgcagggacatggatgaagctggaagccattatccttagcaaactagcacaagaacagaaaaccaaacactgcatgttctcacttataagtgtgagctgaacaatgagaacacacggtcacagggaggagagcaactcacaacggggcctgtcaggggggtgggaggagggagagcatcagaaagaatagctaacggattctgggtttaatacctaggtgatcagttgataggtgcagcaaaccaccatggtacacatttacctatgtaacaaacctgcacatcctgcacatgaatcccataacttaaaataaaataaaactttttaaaaaaggaaataaatataggctaggcacggtggctcacgcctataatcccagcactttgggaggccaaggcaggtggatcacatgaggtcaggagtttgagaccagcctagccaacatgatgaaaccccatctctactaaaaatacaaaaaattagccaggtgtggttgtgggcacctttaatcccggctactccaggggctgaggcaggagaattgcttgaactaactcaggaggtggaggttgcagtgagccgagacagtgccactgcattccagactgggcagcaagagtgaaactccatctcaaaaaaaaaaaaaaaagaaaagaaaagaaaatataaaaagggctctcgaaattcagccataagaagaacaacccaattacataatggacaattgtcttgaacagacactttaccaaatatatgggtggcaaatgagcatatgaagagatgctccatgtcatatttcatcatggagatgccaatgaaaacaacaatgagataccactacacacataccgtgatggccaaaatccaaaacaccaacaatgccaaatattggtgaggatgtggaggaaagacagtctcatttatcgctgtttggaatgcaaaatggtacaacctttttggaagacagtttggaagttttttaaaaaaataaatcttaacatactcttaccacacaatccagcaatcccactcattagtatttacccaaatgaattgaaaactgtgtccacacaaaaacctgtataatggtgagtggtgactatctgggccatggcacaggtggtaaaagaatttaccaaggcaattgtaggtaaagaaaggcagatttactagagaaagtaggaacacatgttgcaagggtgcaacaggcagggcagcaagagaggagctgactgccaggagacaaaagcttaccacggattttgtggaatggtgtttgtgctgggtgctgaagtgggctttgtgcagtgctgataacgccaaaattgcagtgagctcatttgcatttttctatcagccaagggtctggtgatagctgggtgcaggaagattgtaagttatttgtgcaggaggactgtgcgtcctggaccatgaagaaaaggcaaactcatagcttatctgctttctttttttgctttccctccatcctgccagcctgactaccctttcccaattaggactccacaatctgcacaagagcatttataacagctgtattcataattgcccaaacttggaagtaatcaagaagtccttcagtaagtgaatggataaataaatgtagtaaatccagccaatgaaatattattcagccataaaaagaaatgagttcttaagtcatgaaaagatatgaaggaaacttaaatgtgtattactaatgaaagaatccaggctacatactgtattccaactatatgtctttctggaaaaggcaaaactatggaaacagtgaaatcatcaatcgttgccagagattaggaagtaggaagggctgaatagggagtgcacggaagatttttaggtcagtgaaactattctgtgtgatactataatggtgaatccatgtcctcatacatttgtcaaaacccatcgaatgcacaacaccaagagtgaaccctagtgtttattatgaactttggatgataatggtgagtcactgtaggttcttggactgtaggaaatggactactctggtgcatatgttgatagtggtggaggaggagaggttgtaggggtttggagaagaagggcatggaacttcctgttctttccacccaattttgataggaacaaaacttagctcttaaaaattatgtttattaattttaaaaacaaacaaagaatacctaatttttttacaaattgctctaatttcatagaattgcacattaaaaatatgagatactacacaaaagaaattatagcagtgctttagacaggaaaggggcatgagagaactttctggaataacagtaagttgtatgtcttgatagggacttgggtcgtactgatatatgcaattgtcaaaactcaaagaacatacacctcagatttgtgcatttcaatcaatgtaaattttatggtaaaactaggattttaaaacaagtattaaacccttgttaatgatatgcgcgctaaagtatttaggaggaagcactacctgcaaatttcttgaaaacacgtgaaaaataacatgaactaatggacagatagaggcaaaaatagatctacagatgtgaattaaaacaaagattaaaatgttaatgataaaatcttggaggtagatatatggtattcactgtaaaaattctttcaactttattgtatgtttgaatatttgcataatataatgttaggggaaaattgcagcagagataatattctaaatagctaaaaaaaaatttgactttcagaagaccagactcattgagagcgaaaaaattatttttgttttgttgttcgtttgcttgttttttaattctggcaacggcagaggaactctgactcctggggtgcagaaaaattgtctgtggaagccccgtgaaggaggtgggggaccgctgcaaaagcaaggaagaggacgaggatgaggacgtctgggataactgggatgatggtgatgacaggaaaaagaaaaaagaggaagcagaaataaacattttagaaaagaaaaaactaacagagaagataaaagaaagaacggcaacagaagaaagggcagg

SEQ ID NO: 423 - DNA, 1398 bp, Homo sapiens
gttttagaagcagagtcaggcgaagctgggccagaaccgcgacctccgcaaccttgagcggcatccgtggagtgcgcctgcgcagctacgaccgcagcaggaaagcgccgccggccaggcccagctgtggccggacagggactggaagagaggacgcggtcgagtagaaggatggaggagagcagtgtgggagaagaacatgaagatgattgaactgcacaatcaggaatacagggaagggaaacacagcttcacaatggccatgaacgcctttggagacatgaccagtgaagaattcaggcaggtgatgaatggctttcaaaaccgtaagcccaggaaggggaaagtgttccaggaacctctgttttatgaggcccccagatctgtggattggagagagaaaggctacgtgactcctgtgaagaatcagggtcagtgtggttcttgttgggcttttagtgctactggtgctcttgaaggacagatgttccggaaaactgggaggcttatctcactgagtgagcagaatctggtagactgctctgggcctcaaggcaatgaaggctgcaatggtggcctaatggattatgctttccagtatgttcaggataatggaggcctggactctgaggaatcctatccatatgaggcaacagaagaatcctgtaagtacaatcccaagtattctgttgctaatgacaccggctttgtggacatccctaagcaggagaaggccctgatgaaggcagttgcaactgtggggcccatttctgttgctattgatgcaggtcatgagtccttcctgttctataaagaaggcatttattttgagccagactgtagcagtgaagacatggatcatggtgtgctggtggttggctacggatttgaaagcacagaatcagataacaataaatattggctggtgaagaacagctggggtgaagaatggggcatgggtggctacgtaaagatggccaaagaccggagaaaccattgtggaattgcctcagcagccagctaccccactgtgtgagctggtggacggtgatgaggaaggacttgactggggatggcgcatgcatgggaggaattcatcttcagtctaccagcccccgctgtgtcggatacacactcgaatcattgaagatccgagtgtgatttgaattctgtgatattttcacactggtaaatgttacctctattttaattactgctataaataggtttatattattgattcacttactgactttgcattttcgtttttaaaaggatgtataaatttttacctgtttaaataaaatttaatttcaaatgtagtggtggggcttctttctatttttgatgcactgaatttttgtgtaataaagaacataattgggctctaagccataa

SEQ ID NO: 424 - protein, 278 aa, Homo sapiens
MKMIELHNQEYREGKHSFTMAMNAFGDMTSEEFRQVMNGFQNRKPRKGKVFQEPLFYEAPRSVDWREKGYVTPVKNQGQCGSCWAFSATGALEGQMFRKTGRLISLSEQNLVDCSGPQGNEGCNGGLMDYAFQYVQDNGGLDSEESYPYEATEESCKYNPKYSVANDTGFVDIPKQEKALMKAVATVGPISVAIDAGHESFLFYKEGIYFEPDCSSEDMDHGVLVVGYGFESTESDNNKYWLVKNSWGEEWGMGGYVKMAKDRRNHCGIASAASYPTV

SEQ ID NO: 425 - DNA, 1541 bp, Homo sapiens
gttttagaagcagagtcaggcgaagctgggccagaaccgcgacctccgcaaccttgagcggcatccgtggagtgcgcctgcgcagctacgaccgcagcaggaaagcgccgccggccaggcccagctgtggccggacagggactggaagagaggacgcggtcgagtaggttttaaaacatgaatcctacactcatccttgctgccttttgcctgggaattgcctcagctactctaacatttgatcacagtttagaggcacagtggaccaagtggaaggcgatgcacaacagattatacggcatgaatgaagaaggatggaggagagcagtgtgggagaagaacatgaagatgattgaactgcacaatcaggaatacagggaagggaaacacagcttcacaatggccatgaacgcctttggagacatgaccagtgaagaattcaggcaggtgatgaatggctttcaaaaccgtaagcccaggaaggggaaagtgttccaggaacctctgttttatgaggcccccagatctgtggattggagagagaaaggctacgtgactcctgtgaagaatcagggtcagtgtggttcttgttgggcttttagtgctactggtgctcttgaaggacagatgttccggaaaactgggaggcttatctcactgagtgagcagaatctggtagactgctctgggcctcaaggcaatgaaggctgcaatggtggcctaatggattatgctttccagtatgttcaggataatggaggcctggactctgaggaatcctatccatatgaggcaacagaagaatcctgtaagtacaatcccaagtattctgttgctaatgacaccggctttgtggacatccctaagcaggagaaggccctgatgaaggcagttgcaactgtggggcccatttctgttgctattgatgcaggtcatgagtccttcctgttctataaagaaggcatttattttgagccagactgtagcagtgaagacatggatcatggtgtgctggtggttggctacggatttgaaagcacagaatcagataacaataaatattggctggtgaagaacagctggggtgaagaatggggcatgggtggctacgtaaagatggccaaagaccggagaaaccattgtggaattgcctcagcagccagctaccccactgtgtgagctggtggacggtgatgaggaaggacttgactggggatggcgcatgcatgggaggaattcatcttcagtctaccagcccccgctgtgtcggatacacactcgaatcattgaagatccgagtgtgatttgaattctgtgatattttcacactggtaaatgttacctctattttaattactgctataaataggtttatattattgattcacttactgactttgcattttcgtttttaaaaggatgtataaatttttacctgtttaaataaaatttaatttcaaatgtagtggtggggcttctttctatttttgatgcactgaatttttgtgtaataaagaacataattgggctctaagccataa

SEQ ID NO: 426 - protein, 333 aa, Homo sapiens [sequence omitted]

SEQ ID NO: 427 - DNA, 854 bp, Homo sapiens
tgatatcctagagtagaattacaagcttacaaagaggggtctttttttcctctaggaaagcttttttttaatgaaggatttatgctgatttctatttctgctagttgtaaatgagagcttaaatccctggccttcttattgttgttaagtactatctggaatgtgtgtcacttcactgaattcagagatgcctcattccctgtgggtgacaggatgggttactgtcatgtgtcctctggagcttctcaccccagccctcattttaccatcccaggcatttattttgagccagactgtagcagtgaagacatggatcatggtgtgctggtggttggctacggatttgaaagcacagaatcagataacaataaatattggctggtgaagaacagctggggtgaagaatggggcatgggtggctacgtaaagatggccaaagaccggagaaaccattgtggaattgcctcagcagccagctaccccactgtgtgagctggtggacggtgatgaggaaggacttgactggggatggcgcatgcatgggaggaattcatcttcagtctaccagcccccgctgtgtcggatacacactcgaatcattgaagatccgagtgtgatttgaattctgtgatattttcacactggtaaatgttacctctattttaattactgctataaataggtttatattattgattcacttactgactttgcattttcgtttttaaaaggatgtataaatttttacctgtttaaataaaatttaatttcaaatgtagtggtggggcttctttctatttttgatgcactgaatttttgtgtaataaagaacataattgggctctaagccataa

SEQ ID NO: 428 - protein, 92 aa, Homo sapiens
MGYCHVSSGASHPSPHFTIPGIYFEPDCSSEDMDHGVLVVGYGFESTESDNNKYWLVKNSWGEEWGMGGYVKMAKDRRNHCGIASAASYPTV

SEQ ID NO: 429 - DNA, 1114 bp, Homo sapiens
tatatatctgcaaattgtcagtactgtcattataaattattagcctttgcacaatcctgtgattagatgggtaacatatagctgttcttgcttctatgtaacgtgaagaatatacaagccattctaaatatacacatttctctattgtgaaaaatgtcttatggaagtaaacccagaggtctcattgaagagactggagtcaattttcagtttcagattaactaatagcatttcacttcctgggatgatttataacagtggtgacttggaaatactaagctgcacactgctgagtgttgtggttctaactcatgttctccaggaggaggacagcagtaatcaagtcttttttttccctttacctttgaaaggaagaatcctgtaagtacaatcccaagtattctgttgctaatgacaccggctttgtggacatccctaagcaggagaaggccctgatgaaggcagttgcaactgtggggcccatttctgttgctattgatgcaggtcatgagtccttcctgttctataaagaaggcatttattttgagccagactgtagcagtgaagacatggatcatggtgtgctggtggttggctacggatttgaaagcacagaatcagataacaataaatattggctggtgaagaacagctggggtgaagaatggggcatgggtggctacgtaaagatggccaaagaccggagaaaccattgtggaattgcctcagcagccagctaccccactgtgtgagctggtggacggtgatgaggaaggacttgactggggatggcgcatgcatgggaggaattcatcttcagtctaccagcccccgctgtgtcggatacacactcgaatcattgaagatccgagtgtgatttgaattctgtgatattttcacactggtaaatgttacctctattttaattactgctataaataggtttatattattgattcacttactgactttgcattttcgtttttaaaaggatgtataaatttttacctgtttaaataaaatttaatttcaaatgtagtggtggggcttctttctatttttgatgcactgaatttttgtgtaataaagaacataattgggctctaagccataa

SEQ ID NO: 430 - protein, 98 aa, Homo sapiens [sequence omitted]

SEQ ID NO: 431 - DNA, 1970 bp, Homo sapiens
gtaaacgtcttttcaggagccactcgcccagtgcagtaagtcgtgtacttagttgactcgagcgctccagggagacgcccgaccctactctgcgccgccccggggcaccagctctgcttcctccaggtccactgaggcaggcacgcccagctctgggacagtcagtaaacaagccacgaaccgcgccagggatcagagcacccagagtccccgcccagctgccggcacagccaatcgcagcgcagccaggcggcggggcggtgccggccgaacccagacccgaggttttagaagcagagtcaggcgaagctgggccagaaccgcgacctccgcaaccttgagcggcatccgtggagtgcgcctgcgcagctacgaccgcagcaggaaagcgccgccggccaggcccagctgtggccggacagggactggaagagaggacgcggtcgagtaggtgtgcaccagccctggcaacgagagcgtctaccccgaactctgctggccttgaggtggggaagccggggagggcagttgaggaccccgcggaggcgcgtgactggttgagcgggcaggccagcctccgagccgggtggacacaggttttaaaacatgaatcctacactcatccttgctgccttttgcctgggaattgcctcagctactctaacatttgatcacagtttagaggcacagtggaccaagtggaaggcgatgcacaacagattatacggcatgaatgaagaaggatggaggagagcagtgtgggagaagaacatgaagatgattgaactgcacaatcaggaatacagggaagggaaacacagcttcacaatggccatgaacgcctttggagacatgaccagtgaagaattcaggcaggtgatgaatggctttcaaaaccgtaagcccaggaaggggaaagtgttccaggaacctctgttttatgaggcccccagatctgtggattggagagagaaaggctacgtgactcctgtgaagaatcagggtcagtgtggttcttgttgggcttttagtgctactggtgctcttgaaggacagatgttccggaaaactgggaggcttatctcactgagtgagcagaatctggtagactgctctgggcctcaaggcaatgaaggctgcaatggtggcctaatggattatgctttccagtatgttcaggataatggaggcctggactctgaggaatcctatccatatgaggcaacagaagaatcctgtaagtacaatcccaagtattctgttgctaatgacaccggctttgtggacatccctaagcaggagaaggccctgatgaaggcagttgcaactgtggggcccatttctgttgctattgatgcaggtcatgagtccttcctgttctataaagaaggcatttattttgagccagactgtagcagtgaagacatggatcatggtgtgctggtggttggctacggatttgaaagcacagaatcagataacaataaatattggctggtgaagaacagctggggtgaagaatggggcatgggtggctacgtaaagatggccaaagaccggagaaaccattgtggaattgcctcagcagccagctaccccactgtgtgagctggtggacggtgatgaggaaggacttgactggggatggcgcatgcatgggaggaattcatcttcagtctaccagcccccgctgtgtcggatacacactcgaatcattgaagatccgagtgtgatttgaattctgtgatattttcacactggtaaatgttacctctattttaattactgctataaataggtttatattattgattcacttactgactttgcattttcgtttttaaaaggatgtataaatttttacctgtttaaataaaatttaatttcaaatgtagtggtggggcttctttctatttttgatgcactgaatttttgtgtaataaagaacataattgggctctaagccataa

SEQ ID NO: 432 - protein, 333 aa, Homo sapiens [sequence omitted]

SEQ ID NO: 433 - DNA, 1596 bp, Homo sapiens
gttttagaagcagagtcaggcgaagctgggccagaaccgcgacctccgcaaccttgagcggcatccgtggagtgcgcctgcgcagctacgaccgcagcaggaaagcgccgccggccaggcccagctgtggccggacagggactggaagagaggacgcggtcgagtaggtgtgcaccagccctggcaacgagagcgtctaccccgaactctgctggccttgaggttttaaaacatgaatcctacactcatccttgctgccttttgcctgggaattgcctcagctactctaacatttgatcacagtttagaggcacagtggaccaagtggaaggcgatgcacaacagattatacggcatgaatgaagaaggatggaggagagcagtgtgggagaagaacatgaagatgattgaactgcacaatcaggaatacagggaagggaaacacagcttcacaatggccatgaacgcctttggagacatgaccagtgaagaattcaggcaggtgatgaatggctttcaaaaccgtaagcccaggaaggggaaagtgttccaggaacctctgttttatgaggcccccagatctgtggattggagagagaaaggctacgtgactcctgtgaagaatcagggtcagtgtggttcttgttgggcttttagtgctactggtgctcttgaaggacagatgttccggaaaactgggaggcttatctcactgagtgagcagaatctggtagactgctctgggcctcaaggcaatgaaggctgcaatggtggcctaatggattatgctttccagtatgttcaggataatggaggcctggactctgaggaatcctatccatatgaggcaacagaagaatcctgtaagtacaatcccaagtattctgttgctaatgacaccggctttgtggacatccctaagcaggagaaggccctgatgaaggcagttgcaactgtggggcccatttctgttgctattgatgcaggtcatgagtccttcctgttctataaagaaggcatttattttgagccagactgtagcagtgaagacatggatcatggtgtgctggtggttggctacggatttgaaagcacagaatcagataacaataaatattggctggtgaagaacagctggggtgaagaatggggcatgggtggctacgtaaagatggccaaagaccggagaaaccattgtggaattgcctcagcagccagctaccccactgtgtgagctggtggacggtgatgaggaaggacttgactggggatggcgcatgcatgggaggaattcatcttcagtctaccagcccccgctgtgtcggatacacactcgaatcattgaagatccgagtgtgatttgaattctgtgatattttcacactggtaaatgttacctctattttaattactgctataaataggtttatattattgattcacttactgactttgcattttcgtttttaaaaggatgtataaatttttacctgtttaaataaaatttaatttcaaatgtagtggtggggcttctttctatttttgatgcactgaatttttgtgtaataaagaacataattgggctctaagccataa

SEQ ID NO: 434 - protein, 333 aa, Homo sapiens [sequence omitted]

SEQ ID NO: 435 - DNA, 1704 bp, Homo sapiens
gttttagaagcagagtcaggcgaagctgggccagaaccgcgacctccgcaaccttgagcggcatccgtggagtgcgcctgcgcagctacgaccgcagcaggaaagcgccgccggccaggcccagctgtggccggacagggactggaagagaggacgcggtcgagtaggtgtgcaccagccctggcaacgagagcgtctaccccgaactctgctggccttgagctcctacagctctggacaggctgcttttcattttggtgagtccatccagtacctccacgtgccctgtttttctccaggcacatccttggcctcttccacagtccttgggttttaaaacatgaatcctacactcatccttgctgccttttgcctgggaattgcctcagctactctaacatttgatcacagtttagaggcacagtggaccaagtggaaggcgatgcacaacagattatacggcatgaatgaagaaggatggaggagagcagtgtgggagaagaacatgaagatgattgaactgcacaatcaggaatacagggaagggaaacacagcttcacaatggccatgaacgcctttggagacatgaccagtgaagaattcaggcaggtgatgaatggctttcaaaaccgtaagcccaggaaggggaaagtgttccaggaacctctgttttatgaggcccccagatctgtggattggagagagaaaggctacgtgactcctgtgaagaatcagggtcagtgtggttcttgttgggcttttagtgctactggtgctcttgaaggacagatgttccggaaaactgggaggcttatctcactgagtgagcagaatctggtagactgctctgggcctcaaggcaatgaaggctgcaatggtggcctaatggattatgctttccagtatgttcaggataatggaggcctggactctgaggaatcctatccatatgaggcaacagaagaatcctgtaagtacaatcccaagtattctgttgctaatgacaccggctttgtggacatccctaagcaggagaaggccctgatgaaggcagttgcaactgtggggcccatttctgttgctattgatgcaggtcatgagtccttcctgttctataaagaaggcatttattttgagccagactgtagcagtgaagacatggatcatggtgtgctggtggttggctacggatttgaaagcacagaatcagataacaataaatattggctggtgaagaacagctggggtgaagaatggggcatgggtggctacgtaaagatggccaaagaccggagaaaccattgtggaattgcctcagcagccagctaccccactgtgtgagctggtggacggtgatgaggaaggacttgactggggatggcgcatgcatgggaggaattcatcttcagtctaccagcccccgctgtgtcggatacacactcgaatcattgaagatccgagtgtgatttgaattctgtgatattttcacactggtaaatgttacctctattttaattactgctataaataggtttatattattgattcacttactgactttgcattttcgtttttaaaaggatgtataaatttttacctgtttaaataaaatttaatttcaaatgtagtggtggggcttctttctatttttgatgcactgaatttttgtgtaataaagaacataattgggctctaagccataa

SEQ ID NO: 436 - protein, 333 aa, Homo sapiens [sequence omitted]

SEQ ID NO: 437 - DNA, 986 bp, Homo sapiens
gttttagaagcagagtcaggcgaagctgggccagaaccgcgacctccgcaaccttgagcggcatccgtggagtgcgcctgcgcagctacgaccgcagcaggaaagcgccgccggccaggcccagctgtggccggacagggactggaagagaggacgcggtcgagtaggttttaaaacatgaatcctacactcatccttgctgccttttgcctgggaattgcctcagctactctaacatttgatcacagtttagaggcacagtggaccaagtggaaggcgatgcacaacagattatacggcatgaatgaagaaggatggaggagagcagtgtgggagaagaacatgaagatgattgaactgcacaatcaggaatacagggaagggaaacacagcttcacaatggccatgaacgcctttggagacatgaccagtgaagaattcaggcaggtgatgaatggctttcaaaaccgtaagcccaggaaggggaaagtgttccaggaacctctgttttatgaggcccccagatctgtggattggagagagaaaggctacgtgactcctgtgaagaatcagggtcagtgtggttcttgttgggcttttagtgctactggtgctcttgaaggacagatgttccggaaaactgggaggcttatctcactgagtgagcagaatctggtagactgctctgggcctcaaggcaatgaaggctgcaatggtggcctaatggattatgctttccagtatgttcaggataatggaggcctggactctgaggaatcctatccatatgaggcaacagtaagtggagctccttgtcatcattccagctcagcttttggaaggtggacactttaagagataacagatacctttttcggaattcatatattagggctgggtggggtggctcacgcctgtaatcccagccctttaggaggctgagccaggcagatggcttaagctcaggagtttgagaccagcctggg

SEQ ID NO: 438 - protein, 225 aa, Homo sapiens
MNPTLILAAFCLGIASATLTFDHSLEAQWTKWKAMHNRLYGMNEEGWRRAVWEKNMKMIELHNQEYREGKHSFTMAMNAFGDMTSEEFRQVMNGFQNRKPRKGKVFQEPLFYEAPRSVDWREKGYVTPVKNQGQCGSCWAFSATGALEGQMFRKTGRLISLSEQNLVDCSGPQGNEGCNGGLMDYAFQYVQDNGGLDSEESYPYEATVSGAPCHHSSSAFGRWTL

SEQ ID NO: 439 - DNA, 585 bp, Homo sapiens
gttttagaagcagagtcaggcgaagctgggccagaaccgcgacctccgcaaccttgagcggcatccgtggagtgcgcctgcgcagctacgaccgcagcaggaaagcgccgccggccaggcccagctgtggccggacagggactggaagagaggacgcggtcgagtaggttttaaaacatgaatcctacactcatccttgctgccttttgcctgggaattgcctcagctactctaacatttgatcacagtttagaggcacagtggaccaagtggaaggcgatgcacaacagattatacggcatgaatgaagaaggatggaggagagcagtgtgggagaagaacatgaagatgattgaactgcacaatcaggaatacagggaagggaaacacagcttcacaatggccatgaacgcctttggagacatggtaagtgtgctgtggactgccgagctctgtgcttcctctcttcggttctttactaaggtaatctcttgcttttcaacattttatttccttttccttgaagaccagtgaagaattcaggcaggtgatgaatggctttcaaaaccgtaagcccaggaaggg

SEQ ID NO: 440 - protein, 118 aa, Homo sapiens
MNPTLILAAFCLGIASATLTFDHSLEAQWTKWKAMHNRLYGMNEEGWRRAVWEKNMKMIELHNQEYREGKHSFTMAMNAFGDMVSVLWTAELCASSLRFFTKVISCFSTFYFLFLEDQ

SEQ ID NO: 441 - DNA, 25800 bp, Mus musculus
  misc_feature (1)...(25800): n = A,T,C or G
ctctttaagtgatgtactcataggaagatagacacccaacacagtaacatgggtcgacatacgatagacaaacagatatacaacatgtctgtggtattgtaatgtcaggatgaggaaaggttagggggaaattatctactccttggggcacagtggttcagggagaaaggttgaaaaatactgccctaaggactcaaatgttgggggtagatactccagtgaaaacaaccacttaggcccttagcccctctcctttctcagtctggcccttggtgacaggtatggaccaatgccctttgttaaacaatctaggttgattcagatctagatgagagttggttttcatgcaaaggaggaagactttttaaagtaagacaattgccattgaaatcagaatgctcttattttaatgtctgactatagatagctttcactataaaaaacaaaatcctatcttatcattacatattataggacggatcacaactcttgtagcatggggtaggactcagagagcacaaaggagttctgatgaacaggggagagcaacaaaaccacatgaaccaagaaacttctaattttcctaaagtcaagggaagaggagtctccatgtgaaaaacagacccaacattcacaagctccatgaaagggaaacaagggataacataacctttaggttgattgggtctctaggaagggggcactgcaggtggagggtctacattataatctcatttctttcaagtgccttggcagaccatggcaatctgtagtgtatatgcaaatcaacaactctctcacacctctcttgaatgtatttttccccttaagtactagagtcttaggagcaacttcaaagttcctaagggcataaaagcccaggtcagaaaaaaaataacacttttttccccccaggctaaggaaataaagtccagatgttccttacagatcctccacatctggggaggaagactaagctgttcccacagcactctgtgacctgataggatggcatggagtctaatcatgccaggtgtctaatatatactttttgggagtctcattcaactttgtgttagggaggctggtactgtatcaacttagaagccatctcagattcttctttgataatagaggtataaaacacaacacaaattttgatcctttgaattactatgtggggatcttgcttatggcattccagaatggggcaaccaactataggttgtattaggcaggttcactggatcccctgagagggagacccaaccaatcacctgactttcaaaagccctcactctgggcagaaatggtgacattttggatctgctgggattggggttcattcagagccagcatcactttaaaaaaaaaatctactaatgtctttcatgtaccgcccatccccaatgacctatgggtccttctgagaatcaggttaacagtactattttctggcagtgaaatgaaatcctgtctcaaagagatttggcccatccttcattcacagaggctgtacatttgtcaacaatatgggactttgggagccagaactattttcatgatttaagtttgatttttctcttaaggttttttttcttacatatatttatttatttgtgtgtgtgttcatgcacacacatggagaatggaagacaacttatgggagtgtgctttttaccatgtgggttccaggaatcaaaccaggttatcacacttagcagtcagtaagcacctttacccaccaaaccatttcactggcttactttctttttataggacttagagatcttccatctatacagctcaagagaggatttcatagccaccagtcagcttcaaagataaaagatcatgaacaactaactggccaaatccatcagtctctgattgagactatttcagagtcagctatcaggtgctaccacccccatctgcccttggtgattaagagctgataccagtccctgtgagagtctgaccctgcactttccactgcctgcttcctccccctcacccaccctccactccccgccttctggtctgattctgagaaaaacttctaacaatggaaagcataaaaaattcaaatagacatttattgtgtacaaacagttttctatggataaatgggggtgggtgctaacattcagactaaactccatcccacagttacctagcaacagccaggtaggcctgacctactataaaaggggatgcttgccccctcctctctctcttgatctcttgcttctctcctggtcttgttccccctctcttccattcccttccacctctctccacgtgatcatggtcaagcctctacttctctactctctccctctctctgcctttctctgcctctactactttcttaactcccctccccatgccctgaataaactctattctatactatattgtcatgtggctggtccctcagggggatgggatgtcttggcatgggcccgctgaggcacctcctcttccatacctcaccacatccccatagaacatatcttatatctctttattttttttataaacacatgggggtgggggaaggattcaacttaaacataaaatttcagtctgtaaaacatttttgctgtctagattttttttttttttttggcaacactgtcagatttcgttggcgataacacctggttactgggaacagggcaactagctagtgacatgttggtttagatatgcatctgagactggaaacagaaaagcattcagatttctccagaaattccagtgaatgacttcaggtttgtacccacgtttaaaaaaaaaaaaaagccaggcaggtttgacaagcaaaaggtgagaggtgaggacttacattgctttgctctgttctcatccacattggcctcatcgatggcttgctgtatctcatccagccagagaactttagaaacattcttaggatcctggaacagtggcacagaatcagagaacggtgaatcctgatggaactggattaacactgctcttcaggagtcattttatcatcacctcctacttcttattcagcaagcactaggtagctccaccatgcagcactagctggtagcaggcaggccacagatgctcagccagaccatcccctagctcagtgggtctcaacctgtgggtcatgaccccactggggttgcgtgtgcatagcagatattctgcatggcaggtattcacatgatgattcataacagtagcaaaattacagttataaagtagatacaaaataatgttatggctggtgggggggggggtcaccacaacatgaggaactgtatgaaagcgtcacagtgctaggaaggctgaggaccactgctgttcatggacagctgtgctgctgtcctatgcagactcactgcttccaatttggtctgcatcatagtcgatctctagtttagagaacccctgctcatttaaaaatggacgtctcactacatccctcctctgtttaaccttagaaagaaacacaggctctcttctcaggaccatagatctaggactagtgatgaggaccttacatggctctttagcttctcagtccctgttctaggacctccctcaggccatagctctctgacctagctggctcctgccatatcccataactcaaatgccacctctgttaaaaagccatccatggccatgcagttaagcattccagcaccgtggttggcaaactaagtgccaagctgccccagtgtgtcaggggatgctttaaacttgagggaaacagtgatacccaatgtttgtcagacacccagacaaaacagaaacaaaggtatggtaagtggtctgagggagctaaggatctcttggagaagccagaagcaatcagaacacacagtgctgttcacggtgatattagctctggcacatggttgagaagtaagcaagaagggtatagtggtttgaaaaggtttggccccctgtagactcatgtgtttgaatgcatgaccgacaaggaatggtactattaggaggtatggccttgttggaggaagtgtgtcaccatgggggtgggctttgaggtctcctatactcaagttcagcctaagtgtggaatgagtctcctcttggctgcctttaaatcaagatgtagcactcttggttcctccagaatgctgccatgcttcctgccatgacgataatgagcagaacctctgaacctgtaagccagccccagttaactgttgacctgtatgtataagagttgtcttggtcatgatgtctcttcacagcaatgagaccataactaagggttaatatgcaggataaagaatctaagtagttaacaatggcttaagaaagaggtgatggcagcagtgaaaatgcacagaattcgttttagtgtcatacatttgggcgaattctgaagatcttgctacaagcacagtgctggcagatattaaatgggacttcaagtcaattttatgagcagacattaaatacgttcaggaaagatttagaagcccacattttaaaaggtttaccttattctaattatttgtgcatgtgtctgtttgtgtgtgcacaaggctgcaagtgcccttcaaatccagagagggtgtcttgatcctggagctggttataggcagctgtgagctccctgatgtgaatgctggcaactgaactcaagtcttgggtaagagcagtgtgcactctcagctgctgagccatctctctagcctctggaatgccgttttcaaactgtgagcgctcatttatacggagggataagtgctgggctctatacctggaatcaagacacctaggggaagctgtggagatggctcagctggatgcccaaggactgagtttgaatctgtgaggcccattagaaaaaaaaatagaaaggaaggaaggaaggaagaaagaaagtaagagagagagggagggagggagagagggagggagagagggagggagggaaagagaggagagagagagagagagagggagggagagggatannnnnnnnnnnnnnnnnnnnnnnnnnnnnnnnnnnnnnnnnnnnnnnnnnnnnnnnnnnnnnnnnnnnnnnnnnnnnnnnnnnnnnnnnnnnnnnnnnnnnnnnnnnnnnnnnnnnnnnnnnnnnnnnnnnnnnnnnnnnnnnnnnnnnnnnnnnnnnnnnnnnnnnnnnnnnnnnnnnnnnnnnnnnnnnnnnnnnnnnnnnnnnnnnnnnnnnnnnnnnnnnnnnnnnnnnnnnnnnnnnnnnnnnnnnnnnnnnnnnnnnnnnnnnnnnnnnnnnnnnnnnnnnnnnnnnnnnnnnnnnnnnnnnnnnnnnnnnnnnnnnnnnnnnnnnnnnnnnnnnnnnnnnnnnnnnnnnnnnnnnnnnnnnnnnnnnnnnnnnnnnnnnnnnnnnnnnnnnnnnnnnnnnnnnnnnnnnnnnnnnnnnnnnnnnnnnnnnnnnnnnnnnnnnnnnnnnnnnnnnggcccgtttcctgagtcatcaccagctactgctgtcacatgggaaccataggcaggcagcttggtaattgcttaggaaatgaaatttcagaagagctttaagtaaaaccagggaaagaatatgaggcttgaagaagaggagacagaaaagcaggattaaaaaaaaaagatttaattagtgtgtgtgtgtgtgcgcgcgcgtgtgtgtgtaaatatgtggcacatgtgtagggtcagaggataatgtgtggagtcagttttctccttccaccttgagttttaagggttgaacctgggacagtaggctagagtagcaagcaagtacctttatcctctgtgccctctcactggccctaggaattttttcccatttccaaatccaaagaaatgccacactccccgggaatggttttaaatctatcactgcacaagttccttccatctcagccatcttctgaagaggtggcttccctgcaggggagagactgcacacaatgtcgcctggataagaaaatggtggctgtcccatgctaaagattaaagtattagtctcagaagccaaacgaaagcccagactttgcaaaaccaaacaaattgaagacaacagtttcgagaccttgttgtactaaaagaaagctaaacacaagaccaaaagtgaaaacaaaaaatattccgatgtgagatgaaatcccttttacagtcattcaccagaaaattggggatagcaatgcaagggctgggcctccaccaggctccacagggattcgagggaatgagaaggctaggccttcacccagctgcacagggatgcgatggctggacctcaaccagactccacagggatgcgagggctgggcctccactcagctacacagccacgctgtgcctaagtgaacagggataaaaccagcaaccaggccacatgcaaattacaccacaccttcctgaacttgggtgatgccaagaaataactgccccccctcccctgtaaattttctgggtttcttgtttctatagtattagaacattctaccttagtttatggtaccatagattatgcagttgaagtacttaaatctgacctttggaaattatgcaatttggcgaaatttaatcaagatgagaaaagttaatatagatctctattatttcctagttgccccttcatctcattttaagtctcatgtgaaatttgaattttctgatttctttgctgcattttagaggtggaattgcctgccttggaatttaaaatatatcaaggcaaatgaattataatcaagttttctttttttaaaaaatactttgttaaatgtacttaacactagtgaactgcacattctgaaggctaagatataaatgtgatatatatatatatatatatatatatatatgttataactaaggacctgtacacatcttaggagagtcagatcagtagcttggtttggaatggtcaagttccccaaaagggatctcatttatgccattcctggttttggcaccaaatgaatgaaaaaaagaaaaacaaaagggaaggagacatgactgctcctaggtttattgtagataagggagagcataaccagactcagagctatttgggagaagtcagagtatatatggccatactgagtatatatggccatatgagggagaagccagagtatatacagccatactgagtatatgtggccatatgagggagaagccagagtatatacagccataccgagtatatatggccatatgagggagaagccagagtatatacagccatactgagtatatatggccatatgagggagaggtcagagtatatacagccatactgagtatatatggccatatgagggagaagccagagtatatacagccatactgagtatatgtggccatatgagggagaagccagagtatatacagccatactgagctgtaccatgtagggagagggagaggggtggggaaaggggagagaggggaaccaggtgaagtagccaggaggcctaaggctataaagagagtatgtaaccaaaatagttggattctttaagggatgagctgcccagccccctggactggaaaagtttagggtagaaggcagggtagaaggccagataggagggacctgtaacaggtagggactgagggatgctgggagagcctggtagtcagtgtccactctggtctgttaaataggcacctcagacaactgtctcaggtgtgaaactaacataacactaacgaacggtactttatgatagttaagatatctctatctgcctatctatctacctatctatcatctatctatctatctatctatctatctatctatctatctacctatctatcatctatctatctatctatctatctatctatctatctatctatctatctatctatctatctgcctacctacctatctatctatctatctatctatctatctatctatctatctatctatctatctacctacctatcatcttaaagtacttattatagacctgttcattcatcaagattcatggaataacaggctggctatggtggtgcacacctttaatcctagcactcaggaggcagaggcaggtggatctcagttcaaggccagcctggtctatagatagagttccaagaaatcaggtcacagagaaacctggtctcaaaacaaaacaaaacaaaacaaaaaacaaaagttcatggaataaagcaaggtcttgttcttcggtattttattatgattttaatttagttcagttcaaatatgtttttttggagggggtttgcatctatcctgttatcttatcctatagagttatcataggacacattgatcaatggcaaatgaaccttcttcccagacacaataaaactaagttcctgacaggcactaagggctgtcagggcattggaaggcaggtagagaattgtcttctttctccctctgagacagactttcactgtgttcctgaggctgggctagaactcacaacatggccaaggccggctttcaactcattacagtcctcttgctatggcccgtctgtcaagcgctggggtcataaataagtactatcaccctcaggtgaaatttagaaacaatctaatccctctgatacaatttgaacttcttaaatatttgccaggcctgaggatgtaactctgttggtagagtcctagaagccctgggtttagtctccagctccacagatcccagcagcccagaggcagcaggaggtggcccaggcgctcaactacatcctgagttcaaggcaagccagactatatgaaactctgtctcaaaaaacaaaataacaaaataaaagatggaggagggagggtgtattcgcttctcatgattaattcagtttataactacgtgatcagtttaggaactaaaatttgaaataaagcacaatttcattttgatttttgaaaaagaaatttcatgttatattttgatcgcttttccctctcctcaactttcagatccttcctgcctccctaacgccataccctttctgtctatatttaaacaaataataaaaacaaaaacaagaaatgcatacaccaaagcccacaaaagcataacaaaatggaaacccaaatatacaaacaaaaagaccattaaggcagaaaaaaaagaaaaaacaaacaaacaaacaaacaaacaaagcagtaggagatgaaaagtctgcaaaaatcccactgaattttctttgtgttagccaactactcttgggtgtagggcctaccttgacatgtgcctagggcatccaggagattccattggaggaaaccactctttcctttgccagcgggtatcaactgcagaactttctgggttagtggtgggagccccagtccccttcccctctcagctctgggaccctccttggcttgaacctgtgcaggccttgtgcatgctgccttctctttgagttcatatgtgcaccagtcctgatttatccggaagacactgtttccatggagctatcgatcccttttggctcttaacaatctttttgccttctcttccgcatagatccctgagccttgaggggaggggcttgatgaagacattgcatgtaggactgtgcgctccaaagcctctcacgctctacacaccatggaactctgtgtttgttcccatttacggtaagaagaggccgttctgaccatggcggagtgaatgtctgactgttacacaggagtgtaatgtctgactgttcttgtgttaaatagaaggtgtaactctggagctagggttttggcatagggaaaagaaccggggcagtggaattgattcaaagctaattgcttcccagcacctgttctcagctttgttttgcaagggactctgcagtctctgccattattccaagcccctgggagaactacagcactggctctaaatgaaataatggagggggtgaggaagagataaaagggatatggcaactcctccagagaggctcagcctgagtcatgcacacagacagaaacatcaagtggccacatcctttctctgtagaggcaaggacgagtccctgcccacacagtccaggctggcagagttctcagctttccacttgctgctcatacatggagctgaggggaatctacgctgtgactttgtatacttaacaacatcctgtaaccgggtctcaggacatcaagatgaaaatccttatcttggttgcagctgggctgctgtttctgccagtcactgtttgccaaagtggtaagtccccttcttgtggtctagcatgggggtgagagagtggtgagtggatggtttctgctgtcagagtcaaatgccctaattttcttgttaactcctagaaactgtgaacccaaagacacaatttgatctggttttagcctggggtaatatagcgtggaaatattcaagcttgttcccaagtcaaaccttgtcaaagaccaagcgttcttctctactagtagtgtctctacatttgtgacagagtcaagactttatgattaagtcaaaaaccactttttttttggcgtgagaagtgtttgtatgtgtacgatgttcagatgtagaaaagattgcactttttcaaggcattaaaaaaatcttttcaaatttctaaatattataatttctgttgaggcaccggtgggaaaaaaatactgccaggaaaagtaatttggtttcagcagccagtgacattaatcagggatgtgacgtgtttccaaggtgaaataccgtcttttcttaatgtttcagaaccaaggagttctctctgtccctcacatatatatgtatatatgtctgtgtgtatatatgtctatacggatatgtctgtatacgatatgtttaggcataatttggttatgtataattttagaaataagctttcccaaatataattatttcactttgaacatgtcttctattgtggtagcttatataacttcctcattgttctgaaatgaactactttgagacaggattgtatgcaggactctgtcaggccacagggcaatcaattaggaggaggaactgggaagaaaccaacttaaacaaaaggcagccgtctgcaaaaggaacgatccttaaattgagttccctgcttaaggggacccatggcaggggcggtacaagcacgggttggctaggtttatggtttctctgagaggagaagccacaaagctgagccatggttgcaaggaaatgagttatgagagggagttccttcctgatgctagcctgcttgggagactgagaagtgggacttaaggagaggtgggacagtgggttcgaagtctgccttggagagatgtgaggtggggtgtgtgtggctgagggccattctctttggattagactctctgaagccttctcccaggcggggagcatttcagaaacactgcaccaaatggaaaccaaaaaaaaatcctagtcagttgtgtgtcgttttataaataacattgaacaaggagcacttattctgaaggaaagacagtttctaacgaatagaagatctaggtggtgcccgatctgaaatattcggggagcagtctcctttctctgtgtttgtagacacgtatcttgcccaagcacaggactctcctgaaagctgactaatgcttggtttcatcagctttctcatcagaccttggagggaagaaatttgtatacatggttctgccagcttcctttacaggtgttgttttgagtgatatcagacttggctttacccaaatgtgcacgtgcagaaggatttaagtggctgagctcagacgtaacaggacattccaataatgctcgcatctaaactcaggcacatggaatgctaccttccaaagtagtctttccctggaggacacagcgtcaccttcacttaccagttgttcggacaacaccgattctgcccgctacattgaattcagcctatgcaaactcccaagtctgggagagcaagggccagagataaaaatcagaaagagaacatgggtcagtctactgaacatcaccctggaagagttaaaatgggggatgcaggagttttgtgtccagacctcagtgggagggcactagcttttcgaatgggaatgtaaaaggcttctattggcatttgaagaattgattaacgggaactggctgagctgtgccaagcatctacaacacatagctgatatgtttctttcatttaaaaaattcattttgctgggtggtggtggtggtgcatgccttcaatcctagcactagggaggcagaagcaggcggatctctatgagttcaaggccatcctgttctataggatgagctctagtacagccagggaaattacacagagaaaccctatcttaaaaaaccaacaaaacaaaatcattttaatgcctcaggttatcacagtgagttcatcttttgtttcttttctcgttgtcttaaacctggcatttcccttaagcccatcttgtttggcttcttcccatatttctctatcggccctctctctactccccaagttaaactacagccactgtgaagactaagaaagtcacacttcacaattgctcttggcttttgggaatgccacatccagtcattccattttgaccacatggccaatctaggattctgctcccatctcctgattcctaactaaataacccctttccccatgggataacacatcatgggttctaggagccggcacatggaaccttgggtcgagtgaaatgttattctatctaccctggtagccatccctttgcaaattctgtgcacaagggggagggggcagtgtggctcagtggtaaagcagtttaattaccaacatgtggtggcgaggagacgggtggcgtgtatgtgccagaatgtatgaaaagatggtggcttccgaggacagtttagaggccctttgggagttaattgggtgacctactttctaaaattcatctcttagatataccaaattagcagaagacagtgcatgcccacgcaccttctgccctggtctaagagttactggtagatagcagtggaggttagcacgttcacagcactgccatggaggtatgcaaccaacattttcagaatctactgactggcctttcccatacgtagctgatagacaataaaacattttcctttatgttccagtgtgtggttttgtttcacctagcaaagtggttctcaactttcctgattctgcgaccctttaattcaattcctcatgctgtgatgaccccccccccaaccatagcattactttcgttgctacctaactgtaattttgctactgttatgaatcataatgtaaataattttaagagatagaggcttgccaaagggccactgacctagcactattataaacgcctgacactcagagacctgtcatctagtcgtccccacggagaagcacagtactggagcatatgacacatactatatatacatattacatatacatactatacatacatgcctgtgggttgcatcatctatactgatttttaaaatatgaccccaagttctataactatagaaatcacatagcgtcaaacatttcattttatttttttatccaaaccacaggtgggacttgataacaaaccatatgctaatatttcctttcaattacaggcataaatgtttcagacaactcagcaaagccaaccttaactattaagagttttaatgggggtccccaaaatacctttgaagaattcccactttctgacatagagggctggacaggagccaccacaactataaaagcggagtgtcccgaggacagtatttcaactctccacgtgaataatgctaccataggatacctgagaagttccttaagtacccaagtgatacctgccatctacatcctgctgtttgtggttggtgtaccagccaacatcgtgaccctgtggaaactctccttaaggaccaaatccatcagtctggtcatctttcacaccaacctggccatcgcagatctccttttctgtgtcacactgccatttaagatcgcctaccatctcaatggcaacaactgggtatttggcgaggtcatgtgccggatcaccacggtcgttttctacggcaacatgtactgcgctatcctgatcctcacctgcatgggcatcaaccgctacctggccacggctcaccctttcacataccagaagctgcccaaacgcagcttctccatgctcatgtgtggcatggtgtgggtcatggttttcttatacatgctgccctttgtcatcctgaagcaggagtaccacctcgtccactccgagatcaccacctgccacgatgtcgtcgacgcgtgcgagtccccatcatccttccgattctactacttcgtctccttagcattctttgggttcctcatcccgtttgtgatcatcatcttctgttacacgactctcatccacaaacttaaatcaaaggatcggatatggctgggctacatcaaggccgtcctcctcatccttgtgattttcacaatttgctttgcccccaccaacatcatactcgtaatccaccatgccaactactactaccacaataccgacagcttgtactttatgtatcttattgctctgtgcctggggagcctgaatagctgcctagatccattcctttactttgtcatgtcgaaagttgtagatcagcttaatccttagtcagcaatggcaagaccaccttagagaccaaggagagatatctgggaagacgtacatgcttggctgacttgtgcatggcaccatcagctcaatttttaattttttaattttaatttaatttaattttatgtttttgagacagagcctcactgtgtagtcctggctggcctggctggttctctatttagaccaggttagccttgaactcacagagatctgcctgcttctgcctcccaagtgctgggttcaaccaggtctggcaagcgctccatttttcagctcctctgcaacagtgctttatacttccaatgtgaagtcatgaggattaaaagaatactttgtatttagagagtgtcttaattgtaagcaacattagcagtattccgatggcaatggatgcatttctacttgccttcctgattctccaagctatacatgtccccttccctcctgtgagcggtgtcggcagactgggaggttgtcactacccatggttctccctcctcctcaagcaggtatcctgtctttgttgtgtctctcactggggtcccatgttcatgccacctctgtccaaagatggcagccctcactgccagctgagcctcatttccacagattgggttaaccttccctgaacagctttctgaatacatcatgcaatacttcccttgaccctgcagtgctcctgaaatgacaagcccttgcatggctttcctggtggagctgtgcctgcgattccacacaccttcacaccgactgtcttccctcccatccctgtcgccccactgaaaccccttctagcatctttgctttagcctgtccagcttttcaagtcgttaaaggcccgttcttcccttattctcaaactagaagcatcattttctttatctggatttctaaagcactttcttatctttatggcacgtctagacaaacaagcctgctaagctcatttgcatatagatattacttccataaggaattaagttctctgtgtggtcagctctctgtccctgcaagtttcatacctgcagattcaaccaaccacagacccaaaacacttgaaaaaccttgtatgagctgaaaacgaacagagttcattattcattattcagagtattttcattactccctaaataatactgataataaataataataaacaatactctttgcacagcattcacactgtattaaatatttctaagtcatccagatgtgatgtgaagtatatggaagactgtgcagaggttgcagccactgctacagggatctgggatctgtggaggttagtgtctgcaggggtcctggaagccacctgggagatatgacagacaaggaggcatctgtcctccctcctttgaggttcttgtggtcattcccaggccatgttctgtggggctagctgcactctttgtatagcatgtggctcaatgaaagaatacaatcccaaggcatctaaacaatgtgggggcctggtcagttcttactgacaaggcagcataccctgtatgacataatttatgattgggcttatttaaaaaggagaggtatgagacttaaacagcaatatactcataaggtcatttagcaagtatttctatccctgcttgttttaatgggaagtggtattgtattataagcctccagattattcctgtaggtaaaatgatttcttagctaagggagccaatgggagatgtaatattaagcaaatacagatagggttgagggaacctctgcaaacacagcattactgagacaaaactgtaagtaagcagatacacacatctgacaaaacattatagtcaacaaaacaatacaaacacatgttaagtgacactgttgagtgtgtgtgtgtgcgtgtgtttctggttcattaaacttggacatagaagttgcacacatagttaccagaaggcctccaaatctatacctcacagagacacttgctcagccatgtttcctgcaacaccatgttcactggctaaataaagaacctggcaggatcccaggggcagaggaacaggtacggcaagtgcttttgaaagctttcctttctagcaaggctccttagccttaaaggaggagtcaagccatttgtggggggaaatgagcacatctggagatcatcgtgttaagcaaattaggtcatctcaaaaacatacggtatcttttttcacccttggtggtgctttgattttatacaaagaaacagaatcgtgtacatgtgcattggaatgtctgagcaggacaaaggacaaaggggagtgtcaaaggtagcagctatggggagcaggagtatgcaatggacagtggatacttgtataaaagcattaattaaaaagactttacaaggttccataaaaaggaaaagtcagggttgacaggatagctcagtgggtaacacttgtgaccaagtgtgacaacctgattggtctgtctgtctctccaatccacactgtggaagaagagacgtgacacctgcaaggtccccacctccacaggaaaactcactcactcacactctaataaaatacacaaacaaatggaataaagtaaaagtcagataacccttttagacaagtaattaaaataaatctaaagcaagttttaagattctaaacatttcagtaaaaggaactcattttgaaagctaagtcattaattgtagcagtttgtccatgaaatacagcaatacatacaacttagaagcacacataaatccagtagcatatgactttaatcccagcgtatgagaaacagagacatggaagccagcttggtctatactgtgagttccaggacaaccagagctttagcaagagagagcctgtctcaaaaacacacaaaaccaagaaattcaaaccaaccaaccaaccaaccaaaacaaacaaacacccaaataaaaaacaaacaaacaaaggcacactaaaatttcttggtgtaaccatccaagaacaaacctagattttaatgggatttagttcacatgacaatggaactgtaaattttaaatcagtcttgatttactttctccactgggcacagcagaaagtgtgctctgttcagtgtgtgccaccatgttctttactcagtgttggggcatgctggatatgcagcatccggaaccctcacgagccccgcccccattctcactctgagaaaccttagcgtccatcccaggatgttgtccactataccctttaatggctgtctactttggaacaatctctactcgatactataatgccagcaatatgtttttattcctactatttcccaaggctaggctgtgggaaggcaattatagacatgccaccaagggtgtacactggaatgttctaggaatctagcagagattaggagaaattaaaagcataccacaaggactctggtgaaaaacagaattaggtttccttactttcagttaaaaatatcaggttgagaaaaaaaaatattatatagttacttaatatatactacaattatataatacatattcttatttgacccttattataatactattcaataagtattcttttttaaatttgtacatttatttatttatttatttatttatttatttatttatttatttttatttaaggcctggcctttatatgtagttctggctgtcctggaactcattctatagactagactggcctcgaactcacaaagatccacccacctttgccccgagtgctgagattaaaggcatgagctacaatacctagccacaataggcagacttacaattttacttttcatgggtgaaaataaatgtatagacacatggtagcttcactaaagtctcatagacaggacctgaaccatacctacctacctacctatagcagaagcaagcaacttgcagacccaacacaagctctcagctactgctttagcacggtatctacctgctgccaggctccccaccatgatggtcacggactcgccctctgaaaccatgagtcccaaactaaacattttcttttaagttgccttggtcgtagtgtttcgtcatggtgctagaactgtaagacggcgtctttaccttccctgtattaccctgagccccgacctcattctttcagataaggctgcatccactgtgttggctaaagcttggctgaacaagacctttgtaaagagcagtccctgggaaagcacaggagaaaagcaagccggctgccagtgctgaccgaaagctctgccttgagtcacagatctatggacttccaacgaggccacttcttagtgttacgcaaacacagtttacatttaccaatggaaaccctacattcattctttagaaatcttaaacatctaatcagtggaaaaacaggtttaacaacatctcccatataccacacccttgaagtctgctttctataagtttcttcttctttagaaatatttcacaaacatttaagagcacgtctcaccctcccaaggatgtatatcataatttttatgtatactaaagtatgttatagttgtcttctaggtcttttgtttgtttgtttgttttaaacatttaggtcatttgctggactgggggttttcccagtggttagtatacttgtttgctgcacaatatcttaggtttgatttccaggattcccaaagggaaaataatttattaaggtccttttttctgtcttttctccttgctgtacaggatgtctctctccccttgtcttaacacaccattatgtaagtttctcagccaggtggacacagtcatggtcccagaaccaatcacctttcagaagagggctggggaggcagtctcaggaggcttgagtcatcttagctataattttgctgtccgttttggtgttggtgttcacagtttatgctatagctatacacatatacacaagaatcataagtgctggagagatggctcagcagttagaagtcttgtcttccagagacaagagttgggttcccagcacccaacaccaggcagcacacagctacctgctgctccaggtccagaggatccaacacctctgatctccaagtacacgtgcactcatgtatacatatccacacaattaaaaataaatctcttaaaaacccacacatgcatatacttataatgccagtaagatgttgagatataaaagcacatttatttatatatttcatattctggcttaacggtcattgtaatattacagggcaggtgttattctcattttatgcatgtgaaaataaacatatggagatgtggcagctgaggctacagagatcggaatggtgcctgactgtctcccaagcaagcaacttttcctctcaatgctgttatttcgctgtctgccacagagacagttatttaactcctagatcattatctcagaactcgtgatgatggggaaatgatttcagggctattatgggaattaaatgagagatgcttagctaccgctgccgtgcctgcaaacaggaggtgctcagtccacacctctaacctgtgctgtaaccacagtgcttctcctgctccagaggaggcagagcctgggttctgagggtggtggactcagggagctaccattccttccagctgggtttgtacctgaggatatgggtgacaactatggccactgaagcaggagccatcacttccactcttgagtgctaggtcctacaagccttagcattcaaccccgtatcttactaagaataataagtcttcctgagaccccctcagtataagtccagatgcaaataacatcactgctcttcaagaggactccaggtgagtcccttcccattgcctagaacagagagtactgcctgtactatgctgaccccttcacccacctgctcaaccaccgcttccttctccttcagacatggcttctgttttatctccatggcaacctctcttaagattctggaacacaatatctccacatgtattccctccggctctccctccgctccataagaaatagctgttgcattagtaagttcctgaccatcttgaccataaagacagagaactttcagatagcatcatgtgccctctgcagcccatccccctctgcagcccatcccccctacccacaccagacgctaggcactgcatgggaacagaagatatagacaggaaatgcccaaggaaccattctctggataagaatctgcctaccgttgagttttcaatagaggagaaacagtaatgccctttgggtctggatctttctgtttgataccaggtaagcaaccttgtttcatttccattcactgatatacaaaactcatgaaatttatgaaaaatggatcaagggtcttccctcttccaaagttaactcaagaaatgtcactaaaacctaccccgagtttctgggattttgtatagaacagaacatcctggtagtgttgggcgcagtctgggtccacatctctgatattagcagtgggcagcagcaaggtatctaaagtcttcagagggttccctgcgtcgatggcttcattgatgtacccgagaactaccattcctgcagagagaggagcaagggttctaagtcacggcaccatacccacttctccgtcgtgctacgggctccaaggagctgaagatagatgcggtgctgctggaggtaagaggtgaatgcagagaatcaactgcctttctgtatgtgaatgatgtgcaatagatccccatcacaaatccactccagggggaaagtaatgcacacttaggaataatttaagaagcatgacacctataaaccaagaactaggaaacaactcagtggcaaccaaaacacaggggaaggcatctcgtggttgtagacgtaagacaatgttgtaaaggtagaggtactcctcaaggggggttgaggggaaccgggaggcaaggttgtggtaacaaagaaaaaaagaaatactcctcaaattgacaaattgataaattgacatacagttccggagaaactcctgcaaaacaaaacaaaacaaaaacaaaacaaaacaaaacaaacgctggagccttttcataaagcaaaatgtgataaatgacccccggatgcacagaaaacacagggagctcaaacaaccaatgcaaccctgaaagaaggaaatgccgggggactttccccatttcaaaagtcattacaaagctacagcaacagcgactagttctgcagagtgctggcatgaggaaagccatacagatgagccaaacagaactgggattccagaaattgtcccttttgcttatgctcaactgcttttccctgacaaggttgccaaaacaattcaatgggcagaaatagtctataaagactgttgctatagagcaactggtgctgggtcaaccatatgcccacctgtacgaacacacttggacctatatattaaaccctgcacacaaatgaacttaaaatagaaccaaggcctaaatgcaaagacccaaacgaaaagttagaaaactcttagaagaaaacatagggatattatcttagtgacttcaggctgagtaattagctttttgactatggtatcaaaagaaaaaaaaagaagaaaaaaagaaagaaaaaggaaaaacagtaagtacacaggactttgtcaaaatcagaccttctgtgcttaaaagttcgctatcagagaaaatgaaagggaaatttaaagactaaggcaaacttcagttatttatattcaatgcgactagtatactgtattcataaagagctcctataattcaacaattaaaggacagtgacatcaatttaaaataggtacagcatttaaatacacatttatttaatgatgatacacaaattcagtcagtataggatacacacacacacacacacacacacacacacacacatatatatatatatacacacacaatatattagtaattaggaaaatgcaagccaagccacagtctgatgatgtcattttgtaaccactgggactgctgtaacaaaaaggatcatccgtaataagtgttggtgttactggagagaaaaagaacctgtgtgcattattggtgaagatgggaaatggtgcacacactggagaacaatcccgcaggccctcaaatactaaacataaaacctccatgtgatctagccactctgcctaaaaacacccaactaaaaacccagcttcacatagaaccttgaaggtttgtagcagcataatttataatagctaaaaagcagagataacccaaatatataccaaataatgaatggataaacaaatgtatttttatagactagaaaattttttgacctagaaaggattataaatacatcaatacactatgaatgagtcctgaaaacatactaagctaaaaaaaaaacagacacaagaggccactatgcacttaaaacaaagtatacatatggggtgttttgcctttatttatgcctgtgtaccacatgtgtgcctggtgcctgtggaggctagaagtcaacactggagaatctggaccaagagttaaagagggccatcacctgccttgtgggtgagatactgggaatccaactggggtttatccagaagaggagccagtctactgacatatctctccagcctcacctctaaaaggcaaatattatggctatgtaatttatattttaacaaatgtatatttttagaagaggtatacttttacgtatcaacagcaagaggggagctattttaggctgattctaatttagacaataggtgacaggagcaatggataagacctagataaatttaatgcagatgttcagaaatgaaaatgcaaaaccagagagttttggacatgcgttctagtctttgtatttattttacttctctggctgctaaatggtcttaaaacagacagctcaaaatcaagcccttttctacaatattaagaaaaagtagactggataaccacacaactcggaactgttcggtggaattctgggtagtgatggacatgcttgctttggttttgtgcaatatggcagccattagccacatgtgactatggagcaattagcatgaggctatcacaaatgaagaacaaagtgtaagtgtgcttagctgtaattattgtgaatagtcacatatggttgggagacagacaggctccatagagataaacaagggcaaatttgtaggacagctttaaggcacaaatgcagataatgcatttcttacattgtttacctaagagtagacattattagccttgaaccctgattcaagtatgtaacaaaggggggccaagcagacgttgtttaattggtataatgtctaacatgttgatgggtcatagagcacagatgatataagggcttagaatcaaaagcagagaaatctatgcagcggagtctgaacattttatgtgccttagagaaaaaaaatggatctgtttgaagaaggtcccttcttcaaatattaccatattgtgaaaaaaataaaccagcacccagtaagagatacataacaccgggtagacatacatacatacatatacatacatgcactcatatatgtgcactaacagggcaggggctgactttctcctcctgtgtcagtgaacacatcctgatagagaaactaaacattaaggagcaggaagttagaagacacactgtaaaggccagacgttctcatcatgtgtgttatggttcatgaaaaatgaccacaaggcccttgacaaatacaataagccataaaaaccccgaacacctccaagtttaaaaaaaaatgtacctctattttggcatttaaatgaggctaacatttttctaatagttgactttacactgctctaggaatgaagagacttagccatgagggaaaagagttatcaaaaactcttaagagatcattccaatgggcctctctttccactgatggctgactaggccatcttctgatacatatgaagctagagacacaagctccgggggggtactggttagttcatattgttgttccacctatagggttacagaggctcattggtcgtgcaaactttgtatgcctcagtacaggggaacaccagggccaagaagtgggagtgggtgggtagggaagtggtggggggtagggtatgggggacttttgggatagcactggaaatgtaaatgaagaaaatacctaataaaaaattataggaatgtattgtcctacaccatgaggcccaaggacaaggtgcgagctggtttggtgtctgtaaaggcttagtctctactttcaaggtgactctttccttacctcatttttgtgtgaagaaacacacccattatcctcatattgtagaagagatgaaagagctaagaatcaatattgaggcctttattcccaattagggaggctgagttgttcctaaatgtgtacctttctgaaagtgtatattcaaaagcactatctctaaacaccatgaccttggggttaaagtttcaatacatgaatttttgataggatacaaatgtccaagccctagcaggtaagacataagatgaaagtgaaaaataagtgaaaatgaaagtgaaaacataagtggaagatgaaaaatctaggaggcagaaggcactaatcaacagagctggaccaagaatctgtcttccttcagagaagaggccaagaagtgtgcactactaggaaccaaggccataacctaattccctgccttcagacctatcaagcctccacacctctaggttttgttgaggacaagaaatagcttccccaaaaggctgttgcaattcagaagaggcaatgactacacaagagttctaaaacatctgcccatttgggtgtctacaccactgtcatctttctacaccagatcacatgcttagatgaggatgtcaggtagcttcaattaaaaaaaaaaaaaagagatcattccaggttaccagacttaaatgtgtttgaagtttataaaagcaagtctatttctttaacattcaaattaaatgagtttcaaatatgaagtgagccgtggaagtttgtactatccacaccctctcctacttattaaactggagtgttcgggagatgttagatcattcactagacatccccgtggtcaggttgctctaaataccttcaaacacccccatccaagaatgatcttagcataaccaagtgtgagaaagaagatgtccacatatccctagggctggtcac

SEQ ID NO: 442 - DNA, 2388 bp, Mus musculus
ctgtagaggcaaggacgagtccctgcccacacagtccaggctggcagagttctcagctttccacttgctgctcatacatggagctgaggggaatctacgctgtgactttgtatacttaacaacatcctgtaaccgggtctcaggacatcaagatgaaaatccttatcttggttgcagctgggctgctgtttctgccagtcactgtttgccaaagtggcataaatgtttcagacaactcagcaaagccaaccttaactattaagagttttaatgggggtccccaaaatacctttgaagaattcccactttctgacatagagggctggacaggagccaccacaactataaaagcggagtgtcccgaggacagtatttcaactctccacgtgaataatgctaccataggatacctgagaagttccttaagtacccaagtgatacctgccatctacatcctgctgtttgtggttggtgtaccagccaacatcgtgaccctgtggaaactctccttaaggaccaaatccatcagtctggtcatctttcacaccaacctggccatcgcagatctccttttctgtgtcacactgccatttaagatcgcctaccatctcaatggcaacaactgggtatttggcgaggtcatgtgccggatcaccacggtcgttttctacggcaacatgtactgcgctatcctgatcctcacctgcatgggcatcaaccgctacctggccacggctcaccctttcacataccagaagctgcccaaacgcagcttctccatgctcatgtgtggcatggtgtgggtcatggttttcttatacatgctgccctttgtcatcctgaagcaggagtaccacctcgtccactccgagatcaccacctgccacgatgtcgtcgacgcgtgcgagtccccatcatccttccgattctactacttcgtctccttagcattctttgggttcctcatcccgtttgtgatcatcatcttctgttacacgactctcatccacaaacttaaatcaaaggatcggatatggctgggctacatcaaggccgtcctcctcatccttgtgattttcacaatttgctttgcccccaccaacatcatactcgtaatccaccatgccaactactactaccacaataccgacagcttgtactttatgtatcttattgctctgtgcctggggagcctgaatagctgcctagatccattcctttactttgtcatgtcgaaagttgtagatcagcttaatccttagtcagcaatggcaagaccaccttagagaccaaggagagatatctgggaagacgtacatgcttggctgacttgtgcatggcaccatcagctcaatttttaattttaatttaattttatgtttttgagacagagcctcactgtgtagtcctggctggcctggctggttctctatttagaccaggttagccttgaactcacagagatctgcctgcttctgcctcccaagtgctgggttcaaccaggtctggcaagcgctccatttttcagctcctctgcaacagtgctttatacttccaatgtgaagtcatgaggattaaaagaatactttgtatttagagagtgtcttaattgtaagcaacattagcagtattccgatggcaatggatgcatttctacttgccttcctgattctccaagctatacatgtccccttccctcctgtgagcggtgtcggcagactgggaggttgtcactacccatggttctccctcctcctcaagcaggtatcctgtctttgttgtgtctctcactggggtcccatgttcatgccacctctgtccaaagatggcagccctcactgccagctgagcctcatttccacagattgggttaaccttccctgaacagctttctgaatacatcatgcaatacttcccttgaccctgcagtgctcctgaaatgacaagcccttgcatggctttcctggtggagctgtgcctgcgattccacacaccttcacaccgactgtcttccctcccatccctgtcgccccactgaaaccccttctagcatctttgctttagcctgtccagcttttcaagtcgttaaaggcccgttcttcccttattctcaaactagaagcatcattttctttatctggatttctaaagcactttcttatctttatggcacgtctagacaaacaagcctgctaagctcatttgcatatagatattacttccataaggaattaagttctctgtgtggtcagctctctgtccctgcaagtttcatacctgcagattcaaccaaccacagacccaaaacacttgaaaaaccttgtatgagctgaaaacgaacagagttctattttcattactccctaaataatactgataataaataat

SEQ ID NO: 443 - protein, 380 aa, Mus musculus
QHPVTGSQDIKMKILILVAAGLLFLPVTVCQSGINVSDNSAKPTLTIKSFNGGPQNTFEEFPLSDIEGWTGATTTIKAECPEDSISTLHVNNATIGYLRSSLSTQVIPAIYILLFVVGVPANIVTLWKLSLRTKSISLVIFHTNLAIADLLFCVTLPFKIAYHLNGNNWVFGEVMCRITTVVFYGNMYCAILILTCMGINRYLATAHPFTYQKLPKRSFSMLMCGMVWVMVFLYMLPFVILKQEYHLVHSEITTCHDVVDACESPSSFRFYYFVSLAFFGFLIPFVIIIFCYTTLIHKLKSKDRIWLGYIKAVLLILVIFTICFAPTNIILVIHHANYYYHNTDSLYFMYLIALCLGSLNSCLDPFLYFVMSKVVDQLNP

SEQ ID NO: 444 - DNA, 26354 bp, Homo sapiens
tttaaacttgattaaaaggaaagatacccatgtacatggatcagaatattgttaagatggcaagacttctcaaatttacctacagattcaatatgatctcagctgacaaaagtcttgctgccatttttttcttcccagaagaatgaatctaaagcacttcctaggtttctgaattggatacacagggatttgactatagtcacccaaatatgacatgtgggaaacgacatagcaagtttaggagacagaagatgaactaagttttttccaggatgaatttgaaattaggatagctcatttatacaattatgcaattctttcccaatgaaggatgagacaggggacattacagtaattcttgatgaagagatctgaatggaacagagagggactcaagggtgaccagatgccaagtaagagagtggtcatttcattaacagaaaattaactgaattttaaggtggaatctccaagttggaaatatatgaaacttgaaaacaagtacatagggtactactagacaaacatcaagttggactaaaaaagtttttttttttccttaagctctacttctaaggccacacactgtcacactagtttcttaaagatgaatagtatcctgtagatgacctacaatgtggtacaaataaatactagcctagaagttgacagccaccttgatccttgacactaggaaatagtaggtgcttaataaaaatctactaaaggaattctggaataaaaattaattgtccttgggtctaccattctttccctctgtctgaaatcttaccaatgtgaacttccaaatctgaaaaatgagtatcaaactgtgtagtctcaaagattctttccagagctaacaatgtaggctctgccattggattgagtaggcataactagttgcctagctttgccaactgatcccttgcaggctggctcattgtactttatttcatatattcagaattactctttacccctacttaatactgtgcaatcacaaaggattaggtgagagaaaatattagtgtaaacatctgtttatatcactggtctactcacacgaataaatgaatcaataagcatgacctgtataaggcacagactcctcaaatatgacattttcttaatgccatccatatattgccactgagctcatcatagctttctaaaactaaaaagaaacatctaaaacttttcctaatttccttagccatagatgacaaaaaattacagaaatgttaatttgaaagcaatacttgtcttaaaattaagaaaatataataccacagaaatgatatttaaaatacttagtttgtgctaaagtaacaaaccaacttacctctttcagatttgagctcttttgccttcacaagggcatcatagtatttgtcagcacactccgggattatgtcatttgcattagaagtggaagacttcaatacagacaaaatatcacttgatttttttccttccaaacactgattaacatcaaccaccagagtaacccctgggtaattgaaaaaaaagtttcttgttaatggttatcttccacttacttcaaggcatgcaaatatataattcaacgttttaggaatgcattagtatcaaacatttttaccctttgagaatatttaccacatatgcccaagacaatcacaaattcacagaccagtttagtccataagaagaattagataccatgggagtatggtttattaaaaacaatagtctttcctggttactcatatgtggtatgaaggcactaggttttgcttgctgtagtaatctatgaaatggggtgaatacacacgaacatagatatgtagctgtaacctagggcattagcatgtatttgagaactagttttacaaagacatttgtttactttaggataagcaaaatcctttttaagttacagaaatcctggtattctcttgtatagtgctaatatatttagcaagattgtcaaaaacaacctaaacaagtgttctagaaaggcagagctggtggatatgtgcaacggagtcctaaaacttaattctggaaccattttagacctaacaagcattttatcccattgcaaatttctacccctcctcattaacaaaacacattaaactcttggttgcctaaggaaagttaacttagtgaattatttcccactttaattccaggtaagaatgtccaatcgataggactagagttttcacaaccagtaaatgcactgagttagaaaagtagaaccagaaaaatgaaagaggccaagttaaaatacttcctacatgaaaaacatcttgaggaaaagagaagggagacacggatgctttctctttttttcttacacgtacatcaaactctacaaatattaaattacaattcgttgtcatcaaattatgttcacatgtgcatagcactatgagggttaaaggagaaagaaaaacagagattgactttcaacaacctggagtcaaagtcatgcaaatctggaggggcacatatagatgaagggagaacttctcaggcaaactccagtggttgttgaacaaaaggtatggcagcatgttcttatgctaacagaggttaatagaacatgggtagacatagccctttcctcttctccaggaaagctttgtaggatagagaaaatagagtactggcaattgagaagtttgtggtccaagaaaagtaataggaacaagaaaatgacaaaaattatcacatgaactacatgtgacagtgtcatctaacccaataaaatgcaattttccttaaaagatattacaaaagacacacatttcttggatatatcatcattgagtatcgatgagctggttcacaggtcaatttccagataactgaagctaattcctttatggatcaactctcatcttaatagaaccattttcgatgaaactctaaaacatgccttagagaaaatcctaacaggacagctgctattgctccttattttacccaaagtctatggtataaagtaggtgcttaatgtctgctgagagctgccagaagagtccttgtcattaaaattgtgctgtgctataatccggtgagtgttattttcaaggactgtggaggtgtttgggcttactggctcctgcacgaaatagccttaataactcctatgcttcttagtttttccttcttccttcactgtcagctgtcactttttactgacattggtgtgcctgcctatggcagcttaagcactttactgccttgtgacttgtggcttctgatgtgctctaagtcacaaccaaccaggaaaagaaactaccaagataatagagttttgcctaagaaaagaatcaacaggctcaaagtgtctatctgaggggtgctcagtgaataaagtagattaacttcaatgcgcttgctttgagatatctattttgattgctttttttcttaatctgtgagttgtagctaagttccagatagttgaagatatcagatagatgactttcactccagaaagtcaggtatgtttctgccaaggaacaaattaagaaacctccataaatctcctaagagatccaaaaaatgtttgctttacatcttaagccatataccagcaggctctcttaaggcacacattcacagtggaggtgatagaacccctaacggggcaaaaattagttcctgcagggagggagtgaaaaaaatctctttatgtataaagtacaggtctacatatggcacataaacaggtatacaaaatatctgtggcattaaaatttcatggtaaggagtgattagagaaaaaactgtctaaaaagattccttagggtgccataatgagaaaaaggtagagaaagactgctctaaggaatcaaaagtagaggcaaatctactttaagcaagcaagatactccagtgaatgtgaacactgggccaaaatgaaagggacttgagttactctgccctttcaaattttgctggtggtaacatatttgggccaacacattttcttttatcatattatctgagagtgtgtgtgatgcttatagtgtgtgaccagaatctatttcaagtcttcatgcaaataatgaagaatgtttttaatcaaattcttgttgaaagtcagaaaattctcataggtagcattaactttggaaaatcttttttgctgtttaagatatagtaaaagaaagtatatcagctctttaagggacaggacagagtgaaaagataggattatagatgtgcaatacagagtacaaaattatacatttgagaaatcctcttacttttatagtcaatagaaccatgagtctcaatgtgaaaaacagaatcaacttgacatttgcaggccaaatgtaagaacaatgaatataagaacattttaaaaaccttctaaattggtttgatttctaagagacaaatcataaccatcttaggctatttgaatgtctaaattacaatctactttctcaaaactgtctcttcagaccatggcttccttcagttttatatttaagttgaaatttcttatatacacacctccacttcattatttttttcttaaggcgtgctagaaaggaaagacttcaaagttccttagggaataaaagttcaggttagagaaatacacacatttttctaagctaaggagataaagcccagatgtttctcacagatgcttccgaggttgaaaagcccatctgtggagtaagacaaagtcatcttaagaaccttctctgacctgatacaacagaatagattctaattatgccatcagttggcaggttagtgaaatatatttttaggaatcttaatttatatatggagaatgttagtatagcaatttagaagctatttcagactatcatgtgaattttcatgttattcttccttaaaaacagagggttaaacaattttatcatttgaaccaatgtggggattctgccagttgctgattatgcctattccgattatgcactccagaagtggggaagtaaccacagaaagagtttagggacccactgtgagatggatctgagctaatattctattcatcacctgacctccacaaacccctacattgactggtggaccacagttatgttttgggcctcttggaattagtgtcagttcagagcaagtgtccactaattcccaaaagtctgattatgtactttctcctaagtacagtcaccctggtaaaaggccattggtccctttgggggaggggtggaagaaagactaacagtataaatttttggtagagtagctgagtttttcctcaaggggcctggccttcccttcatttgaggggttctgggtttgtaaactggccccattctgggatttgattgagggtccatgactgtttttatgattcaaggtagacttctgtttgcttgacccaaaactcatccagttgtacagattaagtaagaattgagtagactgccagtctatttcacttctagttgcaccatgatcagctagccaactccataggtctcctattggttctgtttctgcggaaaaccctggtaactataaaggccatggaaaggagaaaaaggcatttattaagtagaaatggtctagttctctaaaaatcaagagaaaaaaagaattttattcaattatacaatttgagagcttaaaaactattttttaccttctggattttgttcagcaacattgttacattttgttggagatagagtcaaatcactgacaatagggcaaccaactaatttcggtataattatgtgtccaagaactaaaacttggtaagaatccaaatctttcagaaattaaaaatcacatgacttcaggcacataaccaaatccaaaaaggcaagtttcaagagcaaaggaggtgagggcttacattgttttgctctgtcctcgtccacgttggcctcatcgacggcttgctgtatctcatccagccaaagcactttggaaacactctcagagtcctggggacaatgtcacagaataaaaagaaagaagagtgaatgatgaggaaacagaattaataactgcttttgaggagccatttaatcataattcccacaaattcttaatcagcaactatccagctctgccatatactgtacacactcctaatgaagcagaccccaaacccgaccacttcctccttcttccccaccactctttagtccagccccccatcatctcccaactggacagctgcatcagccccctagcagcttctgctgcatctaagcttgccctcaccacagtggccctctacagagggcccagaggatcccttcaaaatagatagctcagtgcaccactcctctacttaaagcttccccaaaggcttccccccggcagttagaaggaaacacagggtgccttctcagggatggcggggctccaacggcatggccctgcctactgcctctctggctgcacctcacacccgtttacttcccccttcctgttctagaccttcacacgagtctctttcagaccacaatactctaccctcactgtgtggctgttggctttttctcaccattcaggtctcaactcaaatgctacctactccaaaaagtcttcccgggctaccctagtcaaacactctctccctcaatcaattattgtggttcccaaactaagtgtcaaggtgtcccagggtaccatgggatatttttaatttgagagaaacacagggatcatcgatatttatcagacacagagacaaaaattaaaaacaaacaacaacatggtgattgtcctcaaggacctaacaatgtagtgtaagagacagatgtgtcaagacatatagctgggcatggtggcttacacctgtaatcccagcactttgagaggctgagggtggtggaccacttgaggtcaggagttcgagaccagcctggccaacatggtgaaacctcatctctactaaaaatacaaaaattagccaggagtggtggtgcatgcctgtagtcccagctacttgggaggaaggcgggaggattgcttgaacctggtgggtggaggttgcagtaagccaaggtcaggccactgaactccagccttgggacagagtgagactctgtctcacaaaaaaaaaaaaaaaaaaaaaagaaaagaaaaaaaaaaagaaaaacaattataatacaatgtgatcagggcaatatatactgcagacacatgatccagacataggtgagaaagggttaacctatggtaaaggtgtcaagttgcagggggagcaaagactaagtagttaaagatagctttagaaaggaagcaacagcagcaatgaaaatgtattgcattattcctattataggtaaatattcctatttaactttgggttgattctgatggtcctgctacaaaagcagccctgacagatattaagtggaacttccaggtagcaattgtgttttataaaatcttttctgagatggcaagtaaataattatcagcagagatattttcaggaaacatgtgacatttaacaaatgggaacattttacctatgtgtaggaataagtgtcgtgttctaaatcctaagtcaagactgtgatgaatgaaaggtaatggatctggcaccgactccgtcatttaaaacttaagatggatgggggcaggaaggagaggaaatagtcactggttcctctggcaggcttctaacactattttcctcagaggttaacgtgagataatgcatgtggaaagggctctgaaaatgagataaactatctgttatttcatcgtgcaacatctgggctaaaggagacctctggggaaatgttggtgcctgcttccacaatcacctctagctatgcggcagactacaagggaagcatcagcaagattttccatttctttcaagaatggatgggggaggctcaaacaggaagccgggtggaaaggggaagactagaggaggaaaaaaagagacagggaagcaggagctaatttttctctgtttacaagatctaagagaacccaacactccccagctataacctaaaaactaagctctatgagttcatttatgtgtctcagttcttttgaagggtatttgccttccttcataacttatcactgtagaagatacaccacacagatttctacccagatgagaaggcagtaacaatcttacttcaaagcttaaagtattagtcttataggccaaactgaagagagaaattacaaatcagatgaatttaagtcaacggtttaaattatgaaacattgaactaacgattactagagttaaatgtaaaaccaaaagtaaaagctgaatcttatcaatgtaaagtctgctttttcttatttattttatttttgagatggagtgttgctctgtcacccaggcttgctcactgcaacctccgcctctcagggtcaagctattctcctgcctcagcctcccaagtagctgggataacaggcgcccgccaccacgctcagctaatttttgcatttttagtagagatggggtttcaccatgttggtcaggctggtctcaaactcctgacctcaagtgatccccccacctcagccttacaaagtgctgggattacaggcatgagccactgtgcccagccaagtctgctttttcagttgttcaccagaagactgaaaataatagtatatttatgggacggccacacctccacttcagttaaacagccaggttcaacataagagttacaaatgaattaaatgaccagaaactaggccatgtgcaaatcaagtcataaattcctgaatttagataactcccagaaaagttctaatgaaacaaaaaaaacctttgtcaatattttaggttttatatttctgcaatataataacattctatctcagtttgtataaccatatattatgtagttgaagtattaaacactgacctttgtaaaaatcttggtctaatgtaatttaatcaagatgtgaaaggtttccgcagatcaatttcttcctagcatatccctagcctttaagtctcatgtgaaatttgtattttctgattcttgctgcattttgtaaagagcaggctgtgggatggtcaggcttcaagtttaagttttattaactacagaaaaatgtgttataatgcatttttttactgtatattaagtcatactctacagaatataacaattcataaaagcttatatgttgtacaacaatgtgaatgtatttaacattactgaactgtacacttaatactggttaagatagtaaattttatgttacgtatattttaccactattaaaaatatcttattgtagacttattcaccaacactcatggaataaagggagtcctcattttcatgatgtgctatgattttagtttaactgaacagcgttgtttgggaggttcctccagttatctgaccctaagggttattgaatggctcaaaacacatcaagataaggcaaaaaaaaaaaaaaaaagcctgaacaaacgccatcctcacccggcgaagaaaaaccaccaccactcaaaagccaggttctggccaggcactgacgacaaactgaaatcaatattacactgatagaaaattttcaaagtgattcactgctcaatttgaatttcttaaaagtttgttttccatgattaatttataattatgtaaagtgtttaaggattaagatttgaaatagctgggaagataaaggaaaggataatttattaagtagaaattacactctggaactgcatttttaaaacggataagaaatgaaatgtgggacagattcaaaacttactgctgttcaacatctgtttttggcttagttctgtaaaggcctgtgtaatttctgccattctttaaaagcaaatctactaggggagaattacagcacctattcagaatagattgttgggggtgggtaagagttaaatgcctttctccagggataacgtaacacgttcagaggcttggcctgagtcatgcttactgaagcatcgagtggattacatcctttccctgcggaggaccagggcaagtttcctgcctgcacggcacaggagagcaaacttctacagacagaccaaggcttccatttgctgctgacacatggaactgaggtgaaattgtgctccatgattttacagatttcataacgtttaagagacgggactcaggtcatcaaaatgaaagccctcatctttgcagctgctggcctcctgcttctgttgcccactttttgtcagagtggtaagcaattttctcagggggtaggatggggatgtgggtttctgttacaaattaagagtcaactgaacctaggtttctttgcatctcacacaaactgtaaaccccaaaggcagtttgatctttattattaaaaggtagaatcatggaaatgaacatctatagttcattcactctattcaaacctggtcatagactaagtgttccctcctgatgtttaaaaatgtgtggcatattcaagattttagatgtctacaattaagtcagggagcaattttgaaagtcgtttttgtgtttgtaagaatttctcttctggttaagcaaagatggcactttttctagggattaaaatatatatcctgtgtttaaacctcttggtgagacataaatgggagaaacaagaatactgccagaaagagaaagtcatctgctttcaatagctggcaatgctaataagtcagtatttccgaaatgaatgaccttttttgactttaagtggggagttctccctaccctcatatatgattttttaattttaaaaataaggtctcccaaatactattattcaactttgaatgtactttccactttacccatcacaatgttagcctgaaacctcctgctttttccaaaaataacaaatttgggataggtctgtacctgttactctttgttaggtcacacactccagtcaacattgttaggagtgggagaggcaaagactggacatagcaagggaaacaaaaacagaaatcaatgctttctaaaggaacattgcttaaattcacatttggaatccctgagcggttgcagagagctctaagagaatctgtggtgattagcagtaagcacatgtgggatttatgaatataataagtgcacgctctttctgggagtagatgggccaatatgttgagaagcagaattgcaaaagaagcaaggttttcgggggtggttccttcaagacgctaatagggtttgatggaggtgaaaacgggggcctctgaaggaaacaaagaggcagtgaatttgctttcttccatggggtgggggagaaatgtgaaggaagaatgaagcaagcttgtccaacctgccttatttcgttgtggttttgttttgttttaggcttttagcagcctgaagccatggtttttagtttctgtctctagaggtaaatggaaaagagggatgaggaaggggctttactggctcaactagaaacagaaactatgaatccatgactgtattctctcccttggacacccctgagaggccggagttcattctctttggattagttcttcaaggccttttcccggatagaaaaacatttccgaaatattatgcccaatggaagcctctataaagaattaaaatacaataaaaaaatttaacaatgagtacaattcataaggaaaaccaggctctgaggaataaaagccttatttaagtggacccagatctggcattctcacggaaaatggaatcaaatcaacttttccacaaaacacaggcactgtttggcatgtctggaggcatgatgtcttgctaaatcccagaaactttctgaaaacggacaaacacttggttttaacagctttttaaaatcaggctaataacttgtacggcatgctcttcaggcaccattctctaactttgtgcctatctttaaaggcacttctctttgggtgaagtcagatgcaagaacttttccaaaatgcaaaagtgagcagaagggtttgtgtgtcacacaacacagcttctaagatcacctctaaatacaggcatagaagaatgctgcctcccaaatttttctttccttttctttaatctaccttttcttaaatgatacctgatcacctccatacccctcagttactaggacacacctcctctattttacaccgtgaattcagcttgtgcaatctcaggtttacgtggagggtttccatttcacccgggagctaactgctagagattaaagcaggaagagaaactggctctgaatgaaacataggttactaaacactaacttcaagtattcaatatggaggaattttgaggccatgggacaagacataatggcgcagtactggcattttaaatcgataagaatgaggtttatatttggcatagaagtctatcttaaaggtaacattagaaatctgggagaatctattttctatacatgtgaaagggttacaaaaagttatataataataaatgttcaggtttgagctttaagattttgtttttgaaattgcaggaattaggattattaacatcaacatgccaagtaacaccaaatattgatagcatatagttgatgtgtttctatcttttaaagaattcatttccaacttcttaggtcctcataccgatttcatcttccgatttttcctcctttgtttcctcttcccttaaaatctgtcattacccctaaagtccacctttggattctttcttctcataactccccctaggccatctcaaccactcccattaaattaaacgagagcctccatgcagactacaataaatcatgcctctaatttgggctcctggaattttggacccacatccagtcttctaaccagttgctggacattttacacactaatattccaccagcaactcatcctcagtcagactaaaaacagattgtagcttctccccgatcctgtctccttgtctccctccaactcagttaatggcatcctctccctccaagtcatctagagtagaaacctgagtcattattgcttcctgcctctccctcactgcaccccaaagccaatcagaaccaagtccctttaagccgccatcagagtctcacgtgttcgcctctgcctttccataaccactgttctagctcagtaactcactgagctatgaatgatgacagtagcctccaaatcaggtccccttgcctgtaatttcttacctttccaatctgttctctacactattacctaagtcatcttaaaaacaagtcaaaataacggctatattcgtttcctactgctgctatatcaaatcattacaaactgagtggcttaaaataacagattatatttctggagatcagacgtcttaaaatcaaggctgttggtggggttgtgttcattctggaggctctaggagagaatcggctatcttgcttttttcagcttctagaatctgcctgcattccttgggttatgaccctttcttccatcttcaaagccagcagcatagcatcttcaaatctctgactttgacaaccctcttaccttccccttatatggactgttatgattatatttgacccacccaggcaatccaggaaaatctcattttaagatccttaactggccgggcgcggtggctcacgcctgtaatcccagcactttgggtggccgaggcgggcagatcacgaggtcaggagatcgagaccatcctggctaacatggcgaaaccctgtctctactaaaaaaatacaaaaaattagccaggcctggtggcgggcgcttgtagtcccagctactggggaggctgaggcaggagaatggcgtgaacccgggaggcggaggttgcagtgagctgagatcgtgccactgcactccagcctgggcgacagagtgagactgtctcaaaaaaaaaaaaaaaaaaaaaggaagatccttaactaagttagatctgcaaaatcccttttgctaggtaaaggaatatacttgtaggttccaggaattagcaggtagaatctttgcggggggctactattctgcctaacacaatggtcattcctctgttcaaaattgtgtgtgcaatcccatcatctgtgaatagacatatgatttcttaggacagtttagaggcccttcaggaatttagctgtcacccactctttcaatttcctttctcagctgcactttattcgcataagacaatgcatttttatgcatcttctccacgagtagcattacttacagatagaaatggattttatttaaaactttacaccactgacacatcaatgtacaataaaaatttgctaaatcaacttatctggcattcccagatcccatgatagcccacactatgcttctgtccattcatcaccagcagaatcttactcattaaattccatctttttaggaaccttgctagtctttgctcaagttcatcttttccttgacattttgctcaaacatctgaatctattaagtattgtctgaatgcctgtatagtttgtagtcaacatgcctataatgttctgatgggctgtttttgtttcttctaatagtattataaacactttacatacaaggactgatcatttagtttttgtttccgcacaagatagtgttgttctggggcatatgatatgtattaaatatatgcttgttgactgcctaatctacaataactttttaaaataaaaatgatcttaaattctacaatcacagaaattatttacaaataattaaacacactttcttttctcttgaactatacatttatgttaatactttctttcaattacaggcatggaaaatgatacaaacaacttggcaaagccaaccttacccattaagacctttcgtggagctcccccaaattcttttgaagagttccccttttctgccttggaaggctggacaggagccacgattactgtaaaaattaagtgccctgaagaaagtgcttcacatctccatgtgaaaaatgctaccatggggtacctgaccagctccttaagtactaaactgatacctgccatctacctcctggtgtttgtagttggtgtcccggccaatgctgtgaccctgtggatgcttttcttcaggaccagatccatctgtaccactgtattctacaccaacctggccattgcagattttcttttttgtgttacattgccctttaagatagcttatcatctcaatgggaacaactgggtatttggagaggtcctgtgccgggccaccacagtcatcttctatggcaacatgtactgctccattctgctccttgcctgcatcagcatcaaccgctacctggccatcgtccatcctttcacctaccggggcctgcccaagcacacctatgccttggtaacatgtggactggtgtgggcaacagttttcttatatatgctgccatttttcatactgaagcaggaatattatcttgttcagccagacatcaccacctgccatgatgttcacaacacttgcgagtcctcatctcccttccaactctattacttcatctccttggcattctttggattcttaattccatttgtgcttatcatctactgctatgcagccatcatccggacacttaatgcatacgatcatagatggttgtggtatgttaaggcgagtctcctcatccttgtgatttttaccatttgctttgctccaagcaatattattcttattattcaccatgctaactactactacaacaacactgatggcttatattttatatatctcatagctttgtgcctgggtagtcttaatagttgcttagatccattcctttattttctcatgtcaaaaaccagaaatcactccactgcttaccttacaaaatagtgaaatgatcttagagaacaaggacagccatcacagagaacgtctgttttcaagaacaacataagcatagtgcaaggagctccatttccgagctcctaagaaatatgcttcaaaggtcaaacattacaaaagcattagtagtttgtttgtttgtttttgagactgagtctcactttatcacccagactggcgtgcagtggcactatcttggctcattgcaacctctgcctcccaggtcagcctcccaagtagctgggattacaccaccatgcccagctactaaaaatacttgtatttttagtagagacggggtttcaccatgttgaccaggctggtcttgaactcctgacctcaagtgatcttccggcctcagcctcccaaagtgctggattacaggcgtgagccactgagccagccagcattagtaatttttaaaaacactttatcagtattttaaaaatgttaatgcaggagaaaagatatcacaactctatggaaaatgacatttccatttgccttattgctacttcaagctctttaaatcaccatcttccctatttctgtgagtggtattgccatccttgacatttgacatcattttttattctttggtctcttttgactctcatgctggtggctgcctcatcaactgattctatctttgtagggtccctcaccagggtcttttatctagtttcacctttgccttcttttttcctttttttaatagagacagtgtctcgcttcgtcacctggctgaagtgcagtagcctgatcatagctcacttcagcctccaactcctgggctcaagcaatcctgctgtctcagcctcccaagtaactaagactacaggcatgcaccaccatacccaactaattttattttttattttttgcagagatggagtctcactgttgcccaggctggtcttgaactcctggtctcgagtgatcttcctatctcagcctcccaaagtgctgggactacaggcatgagccactacgcccaggccacctctaccttctaaccattctctccactgccagcctaccctccaccacttcacaagtcctgccagattaatcttccttagatatcagttaggatacatcactaaaacatttccactaactccactgtttctataataaatcataaatctttagcctggcattcaaggctaacttgctaatcacacttcccattaaaccttgcttatgatataggcaccaaccaaacctcttgctctgctatatctccactctgcctcagactgaaaagctagtcctaacgtctttgccttaattctgttcattttttcaagtccttgaaggaccattcttccctgattctcaggctagaagtgtcacttttcttatctgtacttccaaagcactttcgtatatttttattatggcatttatatatagttcatttatatttaaattttaattccatgaacaatcaagtaccaagtataatggagaaggtgctcatcctctgccttccttgagcttctgggtgatgccaggcccaagtctttgtggcacccagctccatgctttgaatactatgtggctgaatgaatttttaaaatctcaaagcagttaaacagcaggaaagcccattaacttcgtactgaaaaagcaacatactgtgatgatacgggatgacatcatttcaggttgggcatacaaaaaagtaaggaagctaaactaagactatactcaccaggccatttagaagttttaaataatgcctccactattttttttcttagacatagcttttaatggggaaatggaattttgttattaatacccattatattcctgtaagtaaatgactatttttcccttaactcagtgattagacaggaaggaagacattagtgattagacaggagggaagatattagtgattagacagcagggaagatattagtggtaaagagtgaatgatagtagtgaatataaatggggctgaggaaactttaagcataaaagattcctgagatgactttacaagtctgtacgaatctgccttgactgtatatttcatactgcccaacaaaacaataaaaaacaattttaaatgcatatttttaaatgtacacagttttctatttcatcagacttaagtaaaaagcttccacatgaagaccctttataatatgtgtgtggttatgcaaagagcaaaactcaggtaaacactaaagtgagaatgaaaaacaaacctaaagtaagtttcaagaagatagaaacttaaatggaaggagctgacttctgaaaactaagtcatcaattacaacacagttttacctaaggaaaaaatacagcaatattcgttaaaagcacacagtttttatggtatatacaaggagcaaaacagaactttttggtggagtataactcatatgttcacaagcaaaaccttcaattgtaaaatagcacacaccacccagtgaacagacatagaaaaagtgttaaagtcaacatgaccattactcaagtctctttccaagaggcaaaaggaattttgtagctacacaaggttatacttgacatactgctaaagaggacccagaatcttcaccaacttccattactgtcctccacctttgacaaaactgggcagccattctatgaagatgttacccattgtgacctttaatggctgtagcctttggcacagttttactttatactgataataccagcaatataattttctaatattattttccaaggccagaccttgggaagacaaggcacagaaataccatcataaacacacaactggaaacttctaggaatcaaaatagtagaggatgctgaatgtggtggcttgtgcctacaatcccagctacttgagaggctgaggtgggaggatcacttgagcccaggagtttgagaccagcctgggcaacacagcaagatcctgtctccaaaaaaaaaaaaaaaaaaaaaaaaaaagcagaggggaaaaacaaagacattaaagacattgccaaacaacagaattaggatttttccaagaaaaaagaacaggctgagaaaagaaagtttcaaagtcaatgaacagagaaagaaaactgcttaaaaacaggaatttaaccaaatatgattcatcgcttggacctgcagtattttaaatctgtttaaatctgttagtaattgccagtatatttcaaacctctaactatagtctaacagtggtttaacgcctgaactagaacccagatccctaggctccatatcaatgctctaatcacaccatgaaagctactgtttccacacctagaaaggatgcctgacacagagctggcatggtgtgggcactcaggggcttctttcaaaggacgcctgtggagttccatctcaatctagattggaatgctcagtctagaagggacctatactgcctgcctatgaaaggccttgggtttgtggagtcaggctcacctcaaagacaaacccccatgtggctgtgggcagacagggacccaggtctgtctctatttgtcctcagaagatcctgactttggtgtgtaaattcagcagactctacgtctagtaagaaccttgaagccgggtgcggtggctcatgcctgtaatcccagcactttgggaggccgaggcaggtggataacctgaggtcaggagttcaagaccagcctggaaaacatggtgaaacctcgtctctacaaaatacaaaaattagccgggcttgatggcaggtgcctgtagtccctgctactcgggaggctgaggcaggagaatcggttgaacctgggaggtggaggtttcagtgagctgatatggcgccacggcactccagcctgggtaactgagcgagactccatctcacaaaaaaaagaaccttaagatactgacatcactcaccccttacttgggaggcaaccataggtgcccacaataatactagctacattatttaagccctttttttggtgccaggctccatgctaaatgctatagctacacaaacacgtgcacatattcttcattaatagtacctatagttatatattgatatatatttacttattgtatattctcattgaaccctcaccataatcctataagacaggtactattattccaattttatacatgcaaaaataagcatatagagatttgatgatttgaccaagatcacataactaatttgtggcaaagccaggatttaaatgatgtctaccttcaaagcaaataactttgtcttccaatgcttgtaagtttaccatgtgccatggccacagccacctcagtggaaacatcaaggtgaaggcccactctcctgcccctgggatgtatggactccaggcttgtgtatgagccctcactctcccactcactggctgtaccttggccaggcattcgccctgagcctcaggctcattcacatcagatgagacagcacccattccacaggtggtatgaggcttaaatgagaaagactgatgtgagtgggggcgcttggcaaagtgaggagggtcaggcaatgccactgccgttcctgttggaaggctggcagtgcagagggcgccaccatgggggatacatttctccaccttcaatgaggcagtggagtagtgaggataggatttacattggtttttaaaagtttagaaacagtaattatttaatacacacactccttaaaaaatttaaaaatccaagcagtacaaaaacggagtgaagaataaatctcccatccatactagccttctagttcaccttccagaaggtatcctccctccagaaatattttagacacatgtaagagtgtgtgcgcccctcccccaacacatacacaagcctatctatattccatctatgtgcacatcacagcatgattttttttttgcttaacaacatttaggttgtttttcatgttttgtgattgcaaacaaagctgcaataaacatcttttcccatctgccttaatacataattataatgtttccgaatcagacagacctgagctgcatgtagtctcaggactaattatcttttagatagcttgattttgttttattttattttatgtatttattttcgagacagagccttgctctgtcacccaggtgggggtgcaatggtgcgatctcagctcgctgcaacctctacctctcggttcaagagattcttgtccctcaacctcccaagtagctgggattataggtgtgagccaccacacctggctaattttttattttttatttttatcttttagcagagatggggtttcaccatgtttgccaggctggtctcgaactcctggcctcaagtgatccacctgccttggcctcccgaaatgctgggattacaggtgtgagctactgtgcccggtcacattttagatagctttcaacaagttacttaatcttggtttcattatgtgtaagatggcaataatgatggcaaaatggttcagaaggctgttatgaattgttgtgatgattaaatgagatgatacacatgagtatctaatatcatgcctgacaaatagtaggttctcaataaatgtttgcattaaccaaggatgtttttcctgtttcgaatgaggcagttcctaggttctaaagacctagacagaggagatgaccgccctttcagttgggtttgcacctgaagacatggcagccataagtagctaggtcccaggtggcatcactcccactcttaggtgacagatcatatcagcctcaccactcagcccattggccttatcacagaggccagtctttgtggggctccttataatagcggtacaagctctgtactcagaaaaagccactagtcttcgagaggacagcttctgctctacctccacaccaacttctcttaggattctagtccccgacaatctcaaacatccgtgaatcaatctgtgtatctctcattttgacactttgcacacccttatctttactattacttgactgttccatgtgacaatgtccactgcctcaatcagtttctaagcattttgaagataaggtcagagaacattcaaatggtattatgtgtccctctgtatccccatcttctctaccagaagctatggactgaagtgtgcacatagtatctactaaggaaatagtcaatgaattgaactctgaacaagaactcacctacaactgagtttttagtcaaagaattaaagcaataaatagctctggagctggtttccccccaatgtttgttaccaggaaaataacagctctattatttccattctgattcatgggtaattgttgggacaagaagctcatgagatttaacgtaaatgggtcaaatcctcctccttctctccctctgccacccagcctgtaaaatttaaaagaaacagatatactaaaacttactccgagtttctgtgatttagcatggtataaaacatcctggtagtgctgggcatgggctgggtccacatcactaatattcgcagtaggtaggagcaaagtttctaaagtcctcaaaggattcccttcatcaatagcttcattgatgtaccctacagctacaactcctagaaaatgaagaagtagttttccttttaagtcacagtacattataacttctttagtatcaccgattgcaaaaggctaattaactagtacagcaaggctataggatgcaagatgcaagcacaaaaccaattatgtgtctatacgctcataataagcaatctgaaaataaaattaagaacacattcaattcataagactgcaactacaaatacattataattataaataaatatttagacataatttaatgaaagaaacataagacatgtacactgaaaactatacaacaccatgggaaaaaacttaaagacaaataaatgaaaagagccaatgttcatgaattggaagatttagtattgttaagatggaaatacttcttaaattgacctacagattcaatgcaacttctatcaaggtcccagctgctggtttttatttttattttttttttttgagagattcttgctctgtcccccaggctggagtgctgtggcatgatcttggctcactgccacctccgcctcctgtgttcaagtgattcttgtgcctcagcctcctgagtagctctctacattctgaccaacacttgttattgtctttttcattacagccatcctagtgggtgtgaagtggtatcatactgtggtttggatttgtatttttctagtgactaatgattttgagcatcttttcatgtgtttattttccctttgtacatcatctttaaagaaatgaagtgtctattcaagtcccagctacttgggaggctgaggtaggagaatcacttgaatccaggaggcagaggttgcagtgagccaagattgcaccactgcactctagcctgggtgacagagtaagactctgttccccccaccaaaaaaaaaaaaaaaaaaaaaaaaaaaaatatatatatatatatatatatatatatatatatatatagagagagagagagagagagagagagaaagagagaacaagactgactatagggttcacaaatgaaaagcacagaagtcaaactatgaaacctgcttttacaattctaatgaaacggatctatctggaggttacttctcaataccttattattaaaaaataaactatcatccattcataaaaaaatgcatttagatagacatgcacacacagacacacacacacacacacacacacatatattatataaaacacacatatacacacactgccaaggagcttttgcttcctaggttagtactgatggataagaactgttaaagaaactagatattaatgaacaataagcttagaatataagcatttttaaggtcaaacttcatatttctcattttttccattagatttaatctaaaatgatcacccgtcacttcacaactgtgatatgccatgaaatagaatgagtacttctcatttttaaaaaaagtatctccagcttgacattcaagtaaagataaaatatttagctaaatatttcttgaatagatgagcccataaccaccacttcgttaagaatgaaaagatttacctgtaagaagaatgaaaccatctaaaactcctagaaatcattccagactataatacttaaatatgtttgaagaaaaagcagaagtatttctctaatgtgcaggttatattatctgtaaacattgacagaactctggaaagtctaagtattatctatatacaaggtactgtcgttttaccctataggatttataaactggagtgcatggaatatttagtgccattctctggtcaccccccttgggtaagctgttctaaatacctttaaaacaccccatccaaaaatggtcttaacagaaccaaggccgatcacctggaagtgagtgcatttcagctgacttgattgaaatcacctgctaaagttgctgtctgctgcgtttctaagaatacaagctgctgaggtcatagtgaatgacatcataggagctgaaagattacccagaagccctctgggaacatatgcatcacttcctctgtttataaataaaagggaaatcctatttgaagaaagattgctgagcttcactcagcccacggtccacttctttacatcaacacatgttactataacattctagtccacaagagagtgggcgttcttttagagttcatgtatttgaggcagcagatgaggtaacctacacagaattgtacctaccaaatttaaagagcaaaaactcaaagaagaaaacttcctgatgtaggctataaggttaaaataatgctcctttatggttctactgggaaaagtaaacttttcagtaagaaatcaacagagcctgaggaaatgcattcagcagctagcttctccattaaattcaccttctatatttctcattttccattagctgcttacctcacccacatcacaactcagatatggaattagatctcagagcatgtggcaagaataaggtggggaggcaagagtaatgcaccttcaaaacgtccatgaaaaattctcagctcctcagatgacttaattactatactgagcaattcctgcctggttacaatggtgtattttagaaattttagattttgaagaattgcctaaacatgatatcaaactcaatacttcaggaactcattctgacaaaagaaaaaaataaaaccaagacacagataaattaaatactctgtattaaagttcccaaattccagaaaggaaatattagtgtctgaaataccttttctggttatggtatatgtcctttatgacaagatacttaacagaagtgttatagtggctgtgtgaaatgtcctagggagaataacttagtagtgctgttaccttgatagataaaagccacagcaatcaaatgagatttttgcttaaaaataatatctacttacaaaagactattttctaagttatgcaaatgttacttgctttttttccccccagtaaccaactaaagcaaaggctgtacttgatagccaagaacaaaactggcattttccccctgttaatcaatgtcaaccctacaatctttcagcactgagaactaacataccttcatttgtgtaagcagcacatacagaaataaccaaagcagaactgaagcatgggtattgccaagaattggggaaaaagttagaaagcaaagatgggacgtgagtctttgttttgcctaccaaaagaaaggagtcctacttcttgggtggcagttgctgtagcaaccaaaccactgctaaaggagattcagagcattaagacggaggttgtggagaagggcagaagcctgggggactgagctctgtagcgggacactaggagcagtggtggtcccccaacccccacctgatgatgttgaacatctgctcaaattagagcttgcgtcttgactaacgtctggcaagaaccataaactcccaagccaagtatcagaaaagagctaagtggggtgtgagcaagccgtctcaccgcagagactttaaatgcttcactgaaaggaaatgcagaggcaacagggaagctgtgccgtctcgaaagaaatttagatttgtgcacaacttgaaaaggacaaaatgaaagtgtccagggatcagtgtaacagtggtacatccatggtaccgtatatagggtagcacacctggatcctgttttatagtaggggcttaaagtgagaatatgtttaaaaaacaagaaccaaaactggccttgacttttggcccagcactcacaggaaacagcaaagaaaaagaagaaaactttgcaaatgcaattaattaacaaagtcatatgttttatttcaagagtgatcttagtattcctaagttaaatacagcattagaagaccagacctaagaccttacccaaacacactaaaataaaacataataaactgtgagagaagtatctgcccactctatccgcgagcttggagcaaatgagttagaaaagtcaaagctggaaggtggaggagagatcaatgattttagcaacactcacccactgttgctgacaa

SEQ ID NO: 445 - DNA, 1830 bp, Homo sapiens
cctgcctgcacggcacaggagagcaaacttctacagacagaccaaggcttccatttgctgctgacacatggaactgaggtgaaattgtgctccatgattttacagatttcataacgtttaagagacgggactcaggtcatcaaaatgaaagccctcatctttgcagctgctggcctcctgcttctgttgcccactttttgtcagagtggcatggaaaatgatacaaacaacttggcaaagccaaccttacccattaagacctttcgtggagctcccccaaattcttttgaagagttccccttttctgccttggaaggctggacaggagccacgattactgtaaaaattaagtgccctgaagaaagtgcttcacatctccatgtgaaaaatgctaccatggggtacctgaccagctccttaagtactaaactgatacctgccatctacctcctggtgtttgtagttggtgtcccggccaatgctgtgaccctgtggatgcttttcttcaggaccagatccatctgtaccactgtattctacaccaacctggccattgcagattttcttttttgtgttacattgccctttaagatagcttatcatctcaatgggaacaactgggtatttggagaggtcctgtgccgggccaccacagtcatcttctatggcaacatgtactgctccattctgctccttgcctgcatcagcatcaaccgctacctggccatcgtccatcctttcacctaccggggcctgcccaagcacacctatgccttggtaacatgtggactggtgtgggcaacagttttcttatatatgctgccatttttcatactgaagcaggaatattatcttgttcagccagacatcaccacctgccatgatgttcacaacacttgcgagtcctcatctcccttccaactctattacttcatctccttggcattctttggattcttaattccatttgtgcttatcatctactgctatgcagccatcatccggacacttaatgcatacgatcatagatggttgtggtatgttaaggcgagtctcctcatccttgtgatttttaccatttgctttgctccaagcaatattattcttattattcaccatgctaactactactacaacaacactgatggcttatattttatatatctcatagctttgtgcctgggtagtcttaatagttgcttagatccattcctttattttctcatgtcaaaaaccagaaatcactccactgcttaccttacaaaatagtgaaatgatcttagagaacaaggacagccatcacagagaacgtctgttttcaagaacaacataagcatagtgcaaggagctccatttccgagctcctaagaaatatgcttcaaaggtcaaacattacaaaagcattagtagtttgtttgtttgtttttgagactgagtctcactttatcacccagactggcgtgcagtggcactatcttggctcattgcaacctctgcctcccaggtcagcctcccaagtagctgggattacaccaccatgcccagctactaaaaatacttgtatttttagtagagacggggtttcaccatgttgaccaggctggtcttgaactcctgacctcaagtgatcttccggcctcagcctcccaaagtgctggattacaggcgtgagccactgagccagccagcattagtaatttttaaaaacactttatcagtattttaaaaatgttaatgcaggagaaaagatatcacaactctatggaaaatgacatttccatttgccttattgctacttcaagctctttaaatcaccatcttccctatttc

SEQ ID NO: 446 - protein, 370 aa, Homo sapiens
MKALIFAAAGLLLLLPTFCQSGMENDTNNLAKPTLPIKTFRGAPPNSFEEFPFSALEGWTGATITVKIKCPEESASHLHVKNATMGYLTSSLSTKLIPAIYLLVFVVGVPANAVTLWMLFFRTRSICTTVFYTNLAIADFLFCVTLPFKIAYHLNGNNWVFGEVLCRATTVIFYGNMYCSILLLACISINRYLAIVHPFYGLPKHTYALVTCGLVWATVFLYMLPFFILKQEYYLVQPDITTCHDVHNTCESSSPFQLYYFISLAFFGFLIPFVLIIYCYAAIIRTLNAYDHRWLWYVKASLLILVIFTICFAPSNIILIIHHANYYYNNTDGFIYLIALCLGSLNSCLDPFLYFLMSKTRNHSTAYLTK

SEQ ID NO: 447 - DNA, 28516 bp, Mus musculus
aaagtattattattttctgtaaaattccatacaaagtcctgatggtagaaatgctgccacacaaaaggcttgagtcgagaggctgaggcctgtaatcacagctactcagaatgctgggcagcagaattccaagatgaatgaaggcaagtcctctaccctaagtgacacttttagtcccaaactatagactgatttcttaatttttttaaatttagggtttcattgtgtagctttggctggtcagtaacttattatacagcctgggtaggcaacaaattcacagagatctgcctgcctctgcctcctgattcaaagaatgtgccacaatgcctagtactacagaatattttcttaaagatgcatttttattttttatttatttatttatttattatttggttttttgagacagggtttctctgtgtagcactggctgtcctggaactcactctgtagaccaggctggccttgaactcagaaatcctcctgcctctgcctcccgagtgctgggattaaaggtgtgcgccaccacggctggctaagatgcatttttaaaaataattttatttatgcatctgtgtgtatgcatgtgagtgtggatactcacaaagacccttagaggtcactggatctcctggagttacaggccttggtgagctactgtatgtgggtgatgagaagcaaaattaggccctctgaataagcagcaactgcctttaacagctgggctgtctttccagcacctgtcactgccccaatccctgttgctgctcccccaacacagatatacagtattaataaggcttctaacaaaatacatctaaataagcaatatttgttgagagcggttaagtgcttatctgcagcacagacagctttaatataaaactaatttaaaatagtaaattataaaccaagagaccaggtgatatgaaaatatactcaatcaagttccgaggagttgagaagcagctgtggcaaacagtaactctacaaactgtaatgtgactaaaagctgttaccacacctcctgagcccaggagagcaggtgccttgccttctcctctaaccaatcctaaaaactgttatctacaggccaacatgttcttgttcaaaaccaaagcatcacattttcataaaaattcgaaattacaggataaatataatagctccaagaatgttttaagaaattagggattctaagattcaacaaatctgcttatcaaaacatttttccatgacaattctcattgccccatgacaactaaatgacagcaatgtgtttcagaaaaccaaacaacccaaattgttctgaaaaactgccctgcttcatccctactgaagcctgggagaggggacgcagcaggaagacaggtgtggctcccagctgagaactgccctgctacaataaacttcagggtcacaaagtcatttggatcccattcttcctcaacctcactcataatgctcaggattttaatatatactggtaaatttcagggtaaattttagatatatcttccaacgtaaaagcctaccaaaactcccagtacattttcagctctatcagtccatcacacagcttagttacatggatgaaacagttgcttctggtctgtcttaaagtgtgaaatctaaagatggccaaagaagcaaatatagtatcattttatcagaacactgtaactcacatcaaatactattccaagtcttggaacaatttgttatctggcatggaggaaaccaaccatgatgaatgcctgacactggggcattttctgggcaaattagatcagagggttaccctacctagcaaaacaaatatttgttacaaaaaagacaaatattatcccctggattccatgacttcaacaatgagaaactgatatggcttttaaacaccaaaaactaagttttcctgtctagttttatcttcatctccttgccaagaatcagcagtgctctcatttttaccactctatagtctgaaattctccatattccgatgtttatacggaacctgcaatcagatgataccacaatttataatcctggccaggtctcatttgagctgtgggctcatcttattccactaagaaatatttttacttcaaaagtattcaatagtaaagtagcccaaactgtcaaaaagtcaggcagtgctttctcccataaaaactgccactttacaagattttttcatcttaattagtggtactcctgtttacttagtgtctgaaacctaaacctattctgtcagaaatttctccctttccccttgtacagatgttaaattcaagaccaattcattcctctgcccatgtatacacacacaattcttgaatccatttacatcttgtctctatgtcatcagtgctttgtttagcaactgtttatagcctactaactgtgctgtaatagcaatactctcggaactaggaacattggagcaaacaaacaaaggttcttcagaaatatatataaccactgccatgccatcttagaccagtgtaagaagccaagtggtttctctgtatcatcccttgcctacactctagattatccagaatattctctttacaataactgaaataatatttggaaattgtcttccattctttaaactttccagtggtgtcaatactagttccttttcttgtctctttgagaaaatagctgacataaacaatttaaaagatgaaggattaattttggctcaggttcagaaggatcagtgactagggagtgagtcacttggcaacatgtttctgagcccacagccaggcagaatatcatgatggtgggaccagtggaggaggcaccctttctaggaagacaggatgtggttagcgtaagaaataacatccaaacatatttctctagagagctacttcctccacagaggccaccatctccatagttctaattaatcaagtcaaaggttgaatccctcgagattaaatcattcatttagtcatagacctcctgttctgtaatccctgagataagaagtacgttttaccaatctcccagatgtttaatcaatctactcaaactgataaccaagactaattaatgttaacagtctaagtgtttacctgatgtggtctggtctttgtctatacataaagctatttcccaggtcaaaactactgcagctagaagccctttgcccaagccaatcccctgtatgaactgagtttcaggaacctgagcggtttcttgccactcaggtcctaccctttaccacctcagaggccttctgtggtcacttcactgctacagcagctgcaactctaatttctgtgagtgcagaatcatatcttgtggtctctttcctgttttctaacctattagaacataagctgtgggtgagatattaacttacttcactgttaatcttcacggtgtgcatcagaatttggttcgcaatggtagacaggaaaaaacccctatatcctatttctttaacaacatctacaaatggcacctgtattcctgctcaacttttaaaaaaatatcctatacaccagaaataggggtacatagaagattcaaaatcctcagtctgtctgtctgtccattttacattatgtaataggctgccctgaactcatgtcctccagcctcagcttcccaagaagataagactacaggatgtataagtatgcctggctaaaattcacaactttaataatgacatttactgtactataatagtaaactgtgccacaaggtttgagaggatggaaacaccaaactcttcttgggaaatcaaatggtacaccatcttgagattactgttgcaggagaaaagcattctgtgaggcgagtgacttttccgtattttactttttctacttcttactggacagtggtgatactgtagtattcaatgcacactcacagatagatcaatcaagtatgctgctggaagactgaaggggccgcatttgatccttgggttgtacttcatgctctttattctaaactttgagatttttaagaatctatagagactcgttacactttatcctgacttcattatactttaaaaaatatctaagatgttaaaaaaacaacaacaaataattatacacatttccaaaatgaccaattaatttaaaaaaaatgtcattcaggggggttgggtagagatggctcagcagtaaagagtactggctgctctcccagaggtcctgagtttaattcccagcaaccacatgttggccaacaaccatctgtaatggaatccgatgccctcttctggtgtgtctgaaggcagctaatgtgtactcatatacactaaataaatagatcttaaaaaaatatattaaaaaaatgtcattcaaacaactattcacagtcagtactgtttgctttgcacataaagaatggggaggggacctttcaaatacttacctcttcaaagcccatttcaaataaacactcaacagctcctctgacaggcaagagtctagtagaaaacgctgtgttcccaatacggatggatctgtatttttcatcactggggtttctgattaaaaaaaagaaaaaaagataacataatgggcaatataccaccactcatctttttaagagtttatatatgtttctttcacctttcctctcagctgtccttctacacatggtagtataaattccaactataaggaatgagcagtcgagacgatcattcacacgtcatgattcgtatacttcagtaccactgagtacttgtgctgtccaacttcatggatgacagtatcattgttgccataggaaactgtgtggctgttacagataagtacctttttagtcttttaagtttctagaagtcgccccagacagagggtagcaccgtgtctgcttgctctgaggggtcctgtcatctataatggtgctcagggtacaacgactgtgtttaagaagcatttgtgagttgaaacagctgaaaagctttgcttccagcataatgaaccttagtggtcacttagcttcctttcctccctgtaccaaggactgtctttactgtaagtttctaccttgttttaaaatgtttttggaaaggaaataaggtaattgtcttagggttttactgctgtgaacagacacacactgtgaccaaggaaagtcttataaaaaaaacaacatttaattggggctgccttacaggttcagaggttcagtccattatcatcaaggtgggagcatagcagcatccaggcaggcctggcacaggctgagctgagagttgagagttctatgtcttcatccaaaggctgccagtggaagactgacttccaggcaactagggtgagggtcttaagcccacacccacagtgacacacctactccgactaggtcacacctattccaacaaggccacacctataaatggtgccactccctagtccaagtatatacaaaccatgacagtaataaaataaaacaaaaccacaaatattcaaagacaaagctctaaatattactgtttaactgtcatacgttagtgttggtctacaaactccttcccacaacaattccaatactgtgtgttcaataacttttataataacttgataatactatgagattttcactgtgttctataaaatttgtaggtccacaaaaaagtggaaattaaaaaaaatcttttcaccaatgatttcagaagcaagcattgattgctggcagcttgggagtgtttaccttctctacatttactatgtattaggggcagagtttctcagtcttgacccccatgaaatgtagaccacagctgaggggagactccctatgcaccacagaatactcaacatccctgttttccctgagacaccacttaaacaaaatctaaagtacaaaatgagcctagcatgtgtcaatgctaaccacagatgacttgtcatgatgcacatcagctatccccatggcatacccagttaaagctgaagatgtgctgcccacctcacagcttctcaggctctccatggccgctgcatgctgcttactgggctctgtcatgccatagcaaagcccagcagagacgggcatacccagttcccaggtccctctctatcttcctttggcttgtttcacctcaaactcacaatccccttgtttcagatcttagttgctatgaatgtttaacccatttttaaattaaaaatgctaagcagacttgcttgagttcaagcatagactaagcccaaagtcagccctgcctttctatggtatcctgggcattgaattgaattttgcttgattctctatcaacttaattttctctgtacagttttttgtttttgttgtcatgctttgatgcttcccccatccatctctgttacctattaaatacttttgtaagttgtaatatttacttcactttttagcaattatcttgtatcttttcttgggaaatttttctgaatatgtagtttttcatgatgttaaaaggatagaatcttgagaaggcagcagaatttcttgtactgtgctcaactttatctttgaaaatatttttgtcttttttggtgttttactctcatagttatctaccaaactatttaattttcagaaaaataatatttgcctttgtatttgaattagttacggaaagtcacattctccctcccactttttctgaaacagctctgccttaggaaggatacagaactaccactggcccctcctctagcatccacttttcttttgagcaaacactgactacttatcaaggtacagtagtgtatacctataatcccaatatgccaaacgacggaactgtttcaataacaaaaaacaattctcaaacaccaaaaaaaccacaaaacccccactgtagggcacaagacaaaacattacaaaaataattgcatgtgggaggaatttgtacactagaggggatggtgacagggaaagagatgaagaataaacaatgggctacagacatgaaatttcaaagaacaaacagtcaaacactccaccaaacttttcacctaatttaatagaaataataataatagcaaccacctcagtagttgcgatatatgtgccaggtcatttatgttgggtagtcctagaatagagtatttttcttccttttataaggtaaacttaaacttggaaattatatgtaaattgcctataatgacacttaaaatagttgactaaaattgaaacttactgctctggttaaaatgtttatacatataccaccacacaagctgccagcagactcaccaactttcaattacactcaatttctctacgtgtcagtggcaacctacattaaaaattagaagttttttgtcttctattacttcttgcattgtcattgaaaattctctttctccattccattgggtttattgttatgattatgcagtgacttcataatcaatgcctgtttcttctaatggtttcctcccggaaactccactgtagaaactgtgagtcacctttgcctatcccttcactaaatgtctcatgtttggtctccctactacctcctaacataaaaatataaagacagagacattaacactgtcttggaattgttctttgatgttacactgtagctgtttttcaaacctttcttctcccaaatacatttatattatttgaacaaagaaactatgtttgattcttggttcttcactcagtacagttaatagtcaaacactatgtgtgctttgtaaacaaaacagtacaatatcaaatatttatattaaagaataaatgaactagggacaggggatccatttagatggtagagtgcttgcctcccattcattgagccctggctcaatctgtggcagctcataacagcaattgtggtagcccacacctgtaacttagaggtgtaggtaggaggataagaagttcaacattattcttaggtacatgaaaagttctaaaccaaactctggttcatgaatcaaattagctaagcagctcacctgtgatgtcaggaaaactaatacagagttgctttgttttgctcttgataaagtccatagtaagctcatcttatctaaaatgggtggcagcttttgcatacaaattagcacacatttcttttggagcttatttagatttattactgttaggatatgataaatattcaagcagaaatttaagagtattatttcattgtagatttcagtgacaagtatctacttcaaaacaagctaatgcatttttatttgcatatccattctataaattgttctgatactgaggcaaatgagatgctgggacaatatgccttcaatagtgcctccactatggcactagtgggtttaaaagaaaatagcaatgcaaagaggaacctgattttctctaccaaattacagaagtataattataatgtgcggtcagggaccaggaagacatggagcttttccttaagagttaagaagtcactggatttggacatgaagaagcaggatatcatctcccaaccaagccagaccttgaattctaagaacacaaggacacttgttgaaaacaaactaaaggagcattttctcacatcaacctgaatcatttctcttacaaactgctctaatttcctttataaaacaaaaactccaagatcagaaatgtaagccacagtaaaggctgtaaaatgaaccagtttctttaagaaatttagtaaatattcataatgatggtcatgatccgaaataactgtctgcatgcaaagctatctttcaaagtactctgatcttagcatctttggtttcattgtactaaaagaatcgaaatgtctttacaaatccatccttctcttatgtatgggggtgggaggttgaagacttaaacaattcagtatgaaacgccagctgtgggctctggagaatcaagcttatgagttctttcagacaccttgtactctgaggtgctgtgagatctcagggttaagctgaggtgtcataaaggaggaaggccatcttcacacaagtcacaattatgtgcaagcccaaatgctgcataacatctggcatagaatcacattatattcccttttcaaatatattttaaatatcactaatgtcacctaaatgaagaattatggttgtggtggcacacacctgtaatctcagcttttggtaggtcgtgactggcatgagttctggggtacagatcaagttccatgccagtttggggtacaggacaacacctcaatgtctctaacaactaactctctaaagctggtccgcatgaactgtacagcctttaaactaagaattcctacagacttcgggtcggtgtgtttgtaagagccagcgcccaggggctcaactgaagtgacctccactgtctgcccctccgcatcccttccccacactctttgaccggagcggccatgggaggtgctgactcaaactcccagccagttgtggaaagtgctgcactcagtacaaaggtgacttgacacaaagttcgtaacttaaactataaatgtgtcaaccgccaaactcggcgtgaacgtttaactggcactcgggctgagccacagcgccgggatcctgcagcgacatgggacagcacagctgtcaaactcagtgacagcctcggcgggccctcgtcgcccagcccgccccgcctcaggcccgagtgtccgcggccccgcccgcctgcggccctcaggctcgagggccccggctgcacctcaggatgttgtcggcgtaggtgagcagcagcttggaggcctccagaaaggtctccggggtgttctggcatagctcggccacggccggggacgcagagctcgacgagctgcccagtgtggccgacgccatggctgcgccgcggccttcgccacctcgcgcaccgcggcccgcactgagcaggcgctgaggagcgcctaggccgcctcagaggcctgcggccagagggcggggcgaggagccgaggggcggggcgttccgggaggggctaggggcggggcgagccgcggagaggccggttgcgaacgttggggtacggggtacaaggggccgagccagtggagtagatctcgagctgtggtggctgcttgtgtcgggtagggtcccagagataattgcacagccttctttttacggtagataaaagtcttttgtggaagaaaagactccagaagaccgagcaagtttttgttatgtcttttttttggggggtggggtggggtgggggcggttatggggaagggaaaagtgatcatggtctgtggcctaggctgggctcacaggggaatttactgcagtcttgccctttggttactagtgtccggcttcaaaaacagagcatagctcagaactcttctgggtttctgatttgtgtattttccgaattctgttgatgaaaactcagttgttgctcacaaggtatgattctgatgcaaggagcattttgggagtgtcctatggatactcgcataaaacccatatacaaaaatagaataaaatgaggaacaaacaagtaaataaagtttatatacacattgtatcctttgactcatactggcatatcccttaccagtatccttaatttatcttagaaagggaatcactaacctccttagctgatgcccttgtcactgacatcaaccctggaaattggctccagcactgagcttcatactcagtcctcattacttctttttcttcttcagaagagggtttctctgcatagttctgggtaaagtggaactccagctatagatcagcttgaactcagatccacctgatcactgcctcctgagtactggaattaaaggcttgtctaccactacctggcttttttttattactttttaatgttgaaatgccactaagagtgcacttgaccttgatttgtagtcaggagttttccatgctccactcaccttgaatagctggaattacatatatgaatcactagcacgtagcaggtacttgttggctttgtgttttaaagatatttacttatgtgacctcgtttgacactttattatctgttgttttttaatgtttctgggcaatttcttcggagaattttcaagaacttctgaatattcatctgtaaaatatacctacatttttagcacttaggtttgtagaccaacttcaagaatattgttttcagctaggcatgttggcaaatcccaaaacttggaaggtagaggcaggagaatcaaatatacatacatacatacatacatacatacatacatatatcactactaccaccaccaccaaagacatgaaagaaggaggcagatgagggaaaggggggttaaaggggagggcaaaggtgatggaagagagataatggatggactgtggccaaagaacattgtatatctatgagactttgaaagaataagtcttagaaagagaatattatgttcaacaaagtatgttattagctgttgtttaaatttttcagtggctaactactagcatttttttttctggtccataacaaagtaataattatgtttgtggcccaacttcaaatgctgtattcccagctatttgctgtgagtgttgactgatccttgtaatcccagtatataaaggatacaggcaggccagctggtgcagccttgttaggaaaagtgcattatggggaggcagttaggttttgagattacatgctcctgccctatgtccaggttactccctctgcttgtgcttgtggtaaaggatgtgagtattcaatttccttctctggctgccatgcctgctgccatgcagttctgccatcacgcactctaacctttgtacccataagccaaagtaaatggttttataagttgccttggttgtggtgttttatcacagcaatagaaaactagggtaagcatggtttcagatattttttgaaaacttgtgctgagcttggaagtaaatttatcatattgtgttatggaagtcgttattcctgcaattctagtaccagctgctatttctaaagcgaccaagagtggcatgacctgaactgccctcttatgttgggcagctatcatatctacaactgggattggtaggggctcatttccctggattactcccagttcagggaaaaggagtaccaacatgcaaactcctgactgacagaaacgagtactaagagagtgggatattgctgggatgaacttgaccatgtggttttattttgtggggctaggggaatatttatagaaggctttgggaagacttgggctagaaaacaagataaattgtactgtttgtagagaaaaggagatctagggagcttaacactacagccaaggcatgtgctagagagaggatgtttcacatagttgagaagtttgccttgtactggaacaaaggtaaagggtactctctagccaagacctcactcagcaaaacttccagcttgtacaatagcctaaagtcttttctgatcccagaaagttactgaatgaaaaagtattgctgctaatgtgattcaagtgaccccattcctggctggcagccacagtgccaggtttagacttgaaggatacaagaatgaagtgtcacagatcctacctctgtggcttctgagagcctctgaggccaggcaacatgtggtatggaattctctgcatgaagatactgagagaataagagtcatgataggccattttgtagagctgtgaaagggaagcttgggttccagtggagaccacaagatgttggagatatcaacgctatgagaaagctgccaaggaggtcaatagagaaggaccagcctaagagagagatgcaggctactggcaggaaagctggaggtgtggagcccttaacagaagacacgaagctacaggatttggtgttttgtcctgctggattctagtcatagtttggtccattatgttcttattccccacttggaccttttgggatggcaatctgtgccatatattggaaatatgtgatttgcctttttattttactgaaggttgaattctgtgatgctttgcatcttagaagagactttgggcttttaaacagtattaagactgtgaaagactccagggcatctatgaagaccggggagtagagtgtggtggtttgaatggaaatatttcctacaggctctagtatttgaactcatggtttccagtcagtagttcagtttgggaatagttaggtggcacatcttgctggaagaagtatgtcactgaaagtagtagagaaaacacctttgtttgctctcttggcttcatgcttgtggtaaaggatgtgaactttccatttcttcctatagccaccatgcttgctgtctgctgatatgctgtcgccataaccttctggaaatatccctttgcctctgagccatttctcccacacctcatttttatttgtgtgtgtgtgtgtgtgtgtgtgtgtgtgtgtgtgtgtagcaagtgcatacacatgcccttaccatggcatttggagatcaaaggacaatttctgggagttggttttttatcttccactgttaagagttctggaaatggttgcaagcctcaatggctgagccgtgatgatgcacacctttaatccagacccttggaggcaggggcagatggatctctgtgacactgaggccagcctggtccacagagtgagttccaggacagccagggctacacagtaaaacctgtcttggaaaaagaaaaaaacagagcaaagaacaacaacaataacaacaatgacaaaaaaaaaaaaacaaacccaaaccaaaatacacacacacacacacacagagagagagagagagagagagagagagagagagatatggaattcaggttatcaagctataaagcttagtggaagataactttatctactaagtccagcttctcaaatttggcactggccccaaagtcctggtgttttgtccgtattgtactactgtctgttgaaatgcttgccttcccctcagttactacacatgtattcacccagtttacagattgaagtctaggtccacttctttgaagcatttcatgacttaatgagatagcactgaccttggtctcctttgtgctaaaataatattacaaacagaagtttaattgtttggatagaaagtttatttaattgagaactgtatttggaaataaagctttgaaccagagaaataataagaggaggcaatgataagcaaaaccaagttgaagatttgtattcatgaatacaccatgatattttagcaaacaatacggtaataattcacatatagctgttattatgattttaaaaacttcttaaccctttccagatggaagtaaaatgatcacagagagaaatataaatatacattatggtcttgttatatcacgttttatgtgggtgcattgttttgagaacaattctttccctgggaagatgtaaacaaatacccagcctctttataaagcaacaacaataaatcaaagcaaaatccccaggtccgacttagggcactctaagtttattcagcttaccttcagagcatgggtgaagggttccttacaggagtaagtgcccagggcatctgcaccgccagaaagtttcactgcagcatggatgatgacatgacttttccatggctgcatagacagagttcccctttcagctaaccttccacagtccacataccccaatgccttttgagatcagaaatttgtatgtaaaacaaattgccaaaaggtactggaggaaacagcacaattttcactgcagggagatcatactaagcaaatggtgagctactggatcaggaacaagttgaattttcttaaacattttagacagagtagacaataaatcatatccaggagtaatgaggaaatagctaaacttacctcagattcttttctacatttggaaagctagcatacgtggcaacgatggcctgaagaggttattgcccacaagaaaatatataatcatgactacaagatagcatagtctatcctttatctgaagaaaaagcaaagctcacacgtgggacagacttgaacagttaatagacatcccctggctgtgttgctacttatcctacttatccattacagatttatctctgagcaagtaaaactttcgtaagctcaggaatttccacttcagatattgggcaatcttctggtcacttcctgtcatgagtcagccctttttattgttacagaagtagctgtttacatcatttgctaaagtaaataaaggtaaggaaaaatggaggtagaggggacaccataagcactgcagatcactacagacgttaggttttgttatattttaaagacaaagtcttcaggttggtagcccaggctccctttgcactctctccacagctgaggacagagctcctgatcctctgccgcccaggtgctgaaattgcgcggtaccattatctgatctctttgcaaacctttaaaagttttgtaactaacgtctcctaacaaattctcaacgtctttgcacatttctaagtattcagccatagtattattttattgtctacgtggcatttagatgtttccccaaacgacctcggtttcttggtgacattctgaagagttctatgaatattttctacagagctaccagggaggctaccgctataggtcctccccggaatgtcctggggaaatgacagccgcccttctctggcagcacaggaatatctaggcattatcgctgttgactaggtgaggtttcccaagcgatcaaaacaggctctgaggctagagcggggcactcacaacccggaacccggaggaagctctggccggagcgtctgacctctgacatcaggcaccgggcggaaacgctgcgctgcggatgagtgcgcatgcgcactcggtgggcgcccacaaaggcttgtttcaggtagtgactgcagtgtgcacccgggtttcagggtaggggtggagggcgtcgcgtggctgtgaatccctgagagctcctaacgctgagctcgggaagttacacccggccttcctaatacggcggtgctgggctgtggcgggaccgcctgaaaggttatctgccctacacggaagtagataaagtgcacaaggcagaatgggcctgaggcggcctcctgtgcattaatcttagaaatgccacatggactcagtccacactgtacagtaatcttcggtgagcctgaagaaggatgccccctgtagggtgggttggcgttgtaaaacccagtgagctagctatcagttgacagtctgaaggacctcatagattacaaataaaagttaagtccaagcgagggttgcatttctctgtgaccacagtcacacctagggtgtgtgtaagattctactgtcgtttaaatgatgcttgctgtctcttgtggtctattccaggaatgtgtttctgatcttctgaatttcaaccatgttgtcaaaatgcttgcaacattttctaaaagccacaatctcccatccatatccagcgtcatattcttggttaataagcaaacacagattttatggaactgtgccagcagccatgttgcgcagacgagttgtcatcacaggcattggcctagtgacaccacttggcgttgggactcaactagtttgggatcggcttctccgaggagaaagtggaattgtttctgtggttggtgatgagtacaagaatatcccttgcagtgtagctgcttatgtaccaagaggtccacatgaaggtcagtttaatgaagaaaactttgtgtccaaatcagatgccaagtccatgtcttcttccaccatcatggctgttggggcagcagagttggccctgaaagactccggctggcatccgaaacgagaagcagatcaggtggctactggcgttgccattggcatgggcatggttcctcttgaagttatttctgaaactgctttgctgtttcagaccaaaggttataataaagtcagcccattctttgtccctaagattctgatcaatatggctgcaggccaggttagcattcgctacaaactcaagggccccaatcactcagtgtccacagcctgcaccacaggtgcacatgctgtgggagactcctttagattcatagcccatggtgacgcagatgtgatggtggctgggggcacagactcttgcattagtccattatctctcgctgggttttccagagcccgggctctgagctcaaacccagatcctaagctagcctgccggccgtttcatccagagagagatggttttgtcatgggtgagggagctgctgtgctggtgctggaagaacatgagcatgctgttcagagaggagctcggatctacgcagaaattttgggttatggactctcgggtgatgccggtcacataactgcccccgatcccgaaggagaaggtgctttaaggtaaagaacggttgttctgttcaaaatatattttcctcttaagatactatattaaggcactattggaacttcaaattaaaaaaacattacctggtcttggtgtatagtatatattctcttagatcaaaggctttttaaaaattctttgcttgaaatgattgaaaacatttgaaaatatttaaacaaaaattgaatggactttagttagagccaatagagttgtgtctttgctagcttcttataccccaccttctgtttggaaatcatgagtgtgctcccttcctcagcctccctctgaacacttatcagacctggagaatagagatagatgtgtctaggtatattctgttcttttcaaatcttttcaaagcagcatttcttagcccttaatcacccaggagtcttgttaacatgccagttctgactgcggatctagattgatgcttaagactctacatttctaactagctccagtctaaagaccacactttgaaaaaaagtccttgattatatgatgccatctaagcttaaactgtattatgttttatccaattaaatcagccagaagtttagcaggctttcctataaagggacaaaaactagctacttttagctttgtggatcatagggtctttgctgtgacactgatcttatacaagctactcagatgaacaatctcctgttattaaactttatttgataattttcttctcttaccagatgcatggctgctgctgtaaaagatgcaggcgtatcacctgagcagatatcctatgtcaacgcacatgccacttccacaccactgggtgatgccgctgagaacagagccatcaagaggctctttagggaccatgcttgtgcccttgccatatcctccacaaagggagccactgggcatcttctgggtgctgcaggggcagttgaggcaacttttactgcactggcttgttaccaccagaaactcccaccaactttaaacctggattgtacagagcctgaatttgatctcaattatgttccactggagtcacaggaatggaaagctgagggtcggtgtattggactcaccaattcctttgggtttggtggtactaatgcaactctttgtattgctggcatgtaaacactggcttttaatggtcataaatttataaatattatatatgtagatatgtcttatatcaatatccaatgactttagcacaattggtatttgtatagttctttggtagggaacagggtgcccagtacttgttattttatagcatcttggtgtctccattgagatttcagtggcaactagtgacaaccagaaatgtctatggaggacagaataacctgcacacagaaccattgatttatgtttttctagtgcacgatttcatccatcatggtccttttcagatatttatttagagaccagcttctctgagcaaggctgtgctgctccatggtgtaactaactctagggtcaccactgttgtacagcatataaacaggactacaatacaagtactcctatttgtatcaccactcagcatccctttaggacagctgtcagccagtgattcacccctgacccatgtagtgtccttggtggaatttccccaagctcccaagatttcagttctctgaaggaggaagtaaaacaggatttcctttttcttgcctgttcttgaccgacctccctcccttccttccttcctttctttccttcctttcttcgtcatctttttttcgccttctttgagacatggttactcaggtaaccctagctgtcttggaactcactctatagaccctggctgaccttgatctctatagggatttgcctgcctctgcctcctaagtgctgcaattaaaggtgtacaccagcatagcctggctggtttggcttttctcattctagatatgtttgtgatgtggtgaatggacataaagatctttggaaaaaactcttgttaagttaggccagctcctctctaacttctaactttgtgactgtgacaatgttctccaagcttcctactactagggtagcaagttcttcagaggtgacagccatccaggaaagcatttggtaggcagggcttttatctcttctgagtaagtgttttcatgtctatgcaggtccacaatgatatggagcttcagtcaagtgcctacatttcctgggctcagtaacacctttaatggctttctgtccttgtactgtttaatgatttttattccaattccatgacaaactgccttttggcctctgctttcttagtggcacacacacacacacacacacacacacacagtgtgagagaaagggagatagtaaaaaaggagataaatggctatatgcctatgtgcctttctgcagaatggggagcagtctcacattttacttaaaactttttgttcttgttttagtttttttaaaaaaataatgtgtatgagtgttttccctgaggagcagaagatggcctagtcagccatcattgggaaagaaaggccccttggtcgtgcaaactttatatgcctcagtatgggggaatgctaaggccaagaagtgggagtgggtgggtaggggagtaggggaggagggtatgggggacttttgggatagcattggaaatgtaaatgaagaaaatacctaattaaaaaaagagctaaaaaaaaggcaaaaacaatgagaggattgttgtgtatactgtacatgcatccttgggaagagcactagctaataatgcaatcagcacatacaatggtgagcctctccctacggtaaatgtcatttaaacattgtcaacaattatatctcctttcaaaactgttgcctgtaaaatgattgaaaagcactaagtagactatatcagaatgggaatgaaatctagacagtgtgattcttttcaagctgtggtcacacagttaaggggaaacaaagctgggaaagaaaaattattaattttaaaattcactatttgaatgtaacaatattgtatgaactcaaaaatgtactttaaaaggaagaaattgtttttaatgtgtaattcatggttggtgaatgaaatttttatttttggtacaataatataaatgaaaataaaaatgttgtaagataaacaacaaaaaaagtcttcatcagctgattctgccagctgtgtttgagattctcccttctgctatacatcatgcacagcagttttccttttgattctttaactggcagagaaaatgaaaccaatcaaaacccctagatggccaggtgtggtggtgcacgcctttaatcccagcacttgggaggcagaggcaggcagatttctgagttcgaggccagcctggtctacaaagtgagttccaggacagccagggctacacagagaaaccctgcctcaaaaaatttaaaaaaaaaattaaaaaaaaaaaaacaacaacaaccctagatggtaatgtcagtcaccttgaccatcatcttggtaggtcttggtggtctcccaggtggcaaaacccaagattttattcctgagcaatgtgagccattggtgttagtcatctgtttcacacataagtgtgggggccagagtttagattcccagtatccatgtacataccaggcaaccgttgcctgcgtgtaatttgagcatgtggttacaaacacttcagtttgagaccctgcctattcagttctttttaagtgttcgttggtcacagatactgaacctgtgtgacagttctgaggttctgccttgtgtatgtgtcataagacactagaatgcagacttgagggacttccacaagctatgcaagtaacccgtggatattgttagatccatttctgccacttttgttagccagatgcatcttgtgtgtgctttggaatagctagtgactaagacttgttaatgtaaattggcagccatttgcatctgtgctatgcaggtgcttctggggagtgagtatacatgtggcccataaggcttcactcttaatatggttcttacaagtccactcatatgcccctaattgaaatatttctctcttgttccagtccatgcttcctagactactaaccaaaagccaggccatgtatgtatatatttcactttgaggctaccaaagagcggtggttaaatgagaaatgtacctcataggcctatgtatttggacacctggtctccagctggtggtgctgttgagctatgaaacctttaggagggatagccttgctggaggaagcatgccactgggagtgggctttgagagtttatagcttgccgcatttccactctactctctcgttttctatgagggactgaatctcacaaccttctgcaccagctgttttgagggaagaggaaggaaggacgggagtaagtcgtgggttagttgcccaggaggccctgctcttctcagagttcaataaggaaccaaatgcccaggaatgatgtaagtaaagacacagaagagatgaaaacaggcagaaagtaccattaggaaagatagtgtctcagagccagaggaccatcaagtagactgggctggtcttttactggatcttggttcttcccccacctttttgttaaatccccattttttcttaacttcttcctcctctttcattacttcttctcaacctagatggcccttggtccagggagattaaaccctgggaggaaacatcccagcttcagagtcctgatattacttctcttgattgttcagctgcttatgtgggaattttatctctttccctatgacctcttccctgattgcctattcatgttaagttctcatacatccacctggtgccacagttctctgtcaatatagtcatcccctttggaaccataagccaaagcaaactcttccttccttccatctttttcattccttccttcccttccttcccttccttcccttccttcccttcctcccttcctcccttcctccctccctccctccctccctccctttctctctctctctctctctctctctctctctctctctctctctctctctctctcttttctttctttgccatggtgttattatcagaacaacaaaagtaaccaatacacagtgtcaccagtgcagccttgcctgcttgcgtaatctcctccccctcccaccttggccacttccagttcattctcagcatcacagcaatgcagctgccattcttttcaacgtgacttccagcaagaactatttaggaagtaaaatcaggattcaacaatttccttctgatccaaataccctgtttcgtgtttcattttgttttgttgtttccttctgtgttcctatccctgctatcttagtttgttttctgttgctgtgttaaacacaacaagcaactttcagaggaaacaatttattttagcttataccttacagttcatcatgaagtcagtgtaggaactcaaggcagggactgaagcagaggccatgaaggagtgccagttactagatcattccccatggcttgtttagattgctttcttatatgatacaggcttcaaccacccaggagtgggactacccacagtgggctgactcctccctcccacattaatcattactcaaaaaatacttccccagacttgactattggctaatctcttggtggcattttcccaattgttgttcccttttcccagaaaatcctccttgtgtcaaagtgacaaaaactaaccagcatgcctgaagtcatttctacggcatataacagtatctggcccagaatttggtgatggttggtgttatcagctgtatggactttagaatcacctgggaaaggcatctcaatgaagaaatatttgggttaggtcggcctgtgtagatgtttctgggggttatcttgattaccttatctgaggtgggaatatctgcttacttactgaggacagtggggagctgtgcctcttgtgcctgctcccccaaatgctgatggtctgatcaagtacacatagtagttacatgcttcattaacattgttgtctccattttatggataaagcatccaaaggccctttacattttggtattttgagacagggtccatgccatgtggcccaggctggtcttaatttccaagttccaggcttatagatgtgcactttagagaccagtttaggaatctgaaagttcaatggattggtaacaggacaggagctcaaagggaccttatgggcatcaaagagcaaactcttgacatcagaaacataagacccgcttgaagagtaaacttgagtctccccactaagagtggccttatactcacagggaggagcagagctttcctagaccctgttctgaattgaatgaaataactgaagaaatacattgtgtttcacatgttttcacttaataaaaatcaaagtatggctattttgtttttgcagatactgatggttatattagaatttgtaaaccatgttagccaaatcccagccctcacattaaagagatacatagatagaggtatttgatagtccctggatttaataatacatgtttttaattataattaaaaaaaactaccataaaaccttaaagaaaaaacccattgtttacagattaaaaatataggtttttatacattaatttatgtatatttgcatacatgtaaaaataagctttaaaagagaagttagcacagcgcggaagctgtatcacctctacaccccacccctcctcaccatgcacagtggaatggatggggatcacaggtgggactgaaatactcatgctttgtatagccattctattttttctctcaatatattttaaatgtcttttagttgaaagcaagagaagaaagtttggctagaaacagattcagatggagaaagaattggaaatttctaattactgatctaagctaacacattgctgaaaccattgtgtcagattttcattgaataatggctaatgagaattgccttcatgtctgtgctgtttggttctgctgtggccatcccctgttaatgatagacttgtggggagtggctcaccacaaaggctacttgctgttcaaagtggcatcctgagatgagaggaagactcagtagatctggatctaagttcctagtctaggccctaaagtgaatttaatagtgcctgtacaacaagctaggcaaagtggtacctgcctgtaatttcagcactggagaggctgaggaggggagaatgttgtgaatctgaagtatcaagagttactagagcattcctggccattctgggctacagagtggaaccctcccaaaacagctataataaaataatagtaaatgataatgtatctaacagtggtctctaagctctagtaaggctggctaatggagcatagctagttcttctcagggacatttctatattcgggaaattggttgttaggttcacaaaatgtttttatattgttaatatctatataaacatcatcatcattatcatcaggcatgtttattctgttatcgttgggattcattggggatttgtacatgagaatggtttgctacagtataaagtgccttatctagtcttcaagaaaattgtcctgaaataatcagcatgaagcattgaaacaataacaaagcaacttggagaattcttcctgaaaagacgaaaggtggggagctccctttccagcagggctgtgagtgattctttctccctgatattttgtttttaaatgcttattcacagattatgcttaggtcactggtatgggaccctttgcacacaggcctggtttgcatgcatgcttgagatgagcagggtttgcatgctcatggtttgcacagcccattgccctgcatctccttttttttctccttacaagggttactttggaaattgtcttttggtctaaagcaagagagaggtatttgattgaaaatgcattcaaaaaagcaattaggatattttaataactaagtgctgttcttacattgccattcagagagagaaatgtaaaacagcataatgcagagatcctggaaggaatcccccagacaagcccgtgctggtgctgcataataagtagaacggcactgggggagaacacagagaattcttccatcatcagcatcctgcaggcacaatagtgagacggctctggagaagtgtggggctctggggaccctttagaggcagaactttcctagagaaagtggctgactaagaaggcaagaagccttgaggattgcagcccaggctcacttccagtcctaaccttcttcctttgtgatctactcagatgtgagcgatcattatcccacagtcagcagctgcacttgccaccatgccccctctggtattgtgtagtaacattatcacagaaatggcaaaggcagttaatacaagaatgtccctgtaataaattctcttccgtcatttctgaattctttcacttttaaaccgtaacactgagtctcttggaggacctcattttgtgcaaatcttcccttgaattcttgtattattaaggatggaagatagttgggataatacataaaaagaaatagtaccacaaagttctactttgtctctccagcttctttctttctttctttctttctttctttctttctttctttctttctttctttctttctttctttctttctttctttttctttctttctttttttcttccttccttccttccttccttccttcctcccccctctttctttcttttttctttctttctttctctctctttttcttccttccttccttccttttttccttctttcctcctcttcttcttcttcctcctccccccccttctccatcgccctcctaagaattttctcccatagggtactccctttgtcttcccaactctgagatgacatttcaatgggagattctaaagagcaactccagtcacattttctgtaactaatctaaacatagatgataaaaaaatgtatcatttatcttgtcaatctgcctcatatcagcttgatttgcattcctttatgaaacaggtgcagaaagcagcagagaagttctttattgatgacaagagcagcaccatccatttatgtatgtactgtgagtatctctcttgagccagggtatttgtcacagaagcttggttaccaagccaacattttctatagcctacttttaaaaataaagatttattttatgtgtgtgacacatatgtctctctgtatgcatgcacatatacatgttctagttggtgaccaggaggccaatagagggcatcagatccccagagctggagttacaggtgtttgggggctcctgccatgagtgctgggaacagaactctggtcatttgtaagagattcaagctcttctcactgctgagccatctttcctgcctactatctgccttttgtagaatatgttgccaattctcactctagatggcaagtagactcatttaagatagtaagttcaattcttacacaatatctaatagcacacgaatgctgctttgctataaaacactgtctcacctggactaatgaggtaactaaaggcaggaagtctgaaagcctctgtcaggcatgttagtcactcaagaagtgtctgccttacctatttcatcctgcttcaaggctggcagcacagaggttggtcatggtcctgaaccttgaactccaagaggaccagagcctcatagtgagattaccagttgagggcagtgacacaggtcgtcgaggctgcacccagaaacagaagcagcatcctgagtgacccctaaggacttctatggaacaccttgcagaacaggatctgagacaatgtccacaccttgaccagagctgcttaacaacacacacctctgtctcagtgctgcttgtcagagtcatttctctgaccactagatagaatctttttttataaacttcattgcttctttgtgagattcacatcatgcatcccagtcctcctcatcaaactgtcccctcgtattcatcctttgcctttgcacctcccccagaaaataacacaaatacacagacatcaacaaaaccaaagcatagaaaacatcttatcgtggaagctatagtgtgccacagtgtgtacatgtatcctacagtatatccatctgtctgcacatcttcacttgtgaatactcattgcaatgagccattggtctggttgaaattctctggcttctgtgacaccatcaacattggatcctcactggagttcctcctgtttattcagttattgcactgtatcatggagatcttgtagttttagaacaacaggactgatcctttcacacaacacaactgtttgcagataattgtgtttgattttgggttgtgccaattcagagccctggaagtgggcctgggtagtagctgcgctggttggacttaggctgtcctttatcagcaccaccaggttaagctctagatctcccaagctcatgaccccatgggcagctttcctgactgccaggggtggcaaggggcaggggaggcattatctgcatttcttccaccccatagcagataagtggcagtgtcagctctcccacactcgtgctgtcagggttggcacacccataccccacttctagaaccagctccaccatgctgccttttttttaggtgcagagcctgttcttctgagtgctcctgcaagtaagagatggggccagctctcctgattaccacatccaatgaagggcaggaccagctatgtacagcccctggaagaatggagatgtcctaaccagggatatccccatgttctccagtggtaatttgagacacagacatcaatactgacctttgttgctgaatagtcacagactcagaaatagccctcagtggcagcttgggctgggacatcaccaagacctgaggtggcagggctcataacaggctactcctctccacactgagcatccagttccatctcttcacaatgctcaagctgctccacattttctctgtcatatgaccagcacatactttcacactgtggtggcttccactgcaggctggccacatggctgaggggccctgggtgacatcctccatccttgctatacatcatggcagcaagtgggtgtctatggcccacctgtatcatagctggaggtcaggtctgtaggtggcatggtattcacaggtctctgtctgttttcttcctcctgtgatgtactgcctg

SEQ ID NO: 448 - DNA, 1745 bp, Mus musculus
gtacaaggggccgagccagtggagtagatctcgagctgtggtggctgcttgtgtcgggtagggtcccagagataattgcacagccttctttttacggtagataaaagtcttttgtggaagaaaagactccagaagaccgagcaaatttatctctgagcaagtaaaactttcgtaagctcaggaatttccacttcagatattgggcaatcttctggtcacttcctgtcatgagtcagccctttttattgttacagaagtagctgtttacatcatttgctaaagtaaataaaggaatgtgtttctgatcttctgaatttcaaccatgttgtcaaaatgcttgcaacattttctaaaagccacaatctcccatccatatccagcgtcatattcttggttaataagcaaacacagattttatggaactgtgccagcagccatgttgcgcagacgagttgtcatcacaggcattggcctagtgacaccacttggcgttgggactcaactagtttgggatcggcttctccgaggagaaagtggaattgtttctgtggttggtgatgagtacaagaatatcccttgcagtgtagctgcttatgtaccaagaggtccacatgaaggtcagtttaatgaagaaaactttgtgtccaaatcagatgccaagtccatgtcttcttccaccatcatggctgttggggcagcagagttggccctgaaagactccggctggcatccgaaacgagaagcagatcaggtggctactggcgttgccattggcatgggcatggttcctcttgaagttatttctgaaactgctttgctgtttcagaccaaaggttataataaagtcagcccattctttgtccctaagattctgatcaatatggctgcaggccaggttagcattcgctacaaactcaagggccccaatcactcagtgtccacagcctgcaccacaggtgcacatgctgtgggagactcctttagattcatagcccatggtgacgcagatgtgatggtggctgggggcacagactcttgcattagtccattatctctcgctgggttttccagagcccgggctctgagctcaaacccagatcctaagctagcctgccggccgtttcatccagagagagatggttttgtcatgggtgagggagctgctgtgctggtgctggaagaacatgagcatgctgttcagagaggagctcggatctacgcagaaattttgggttatggactctcgggtgatgccggtcacataactgcccccgatcccgaaggagaaggtgctttaagatgcatggctgctgctgtaaaagatgcaggcgtatcacctgagcagatatcctatgtcaacgcacatgccacttccacaccactgggtgatgccgctgagaacagagccatcaagaggctctttagggaccatgcttgtgcccttgccatatcctccacaaagggagccactgggcatcttctgggtgctgcaggggcagttgaggcaacttttactgcactggcttgttaccaccagaaactcccaccaactttaaacctggattgtacagagcctgaatttgatctcaattatgttccactggagtcacaggaatggaaagctgagggtcggtgtattggactcaccaattcctttgggtttggtggtactaatgcaactctttgtattgctggcatgtaaacactggcttttaatggtcataaatttataaatattatatatg

SEQ ID NO: 449 - protein, 456 aa, Mus musculus
ISTMLSKCLQHFLKATISHPYPASYSWLISKHRFYGTVPAAMLRRRVVITGIGLVTPLGVGTQLVWDRLLRGESGIVSVVGDEYKNIPCSVAAYVPRGFGQFNEENFVSKSDAKSMSSSTIMAVGAAELALKDSGWHPKREADQVATGVAIGMGMVPLEVISETALLFQTKGYNKVSPFFVPKILINMAAGQVSIRYKLKGPNHSVSTACTTGAHAVGDSFRFIAHGDADVMVAGGTDSCISPLSLAGFSRARALSSNPDPKLACRPFHPERDGFVMGEGAAVLVLEEHEHAVQRGARIYAEILGYGLSGDAGHITAPDPEGEGALRCMAAAVKDAGVSPEQISYVNAHATSTPLGDAAENRAIKRLFRDHACAISSTKGATGHLLGAAGAVEATFTACYHQKLPPTLNLDCTEPEFDLNYVPLESQEWKAEGRCIGLTNSFGFGGTNATLCIAGM

SEQ ID NO: 450 - DNA, 24458 bp, Homo sapiens
agggattggaaattaaaacaaaaacattgttctttactatatgtaatttgagaatcacagatggttgtgaaatacaaagaaaattttattctcaactctttattctgtgtattagattagggtttctcagtctcagcaccattaacatgtggggccttttctcagtggagtttccttgtgcactgcagaacattcgcattcctggcttccatgctacactgtctcacaagtgagcctctctttcttatcacttaagaaaactgaactataaaataatcctacatttatcaaagctagttttcgataaatggggcatcttttcctgacactcaatgtatttcacagggtgataaacatgtcagtaccaccaggatgatatatcctactggttcaaaactgcttgagctattttaatctattcttttcctcacagctttcagatctctacatgctgggtctttctctgggctaattttctagtttcttcctgctttcacaattgtttaaaaattcttataaaatacacatcagttctcatatagtttttgttttgttttttaaaaaacaaagtgttgctctgtcaccccggctagagtgcaatgacgccatcaaagctcattgctgcttagaactcctgggctcaacaatcctctgcctcagcctctgaagtagctaggactacaggtgagccaccacgcctggctattttttttttttattaagagatggggtctcactgtgttgccccggctgcaatccttctacctggggtgtcctaaagccctggtactacaggttggagccacttcgactggcctttgttattttgatatatgttgttaccatttaactattgatatacaatatagattttcctctttagtttctagtgagcattttttttttcttttttgagaaaggtctcacttcgccatcaaagctagaatgcagtggcatgattatgggctcaagccatcctcccacctctgccctccaagtagctgggactacaggtgtctgccaccacgcttggctaattttttaatttttttgtagagacggggtttagccatgttgcccaggctggtctcaaactcctaagctcaagcaatccgcccaccttggcctcccacagtgctggggttacaggtgtgagccaccgtgcccagtgagcaattttatttttatatcatctctggacctcacattaatctatttttctcagtaaaagtatactgcaaacaggctccagcaatgacagtcacatccagttcctcaaattctttttcttattaagtatgttgagtaaactgaccgtggttttgtgtatagactgataccaaaggcctgaccctaaagccctcaaagacttagagggctgtagggacattagacttcaaacccatcatatcctctttcctatccttggaaaagcaacgcacaaagactttcttaaactcttaatttctcagcattattccagtgtgtccactatcctttgcgctcattgtcacacccctcatctttcagaatcttgaagctgtgaggcggaggttgcagtgagtcaagatcgcgccactgcactccagcctcatcaacaagagcaaactccgtctcaaaaacgaaaatcagcaacgagccattagtaaacattcataatgaagattatgatgctaaatgtcattatttgcatgcaaaggtttccccctcatactaaacctcagcattttgggtttcactagatttaaagcagaagtgaggcttcattacaaggccacctctcttttctgactagtggggttttaaatagcctggtggctttccaggtggtaagtctcagctaatgggctctggagaacccagcctatcagttcatttatggagtcccttggcatccttgtactgtgaagagctgtaaggcctcaaagagtaaaaaaggtgagttgagaaggtgtcacagagcacgaaggtggtccccacacaggtcacaattatgtagctgtgaacaggccacatgttgcatctttcatagcatctgccacaaaataagggctcaatatattttcccttcaatttactttaaaaatcattaccattgcctaaatgaaatattactgacatggattttaaaaactgcacatgtaactaatgtctaaaattgggtcacgtgaaacctataaccttgaaactgagaatttccttttagacttcatgacaatataccaaacacttaatgcaccaggggctgaggggaacagagaacctaattaatcacggtgacctgataaatgaggtaacacccctaaagcaagtggctctcctttaacctcagttccatttccctacccccccacaccatgtcccttcagatcatttgatctgaagagttgaggtgggtacttattcaaaatgaataatcaaacttgcctcccaattcccaaaatctgcaaggtcccttagacctctagaagtgcaattttgctgacaggagaatgaaggaaattactctcatccaaggcgattacctccacgaattcttaaagggttatgttacatagtagaatccaggtattaatataaaaactgtaacttcaaaatactataatgtttcaatcaacaaaagtgggcagaaaaaaaattaaaaattttaaaacccaccacttcagaagcattatgctttagtactcggatagtctcaacatgggaagaaaacatcactttgtcagtgagtaacttctgataagtatgtggaaatgtaagccactccgctcgaaaaatgcacgcagggggaatgacacgcgcggtgcggttaccgttgtgtcccgatatctgaggccgttaaacgacgagaagagcggcagtgtctgaagcacgccttcctacctctcctccgcccggccccgcttccgggactccagttcacccgcagcaccctgactgcaggtgccaagtcacaactgcaaagaaacttccttttctcgagcgggggtgggacttggccgggtcccgaggcccctggccggcgggctcggacgttaggagcagaaccagctccaggtcccggtctgtccgggcgtcgctgccctctgaagctcaggccggacgccccagtccctggccgaacaaggtgccgcggcccacccaccccggtacccgccgtccgaccccgttgccctgcacctgaggatgttgtcagcataggtgagcagcagcttggaggcctccaaaaaggtctccggggtgttctggcagagctcagccacggccggggacgccgagcctgaggagctgcccaatgccgccgccgccatgcttgagcgccagcgggcgccgccgccgcccctcgctctccgcgtcccacactgagcaggcgcctcagcgcgcagcagctaccgcagccaccggcaggggcggggtcctcggccggcaggggcggggtcctcggccggcaggggcggggtcctcggccggcaggggcggggtcctcggccggcaggggcggggtcttcggccggcaggggcggggtcgggggcctggggcggggtcggggaccggggccaggagcgggggagctcggctgggagctacggctgccccttcgcggggggcaaggggctgttcggaagaaggtggggggcctcggccggcaggggcgaggtgcttcgacccagagttggggcctggtcgtacaggttgggaaggggttccgcagggagaggcggggcctgggctccggggctgaggggtgtgggcctggaggagggggatgtcgagtcctttaggacggaggagctcggctggaggggaggccggctttggtctagaggtatcgggcgaatggtgctggcacgtgcctctcagaaacccggatccctttgcgctccggggccagcctaattgatccagctattaaggtggagaaaccgcatgtacctccctcctttccccacaaataaaaccaccttagagccttctcttcgcagattgtcaggacgttctacatagatgtggatgaaagactacagaaggaaggagcaacaaacgtcaaaaacaaaaccatggctataaactctgctgggtttgttatatggattcttttcagaatttggctaatgactgaaaatctaagttccagctcaactagtatatgattcctctgtaaggaagtgtatttttaaaccataggttgcgacataataatgggttgtggattcggtttaccgcgtggtgaccagcgtaaaacacatgcataataattacgcaatattatagaatgtcgggggcgggaagggaataaaaatttgcatcccacacagtaagggtaagtaatattttgtgacttgttttttaggtagatcatgtgatcaaggtcttttattcctcttagaagatgcatcccttactactttaatccagtctcttccccaccatgttcttgaaagtgtactttaccagtggcttccttctttgcagaaattccttttcaacctcacgaagtatttttcttgactttatttcttaagataagtgatttgcctgaataacctcttttaaatttcttgatgtttcatctgtttacttttaagaattgaaattttcttccagaatctccgaacaagaccctaagctatgacatccagttcaatgactattcgtctcccaaatatacgtacgcttttaataaatatgtaaatctttggaccaccttccaagtatggtgtgttcaacagatagtagtatgttactaccgtctgtaactaaaattttcaggggcttaacacaagagtaatttctttctggctcatataacactttaataatgcaggtgtcataatgtcagtggacccagtctccttccataccttagaacaggggtcaagaaacattttctgtaaagggccacatagtgttttaggctttgtgagccataaggtctgtctcaactatttaactctgcctctgcagctgttgctccacagacaatacttgaaaataaatgggcatggttatgttctagtgaaattttatttacaaatccaggcagcctgcttggacaaaaaaaaaaaaaaaaaaaaaaaagtcacacctacttttaaccacatgagcccagaaatgacacacagcattttctctaccatatcattactaagaatgaggcctcatcaagataaaagggggtatttcagtaaggccagatttacaaaaaataaaaaaaaaatttaaaaacacataaaaagataaaaggggagagtctgggaaatgtagtctcgtccaactacacaatggattgggggcttgggtctggagatatagctatcacaaactttattcctcttaatttgggtttctttttccattgatacatttatttatcctttactaattatatgagaatagtatatattatacagtacttgtaacttttaaaaatgcaacagaactttttttttttttttcaaataaaattttaggggctggacatggtggctcacgcctgtaatcccaatactttgggaggccgaggtaggtggatcgcttgagcccaggagttcaagaccagcctgggcaacatggcaagaccccatctctacaaaaaaaaacaaaaacaaaaacataggaagattgtctatatacaaaacaccaaagtggaaatgctctggtattgaagcagaggtgtcaagtgaagggcagaaagctgtcagctaaggctttcccctgacagatagaatggtcatagggtacttttgtgggggaacaaaatgacttttgtttttctcttcataatagtttgtttcctcaactaaaacgctatctcactgtaagttatcattagttttgtcttccctatttgattaaaagtctcttgtgccatctgtctcagactgctttgcacacagcaggtactgaatagagttgttggttaatcactcaatgtagtcacacaatagtgaatcactatacaaattcctgaaagacttcaactcctccccttgctaatggtttttatggaggttaactttttaatatcaccaaaccaatcgtggggaaaatttacagagttctttcttttttgttttattaaagaatagtgttagccaggcgtgttagtgcacacctggagtcccagctacttgggaggctgagaggcaggagaatcgcttgaacccaggaggcagaggttgcagtgagctgaggttgccctactgcactccagcctgggtgacagagcgggactctacctcaaaaaaaaaaaagaatagcgccatgatatgtcaactctaaaaatgatgtttttaataaaggtgaaatcctggggaaaaaaaaaatctttattttggaacaaaaataaataaataaaagaacaagaatttcaatgctgatttagtacccattctttggttgtttgaaacaacgatgggtataaaagttagggtagcttattcagcttttctaaaggaaatggaagaattagaatatctccaacttgactgaagtgggggaagcagccaggaaaatgagagaccaagtccctttatataatggattcccttaatagctttataaatggcaatattcaaaagagattacagttactcaagaactttaacagaagtgttgctaaagagttatttggaaggacttaaatttcagatgatttttttaaaatggtgatttccatgattttatggactgtacattgttatcacaatattaatgctatggcattggttttcgcaaaagtcatttggtgagaaatgcacaaaaagtgcatgtgtactatcaaatgtaaggataaatgttgatttattcattccataattcattcattcatcatgtatttatgaagtgactactagttgctcagcactgtgaaggagacaagtatggtccctactttcatagaagtcataagtttagagcagtggttggacaagcaacagcagcatcagcaggaaacttgtcagaaaaacaaattctgaagctccacatttaaaggtgggacccagcaatctgtgtggtaacaagcccttcaggtgattttgattaacagtaaactttgagaactactagtttagagggaggaaaatttcactgtgggctgcagtttcagtgaggggggacaacttgaacagaagccttaaattgagaggttgagaaggtgagaaaggagaggacttgctacctgtgagagactccccaccctccttaaatcatgtacaatatcctagtaacgtttccttctcaacatctcctggatctctccttgccattgccttcagagcctcgtgtttcatccattcttaactttcttccctgtgtccatttccacatccttccaacccaccctgctcatttgtgcaatagtgatctttctaaagcacccatctgatcatgttgttctcctggtaaaaagttttctatggctccctctatccacattctaaagtcaaatggtgtcaggaaccaggctggtaagttaaatattttaagtggctttgttcaagacaaagaggagtaagagagactccagtgaagggaatgagagagtttaccatgtcctttctagaggagtttagaatcaataaaagaatgttgcactccaaattataccatgaaggctagcatatggtctctgaactacgggattaaatccaaagtcctcagtatgataccccaggcttttgtgatctgggccctgccttactctcatgcgtttactgttgctttgtcccacacttcaaatttgacatgggccacatatttagctgtttgtggaagataccatgacacttcatttctccaggcctttgttctcctcctgccaggatgccctttcccacccaatttactagacaaacattcatttccaagatgcagttcaaggatcatttctctgaagccttttctgactttacgaggtagcacagacctcattgtcccttttgtgttataataattccactatagcacctgtttcaacagtttgcacttacttgtttctatgggtgtctccctttactagaccataaacttcttgaaagcaagagccatacctctactcatttttgcattcaaacttcaagcattgataggaagaaaatgagtggttgttgaaaatagcaaaagcacagagatgagaaaagttagggtcaatcaagacatgtatagtgagaaaatcagtttgctgggtggcaagctcatttaatagagaatgggagccataattggaaagatagttttgaatcagattacaaagaatttaaggcaaacctaggaagtcttaataggagggtaggataagcagagcccatttgaagattttggtgcaagaagacacgatggaattgtagcaggaaatatggtaccaaatatgtaaagccattaaatatcataaaatttcccacccttttccagatcaaagaaaaggtgataagaggtagatacaaaaatgatggtctttttatttttctgaaagattttgtcacctcttagccaagacgattttgtgatattacaaaagaaatagcacattaaaactgtatgtttcatatgagttcagcttcagagaaaatattgtaggtattttcacactattattttaaagacagcaatgaaaagagatcaagtttaggtacttactcatcaagtgttactttataaccacatgtgtttgttttaattcttcaagaaactctactttgtcactgaatgaggatcaactagaggtgactggttaggcctgggacgaaggtcaaactgagctttgctgaattattttaaacaaaatagatttccaaactcatttaaatccaggaccaacctggaaagctaagcttgactcacattcttctgtaggggtaggaaagaatgcagagcactctacttggaaacaatggcttcaagaggcattgcccagaaaaaaccataaatatgactagaaggtccagatgaagattctatgctcaaccatttttctaaagaagagcaaggacaaaactcacgcctgggatagcatgtgaaaaacagatgttcgatgaataccatcttgtcgacttcttgcttttttacattttcatgttatattttccctttatcggtttgcagtcagctctaagcaaacagttaatgaatttttcacacttagaaacaaatgtctccattgtgacaatggagacaatttttgagcactgtctcaaatctggtgataatttttttttaagtgaaaggaagtttattaggaaagtaaaggaacaaagaatgactactccataggcagaacagcctggtgacaacttttaaaaagtaaaaactttattacaaaaacatttgtttattgtagaaaagctttattaaataaagctaagcaaaaataaggagggaaagatcacaatcagtatacatcttgcagacctttaaagaattatttttgaaaaaacggatatatactgttttgtaactatgtctcctaacaaatagtcgcaacatctcattaataaatattcacctgcagaattattttaaacggctgcatggcatttggatgtaccacaagatacacaacaaatttcctgatgttggccattttggttaattccactttactcacaattactaataacgttgcgagctatagcaataactttgaaactgcagagaatttccttaattctttcttacaattccagtagaatacgatggtgtcccttctccgacaaaagggaatatttgggcattatcactgccaaagaaaaatgcctttttgatgggtgaaaatgctacctcatcgcgttattggcaggtcctcgattatcggcgagtcactgaggttccgagaggggcgtctctgctcacgcaaacagctacccagccgcctcccacggtctgacctcagccaaggtgacgcggcttaaagtcaaccggcggaaagagagtcgaacgggacgcgtgcgtgggaaagcgcatgagcgtacgtgcgagcgcgcatgagcgtacgtgcgtgtgcgcgtgcgctcgagagcgtcatcgcccccgactgtggagaagtgtccggggtagccccgttacaggtatcgctggctaccctcctccttcgcccctcctttcctcctttacattcaaatcaagtcggggttgaatttcgagaggggagtccgaggacctggggcctgatttctttttctctcgccatgcttcttcgggctgtgtacatgtgtggtggtgcctgagaggcgatacagggaatggctacactcttttactcccgcccctggccttcgtagtacccttgaagtgatccactagtcgtaacccctccttccaccaatgattcaattggagaagtttagaggagtggaaagacttgtccccttcccccatcgcaagcttggtcacagagtgtattgccaacccatgtatccagacgctcagtctagggctcttggccctgggtagcgttttgaaaaggctggttatccttaagtactgaagattgataaagcccacttacttacttaaaagaatatgccctgaaatgtgttttctgtgccactgacaccagaaatgctatttagaagaagttatcagtaatcctgacaaaggatgcttcctgcagctcaaatcaggctggaggtgcctttatatttttcattgaattactgttttggtgactcgaatgaatcatcaattcatttatttgtcttcaaatgtctgacggcacttaaggtctaaaaaagaaggtaagtttaaacagatagtttgatgttaaggtataaattgaaagtatgtaacattttccctgtgttcattagcagctcatatcaagcacccaaaggaacaccttggatgtttttccttaggcccttaagctatttaaaagaatacctcctaggtgtgttgtggtcttttacaggaatgtgtttctgatcatctgaatcttaatcatgtccaactgcctgcaaaatttcctgaaaattacaagcactcgtcttctatgttcaagattatgccaacagttaagaagtaaaaggaagtttttcggaactgtgccaatatccagattgcataggcgagttgtcattacaggcattggcttagtgactcctcttggtgttggaactcacctggtttgggatcgtcttatcggaggagagagtggaattgtttcactggttggtgaagagtataagagtatcccttgcagtgttgctgcttatgtgccaagaggtagtgatgaaggtcagttcaatgaacaaaactttgtgtccaaatcagatatcaagtccatgtcttctcccaccatcatggccattggggctgcagaattagccatgaaggattctggctggcatcctcagtcagaagctgatcaagtggctactggtgttgcaattggcatgggaatgattcctcttgaagttgtttctgaaactgctttgaattttcagacaaaaggttacaataaagttagcccattttttgtccctaagattctggtcaatatggcagcaggccaggtcagcattcgatataaactcaagggcccaaatcatgcagtatccacagcctgtaccacaggagctcatgctgtgggagactcatttagatttatagcccatggtgatgctgatgtgatggtggctggaggtacagattcttgtattagccctttatctcttgctgggttttccagagcccgggctctgagcacaaactcagatcccaagttggcatgtcgaccatttcatccaaagagagatggttttgtaatgggagaaggtgcagctgtgctggtgctggaagaatatgaacatgctgttcaaagaagagcccggatctatgcagaagttttgggctatggactctcaggtgatgctggtcacataactgcccctgatcctgaaggagaaggtgccttaaggtaaagatgggttatttccttcgaaatatttcttcaaataagacactttattgggaatcccaaattagggaagttgtagtgtctggccttggtgtacagtatctctgttgtttttcttttttagactaaacaagattgtttagttctttgcttaagacatttgaagtatttcaaagcatttgaacatacttacaaaaattgcatttgagttaaaaaccaatggagttgtggaaaagaccatgtgtgtctttgccaacttttcacgcctgcatttgtgcttaagcatcagtgtgctccctcacaaagtcctcctctttgacccttcatcagacttggaaagtaaagtcaacccttctagatgtgtctggttttgctccatttcaacaggattctgttcttttcaaatcagcacttctcaaactataatcacctagggatcttatttaaaatgctaattctgattctgtaggtctagggtggtgcttgagattctgttttgttttgtttttttagagacagggtctctctgtattgcccatgctggtcttatctcactgcagtctctaactcctgggctcaagcaatcctctcacctcagcttcctgagtagctgggactacaggaatgcgccactgagaccagttttcttttttttgaatttgtttgtagagatggggtttcactttatttcccaggctgagagattctgtagttctaacaggtgatggtgatactgctggtttaaggactacatttaagttaactgttatagattagtgcatttaaaatgcaaaaaaataaaaataaaaagtccctgataatgtgttaatagatagctaatagtttagctttcttaaatcatattatgttttactcagttaaattagccagagttagcaaccttttctgtaatgggaaaaatatagtaaatatttttggctttgtgggccatggagtctgttgcaactaatcaactctgccattgtcatgtgaaagcagccgtagacagtatgtaaatgtgtgggcatgaatgtgttccaatgaaactatttacaaaaataggcatctagccagggccatagtttacctacccctaaattatacatttgaattttattttatttgtttttgtttgtttgtttttcttttttctttcttttttttttttttagtagagttggggtcttgctatgttgccagagcaagagctggtctcaaactcctggcctcaagcagtcctcctgccttggcctcccaaagtgctgggattacaggtgtgagctaccatgcctggcctacttttgaattttagtgagtagttgctggtggtaaaaatgtcaagcatagtaacaaaatagatgaagaaatggttatgttcacaggaaacctttcagcatacttcaaattatactctgagctggctgttaagaaatatatatacacacacaaacacacatacatacatgtatatttctcttaggaactaaaggaagatgacatccaaaacgttttcagaggtccttttagatataatttttactcttaagtttgtttggcttagcttgcctttgtactttttgtttagaattcttatagcctaaataaagaggattttgaaagattatttgaaacaatgaaacagtagattattgggaagtatgccaagttttgaatttaaatgtgaaagaaaaatcataattataattctcataaaaaattgccacactccaaaaatccctagaacaaaaattattctagtcttgagtcaacatggtattttttccccaaggaaaactgccaatgcaaataaatgaaattatgttttatttgagattatacaatcttgcattggcttgtgtgtttaactcttggtgatgaaccagtccaaggtagtgagtgtgactcattattcccatacagatggcatcctaactcacatggtaatccaagatagtgttccgttactagagcaagggattcttttcatccagtgtacttggatacctacatttgtttcacataagccatacagataaagagacttttgttaaaattaaacttagtcctgataaatgtcttttcttgttttattaggtgtatggctgctgctttaaaagatgcaggtgtgcagcctgaggagatatcctatatcaatgcacatgctacttccacaccattgggagatgctgctgaaaacaaagctatcaaacatctcttcaaagaccatgcatatgcccttgcagtttcctcaactaagggagcaacaggacatctgctgggagctgcaggggcagtcgaggcagcttttaccacattagcttgttattatcaaaaactaccacctactttaaacctggattgttcggaaccagaatttgatctcaactatgttccactaaaggcacaggaatggaaaactgagaaaagatttattggcctcaccaattcctttggttttggtggtactaatgcaacactttgtattgctggactgtagaacatataatttgtaattaaatactgatttttaaatgctatatgtgaagaaattatgcatttatgtattgatacccagatatactttatgttagggtttctccaccttggcactattaatatttgggtaagataattctttgttgggaaaagggggattgtactgtacattgttgggtgtttaacaccatcctgattgcttcctaatctattccaatagcactctcttccccagttgtgacaaccaaaagtgtttccagatattgccaaatgttttctggggaacaaaataaccccacccctcctgcatcccgccacctatgagaaccatggatctatattttcctaatactttaggtcaaacaattttctataacatttgacctgctcctatccctttcaactcctttttgctaggcagggttgctatactatagtactccaggcgtaccattcccatacaatatataggaaggaatataacaaagtttgcatcagcattctttgagttaaactgtcagccagtaatgatctatttactccttatacacctagccctgttttcttcatattatccatactgtaattcagtataatgaaatttctctaaactcccaagccatcagttctctgaaagaagaaactgaaattgatttgacatgtcttattctttttgtctttatgttggcacctagtgattaacggagataaaaatctttgggacgtggagcagaaattgttcatgacttgggccacgtccccttggctttcctctaactttttttaagctttgctagtttcctgtgttttcccaacatcctactataagtgttggtggttcctctacttctctgccttgttttctctaacacggagtgttcatccgccgcagcctggaagtgttggtagggggaagggaacacattccccagaggcaatactcgaccaatgagggatgacggtggctaagtgcctcagcctcctttcagaagggtatctatggttctccacagtttttcagagggtccccagtgaatcggaagtttagttacccacagcattagctagctctaatactcccttcactggcttttattttccctttcccatgctccctgattgttaatctcattcccaggaatcacctcccaaacaaactgcttgttctgaggttctgctttctgggcaactcaaactaagaacgtttatgttgtagtgggggtttatatatcaacgggatagagtgaataggggataaacagggtgtgtgtatttctgctgaaatgaatagagtttcccacattgcaatagactggacacattgcctgcccactgactttgactatagtactttatcccctttatgccaaagactccagctgtgtcttcacataactataatcagttttaattttcatgagcacacatttattcattcaactgaagtctgttgggtgctaacatagacctggctttgtactggtcaccagtgatgaagagagtatgtcagagaaagtttcctaaaggaagctgaggctgtaagggtgaacaggtcttagccaggttgaaggagaagataaagaaggaagggtgttccagtcagggaattcaatgcgggaaggtttagaagtcagaacatttgtactaaacataggtgcatataccctaagatggattaggaaataatggcaaaaaatctggaaaggtaggtcacaaataactacaagttttgttcaaggcagtaagggtaataggaagccatttaaggtttgggatggtgtgatggctttgtaatgtgtcagtttggcgaggctgaactacatttcacagcattccctttattgtatgttctcggttagggtgggccataggaaattcttgtgggagatttggaggatggaagtgaagcagcagctgttttgtagctcatgcatgttgcttaatctgctagctcatcttggtgtgagactggctgagtcttcaactgcttcacctttccctggatcctctgtcagtttccctgactcctggaccaggtgtgtgtttcgttccatgataatgaaggacctgaccttctgccccataccaccaaagtcagaggccataagaactgacagattcctttctgtcactttgtttgtggattccatcttgttactggaatttacatccatcttcccttcccaactgcctgccctgtggacttcaaactccatcatcagaagatgacaggcgaacatagctgcattacagaaactttaaccagttctcacaattgtgtaactggttacacaaactgtcaaatccctatagcagatatctatatatgtcttagtggttctatttctctgagtcaacattgactgatacatgtgaagaagaagggtttattgggggtgacataatcatattttcttttggaaacatcaccctggctgcagagtgaagaacagcttggagggaagcttgattcccataagggaatacaatcagacggtattgcaaaatgtaggtaagaaaagatggtggcctggatgaagaagaatattttgacccaagtttcttccaaaattgaaaatcatgtgtttttaaaaaatcaactttaccagggcataatttatatatcaaatacatttatatgccattttaagtgtacaggtcaattaattttgatataagtatgcacacacatggaaccaccacctcaatcaaagaacatttctgataccccaaaattccttttgcccttttgcagtcagtgcccccagctccagaaaatcactgaagagctttctgttactataggtaagatgtacttttctagaattttaaataagtggagtcatacagaatataacctttcgtgcctgccttcttataatgtttttgaggtttatccatgttattgattgtgtcagtaattcatttctcttttattgctgaattttaaaaattatctcttttttttttttgagatgacgtttcgctctgctgcccaggctggagcgcaatgacgcgatctcagctcactgcaacctctgtctcccaggttcaagcaattctcctgccttagcctcccgagtagctaggattacaggcacctgccagcacacccggctaatttttgtatatttagtagagatgggttttcaccatgttgaccaggctggtcgcaaactcctgacttcaggtgatccacccgcctcagcctcccaaagtgctgggattacagacgtgagccaccacgcccggccctaaaaattctttaatcagtatagatacccttgacttttactctttccttagtccctacttagcttattttttaactttttactgtcactgttttttaaaaaaatgaatatgtattgccttttaaacagaaaaaagacaggatttttttaaaaattatagaaccaagatagtttctaaagcaaagaattcttccgccccgaatcacaaatgtacaagggtttaacaaaggacctacacacacgcgcacacacacttttatatatattatttagattaccagaaatactgctagaaattttagaatttcctgtggtttagtgccatgagtatatgatgagttttggatccaaatatcctaaccttatccccagggtctttatatttaaggaagaaataaaacaagataaaattaataatagttgattcatatgtttgttcaggtcttcagaagcagacatcaaaacagaaatttctatgcaagaaatttgttgtgaaggatagagggtgagagcaggagaatgcagagagagccttccttcccacaactaggaaggagaggggcacaggaatgaaagaggattgggtaggaagggtgtcaatctgaagtaccattctaataaagttttggccaggctgatgggcagtttgcaatcaaaatctcttgttaaaggagttccacatctctccaggatgggcctgcattaggacccatactgcgcgtggtcattggctgtgagctgtccaggcacagcaggagatctgaactgtccatttttcatgccattgtaatctaccccttgcaccacagacatctgtttctccaagcaggttcatgggacagctctttcatggttcctgtgggcctctctttctgaggaaaaatttagatgagggtagttagtaggataaataatagcctctgaggctgcagttggtctcaggtccacaaatgctattcctcctctctctaatccactattcattctaaattccccttgccctcagctatcatctcgtcagaccttggtggctgggtggtataacccaaaccttcagtcctcaggaatgtaagcccttggcaatcataccatcaccttttcatacagtggctgctgcctgtatcatagagcactgggatcaggaggcaaggaaatgccaggagatacccacgtagatcacctagattccacatatattctccctgtcctaattgtgtgaacacaacactaccttctccagcggattagggtcaactctcactgttagtatgttgactttatggttcctgggcacaagaactccaaagtgtcctagtggcatctacatcttgttgttcaatgtaatacttgtgtctcctggcaagagtgcgtatcctttggagatcaggacttccaacttaaataatttgtttacttagcttaaataaaatcttatttagttgcagtaatacatctctgcaatgcccagaattgcaaaatagaaagtatgaaattcctcattgtgactgaatcactggaaataacagtaagtggggccattcatgttttccaactccctttgtttctgaacctacatgttcttcttattgcagacttagccccatataaaagtttttgatgtaagcatgtgctgcatcttgaggatggcaccacatccagtcagaattgtcactgagctgttgattcgggtatgcctttagaaggcagttccagcttctttgaggctggctgcttttggatgacatgatatgtgatacaaactatggaaccgtggtcatagggccatcttatttgctgtacaataggtccccctgctcagatgctatgtcataagggattccatgccggtggattatttattccataagcttgcagatagtggtgctggctgaggctctgtgggtaggaaaggcaaacccacatctgaaataggtatctatctatacctatgaagatgaaccacaggtacttttgaggtaggttggacactcagaggcaacagtagggagatatcttggtaagtggaagtccatattttgagcccacaggtagccttcgtttctgccactgtaacctcttgattcacaggcctttcatgtaagttatatggcagccaatgacaaaggctggctactgtcaattggcaaattcattttgtctacttggctatttagtccctctactgtgatggatactttctggtaggtataattgtgtgatgcagaaatctttatccttcatcatctgtatgtccatccacatgcctctactaaagatactgttctgctctttcagaccttttccttctagacccctgactaaaggccaggcctttggacactacccaggaatttttatatattcttacttcttgggccacttctactgtatgaagtgagtaaccagatgaagctctgcctattgagaagatttttccttcccaacatctttcaaggctacccctgaatgtggctgtgatgcagctgccattcattttctacttgaactactgcaagacatctttaggaggtagaatcaacaggatttggtaattgataccttcaccttccccacctaattccttgcttcttaatcttccctattctccgtccccacctagacaaattccaccagagaagggatttttgctatttctttcactgccatagttcctgtgtctagaacagtacctggcacgaacttggtctcaacaaacatttgatgagtgaacaatgaatgaatctcagtaaactgctccaccaaccacgtagagctcagatcacaagactagtaagaatcatccttgatttctcccttttcctcattccctttcctaatccttcaacaaatctagccaattatattttcaaaatatgccccgagtagtcactgttctccatttctaccactgttatcctttcttctctgaactgcaagcgccaactttttggtcttcctgcttccactctccattgctttctaagtattattcattcttgtaatagctgacaaattgatctttttacaatataaatcagatcatgttatttccctgctgaaaatcttctgatggcttcccatttgactcaggttgaattcaaacaccttaccaaggtctatgagacctcacaggacctccctctctaatctcacctcatactgcttgtgttcaaactgtgctggtgtatcagcatgtgtatcctcaaaaacaccaagcttatttctgctcttgtatggaacacatttttatttatgtgaaaattatcttcctctttctatttgagtttcagtacaaatatctcttcttgagagagaccttctctagccacccattctaaagtaaccccttttcttccttcccaatccttctccatccacatcccagtggtgttgttgaacacctctttgcttttccagagtagtgcaatgggagaaatgggagattgggcttgataagcctggatctaaatcactgtcactgagcctaatttttctcatgaaaatagattcaatctgtaaaatggagtcaaacctgtttaacaatggttttgagactcaaatccagttgctcaatatactaaatataatcttcacatctctttcactattagaaattatcttttgtaaggaaaaatatacatctttagggcttttttcttttctctggtagtatataagcttcatggcagagagattttgtcaaccttgtgaacaagaatggtattcccagaaatggtattcccagaactcagcaaagtatgtggcacacacatatgtacacatatatacatacacacacaaacacatataccaacaaaaccaaaaatttttgttccaacagtaactgaaaatatctatgttataggaaggacaacaaagaggagaatttcatccatggttttagaaaagtaagagagctattgttactgtcaagagtgagtgcaaggaatggacctttagagccataactagtggaggcactaatgatcattctctgtctagttacttgagactcatgtttgatctttggtaccaaagaagaaaggatgatggttatgttggtaatttctttagaattgcttagcacgagcaacatatcttgaattctaagagactaaatacgttatcttgaacaaaactgcctctagcttaggaatcagctaatttatttttttttctgcaaagggccagatggtaaatatttttggctatgtgagccatatggtctcatttgcaacttctcaactctgcccttatagtgcaaaagcagccataggaaaaaaatacaaaaacaaatgggtatggcaggttttggccttcaagaagccagatttgcccaatgggctgtagtttttgactcttgctctaactctgcaaggaagtacattctctgaaatgtttagccggctgatttttctgtgtcagtggaatacccaaaaattttgcagtataagattagacagctgaattttggtactgtaataataacaactgtaacaacaccaccaccaccataaatagctagtgtttatgtgccaggcattgtttcaagtgcctctcttaatatcggcccatttaattatcacaagagctatgtcatttaagtaatattgttgtcctcattttatggataagaaatctgaagtgtagtgagattaaaaagctggtccagtcacacagccaaagactggcaaagcagagactgaaaactgtcttctgactccaaagagcaggtttttaacttcatgaatataccacctttccacagagcaagcactgaaatcttatagcgaggggcagagctaactctttgggaccctgttctgagttgggagaaggaatgattcaaatttgattgaccatctcattttatttctttggaaaagaagaaagatgtgatctgttttgttattgcagttactgacaaataatttaagtggataaagtctgataaccaaatcccaacctaaaaattaaaatgattcctctctagatataaatattctactcttttcaggtttatggtttgtgaatctttatttataattttttaaatattttatcacaatactttaagggaaggactctttaatttacaggtaaaaacacctgtggtatatttttacgcatataaaaatatcataggtattttatatatatagtatttataccataggtaaaagcacagatagtatataatatgtgctcatatatgctcattttaaaaatgtaaaatagtgcagaagctatgtcagtcctttctccacatccctgaccgcttgttagtaacactgtgcaacctcacagtgaactaaaatatgtgttgccattttgatctagtctaacatcagcaaacagcatataagaactttctttatcctttcattgcttaattctaccatggccaacctctgttaaaggtagtctggtagtgaataacctaccagaagatctgtttgcttttccagagtggtgcaatgggagaaatgggagagttgggcttgataagcctggatctaagtcactagcactgggcctaatttttctcacgaagatagagtcaatctgtaaaatggagtcaatatattacctgtctaacaatggtcttgagactcaaatccatttgttcaatatactaaatataatcctctgtacaaagagtagatattatatttaaagagtagtgtgttgtttttcatattaatgaattatccaggagcttgattgctaagtacagaaaaatgtattgtttttttattttatcatttgtatacatttatatcaatttattattattactactactattattatcattgtgttatccttgtgacctatttttttctttttttgagatggagtcttgctttgtcacccaggctggagtgcaatggctcagtctaggctcactgcagcctctacctcccgggttcaagcgattctcctgcctcagcctcccaagtaactgagactacaggtgcatgccaccatactcggctaatttttgtatttttagtagagatggggtttcaccatattggccaggctggtcttaaacccctgaccttgtgatccgcccacctcagcctcctaaagtgctaggattatagacgtgagccacaccgtgtgtggtgtgacctattattaaatggagaaaagctttgtccaggcaaaaagaaccatatccagactttaggaatttcccctacagtaagcagtctaaggcattgaaatattaacaaagaagcttatgaaattccttctgtagagatgaaaggttagaaagctgcctttcctggctagcttatgcccacccctttttagcagtaggggtggattagatgacctctcaaggttctttctagctatggttttgttttttgatgtctacttaaagattatgctaatattgctgatgtgaaatcctttgtacacaaggatggttgaaaacactggctcatgatctgaatctatgcctgcctggttaaaactgtatacttgaaattaacagggctcaaatgctcatgttttatacaaaccattgggtcttttttttcttctcaagaagatttttttcttagttgtcttctgttctaaagcaagagggagaaggttgataaaaatgcattcagttatagaaggaattagattattttaataactaagctcagttatattgtggttcacaaaaatgaatgaataataatgtagagtgcaaagatccaggaggtaatcccctagacgagacattgctggagcagcatattaactagaaaagagccattgttag

SEQ ID NO: 451 - DNA, 1522 bp, Homo sapiens
gtgcgcgtgcgctcgagagcgtcatcgcccccgactgtggagaagtgtccggggtagccccgttacaggaatgtgtttctgatcatctgaatcttaatcatgtccaactgcctgcaaaatttcctgaaaattacaagcactcgtcttctatgttcaagattatgccaacagttaagaagtaaaaggaagtttttcggaactgtgccaatatccagattgcataggcgagttgtcattacaggcattggcttagtgactcctcttggtgttggaactcacctggtttgggatcgtcttatcggaggagagagtggaattgtttcactggttggtgaagagtataagagtatcccttgcagtgttgctgcttatgtgccaagaggtagtgatgaaggtcagttcaatgaacaaaactttgtgtccaaatcagatatcaagtccatgtcttctcccaccatcatggccattggggctgcagaattagccatgaaggattctggctggcatcctcagtcagaagctgatcaagtggctactggtgttgcaattggcatgggaatgattcctcttgaagttgtttctgaaactgctttgaattttcagacaaaaggttacaataaagttagcccattttttgtccctaagattctggtcaatatggcagcaggccaggtcagcattcgatataaactcaagggcccaaatcatgcagtatccacagcctgtaccacaggagctcatgctgtgggagactcatttagatttatagcccatggtgatgctgatgtgatggtggctggaggtacagattcttgtattagccctttatctcttgctgggttttccagagcccgggctctgagcacaaactcagatcccaagttggcatgtcgaccatttcatccaaagagagatggttttgtaatgggagaaggtgcagctgtgctggtgctggaagaatatgaacatgctgttcaaagaagagcccggatctatgcagaagttttgggctatggactctcaggtgatgctggtcacataactgcccctgatcctgaaggagaaggtgccttaaggtgtatggctgctgctttaaaagatgcaggtgtgcagcctgaggagatatcctatatcaatgcacatgctacttccacaccattgggagatgctgctgaaaacaaagctatcaaacatctcttcaaagaccatgcatatgcccttgcagtttcctcaactaagggagcaacaggacatctgctgggagctgcaggggcagtcgaggcagcttttaccacattagcttgttattatcaaaaactaccacctactttaaacctggattgttcggaaccagaatttgatctcaactatgttccactaaaggcacaggaatggaaaactgagaaaagatttattggcctcaccaattcctttggttttggtggtactaatgcaacactttgtattgctggactgtagaacatataatttgtaattaaatactgatttttaaatgctatat

SEQ ID NO: 452 - protein, 457 aa, Homo sapiens
MSNCLQNFLKITSTRLLCSRLCQQLRSKRKFFGTVPISRLHRRVVITGIGLVTPLGVGTHLVWDRLIGGESGIVSLVGEEYKSIPCSVAAYVPRGSDEGQFNEQNFVSKSDIKSMSSPTIMAIGAAELAMKDSGWHPQSEADQVATGVAIGMGMIPLEVVSETALNFQTKGYNKVSPFFVPKILVNMAAGQVSIRYKLKGPNHAVSTACTTGAHAVGDSFRFIAHGDADVMVAGGTDSCISPLSLAGFSRARALSTNSDPKLACRPFHPKRDGFVMGEGAAVLVLEEYEHAVQRRARIYAEVLGYGLSGDAGHITAPDPEGEGALRCMAAALKDAGVQPEEISYINAHATSTPLGDAAENKAIKHLFKDHAYAVSSTKGATGHLLGAAGAVEAAFTTLACYYQKLPPTLNLDCSEPEFDLNYVPLKAQEWKTEKRFIGLTNSFGFGGTNATLCIAGL

SEQ ID NO: 453 - DNA, 1043 bp, Homo sapiens
cgcccccgactgtggagaagtgtccggggtagccccgttacaggaatgtgtttctgatcatctgaatcttaatcatgtccaactgcctgcaaaatttcctgaaaattacaagcactcgtcttctatgttcaagattatgccaacagttaagaagtaaaaggaagtttttcggaactgtgccaatatccagattgcataggcgagttgtcattacaggcattggcttagtgactcctcttggtgttggaactcacctggtttgggatcgtcttatcggaggagagagtggaattgtttcactggttggtgaagagtataagagtatcccttgcagtgttgctgcttatgtgccaagaggtagtgatgaagagcccgggctctgagcacaaactcagatcccaagttggcatgtcgaccatttcatccaaagagagatggttttgtaatgggagaaggtgcagctgtgctggtgctggaagaatatgaacatgctgttcaaagaagagcccggatctatgcagaagttttgggctatggactctcaggtgatgctggtcacataactgcccctgatcctgaaggagaaggtgccttaaggtgtatggctgctgctttaaaagatgcaggtgtgcagcctgaggagatatcctatatcaatgcacatgctacttccacaccattgggagatgctgctgaaaacaaagctatcaaacatctcttcaaagaccatgcatatgcccttgcagtttcctcaactaagggagcaacaggacatctgctgggagctgcaggggcagtcgaggcagcttttaccacattagcttgttattatcaaaaactaccacctactttaaacctggattgttcggaaccagaatttgatctcaactatgttccactaaaggcacaggaatggaaaactgagaaaagatttattggcctcaccaattcctttggttttggtggtactaatgcaacactttgtattgctggactgtagaacatataatttgtaattaaatactgatttttaaatgctatat

SEQ ID NO: 454 - protein, 182 aa, Homo sapiens
MGEGAAVLVLEEYEHAVQRRARIYAEVLGYGLSGDAGHITAPDPEGEGALRCMAAALKDAGVQPEEISYINAHATSTPLGDAAENKAIKHLFKDHAYAVSSTKGATGHLLGAAGAVEAAFTTLACYYQKLPPTLNLDCSEPEFDLNYVPLKAQEWKTEKRFIGLTNSFGFGGTNATLCIAGL

SEQ ID NO: 455 - DNA, 71850 bp, Mus musculus
  misc_feature (1)...(71850): n = A,T,C or G
tggattggttcttgcctctgaaactagccacttagcattggataaataattaattctttccaataaagagcatgaagattaattgatggtcaataaagtacaaggatgtacggttcattgtttaaagttattttttcaatattgaaatcatatcttcacttatgaggaaaagagggctgaacatgttaaatcagcactggccataaaaccccatcatctccacaaagatatgaaacacagtcaaactgagttgtaaagtcaagtgtttcatgccatctcttccagtggtcttatttcccgttggactttatctccaatgacccagaaaccttcagggtctccagaccccattttcagttccattgaaggtttctgggagcatttgtgtacgccataatacacatcccccctgagggtatggccagctgcttgtggatagatgctttgattttgagtatcccagagacaaagactcatcaaccaaaggtggtatcacaaatgattggtggcttgccctgtcttcagggcagtctctcactctgggaactatcttgtggctggttctgatggtgagctgtatttacagattactctttcagatccagatgaattttgcttacttgacacaagcccatttagggtaccagaaacccagaacgacacaaccttggaaataagacgagagtcagaaagcctcatgacccaaggtcattctccacagcattgttctgacccaggattatgagcttttgcaaagccctatccctgtgacatctgtcagcattgacttacacaaggagattgagtttatcaaacagtactgcctcttaaaatgtagcactaggctgaaaatgggactgtctaactcaaacatatctattattcagccacttgacattttacttagaatattgtgtaaggactgatggtttattcatctaggtggcaatattctgtgaatggcaggcttcacccctgattcctcatcgttatcccacactatgtagctctaaaggccataactattttaagttaaaccttagaattaatgaagagagatttactggattctttgtttgactagctctgaaaagaactccttataataagcctcagatataaaagtaaaggtcaaaatccatgtaagtaagatccactgccctttacaaaggggaaaatacatgttaatcttttgcaccttcaaccagataggtttctatggagacagaaatctgatatggagacaccccacttaatattcatgagctgtcttagagtgcagtttcttcttattgttcatggtactcataggtgtgatgctcaatccgaactttctttggaaggatgattctatacctgtgcctatactcccccgcccccgcccccgcccccgacaaaggactggagataatctgaacgctttgcaggtagtcacagtccctccaaagctcactaccaaaagcagagagtcacactaatgagctaacccattgttttccccaactgactgaaagtcatttgtattcatttattgttatattgtgtatatagtgtatactattttggaagctggtttcttcggtttttcaggacagtgatgttttctggagatatgcaagctaatacacactttttcttcaagttgtcctttaagttacatggttttttgaagatctccgagcaggtccctggattgcttttattaatttttaaagacggtaaccttgggcttacccatacacttctcacctacattctgtagggttcactggtatttccttatgatttttagcagaagtactaaaaagtcacatgtagcatttatgacatgacccagagaatatctatgttccagccccaccccacctctcatctttatatcctcacttgagacagcctctgacttccttaggaaatggttttttatctcactgggttcaacagaagtgaattctgcaacgttctttttaagcaactattctgagctctaagggggagtgcctggagtgctctttctctgtcagctctgacgctgttgaagctagtgcatgtccaatgaaacttgggggaagcacggggaagctccatagcctaaaggctttgctgtgggtcacagaaaggagataccatgtcacatgtagctctactcggctttggcctggcgcttctttccttcccttaacccaatctgactaacctacaaagcgctgacattggagcatattttaggatcgtcttggtatttactaggtaatttccagaacattttcattgtatgaatgtgccacattttcgttattcatcaatccatcatcagagcagctaggttttttccaatttctgcccatcatagatagccagaatgagcatgaatgcttcgtaaatagaacgtagaatcagttgggtgtatgcctaagtgtgatattgctggatcttgtggtagatctgttttcagctttttgataaatttagttgaaatggggacagcatagaatagctagcaccctttgtgacaatgttgtagaaatactaatataaaatgaagatgttaagacaagtcccagtacacaacttccccttgagaagatctgcttccttgggtcttcttcagcttccttgctgcgctactttatacagttgatttattatatctagtatatattatatgtatctattataaatatatgcatactcagctctagaggaccactgtagaagcacacatagatactctatttcacagataagggaagcacatttagaatacacagcttcaaaattccagaccttcccagcataggaagtgcttggacagatactttaagcctggggtggtcccagacttccaggagcctagcattactccagatgggctaacatggagccccatgccaccactataccactatgtgtgtttgtgtgtgtttgtgtgtgtgtgtgtgtgtgtgtgtgtgttgtagtatgtgtatggggggggtgagagtgggagggatgggtgtgtggttgttattaggaatcagactcaatctcctgcactgagctacttcctagatggaataagtgttctcaggggctttgtaattttgcagtcaggtctctctgcaaccttccctttcatcctcacctctccccttcatgttactcctcctctccccactgttcttcctcctctttctgatgctcacaatgtgttgcccaggctggtcttgatcacatgggctcagtcactcatcctgcctcagccacccaggtgctggaaccacaggcacaggccattatacccaccttcaaatgccctaaatttcaaaagccatgagccaaagtctgaaaccaagtaagtatgctcagaaagtgtagtaaaccactatagatgcccaccccccccaaaaaaaatctcacctaccatttttgtctttctctactcagaagatgagcctagtcctgtcaccactgtagaggccatgggacctttgagaatggcgctggcaaatgaggtggaccacatttatgcaaaagccaactttattcagagcctcagacaatttaaagttgtcatgatttcaagctatatacagtcacaaggacaagccacatatgggggaaaatctttccactgaggcaaataaacaaatagcaaagccagttataatctgaagcaaactcactcctacccactacacctggcaggagcacgagagcatgtcccaagagcaatctgtgttttgaagaaactgaggccacaagatttttattttcttggagtgttctcacaatatctcagaattctcttcattattacccacctgtttcccttcacaaagacaacctgctcaatcccctccagagaggacatgtcctagccattttacaatgtatctgaggacaatggtgttaactattcagaacctacaaaccagttgaggtttgataagcatgtatgtttctattctccagcactagagaatgaggatattggaagacacccttctctcatgagcactccacatccaagaaaatacatgagctgaaaaaaaaatgtaaaatgttatctttagtcttttgaaacatcactctatgtagttctgactgacctggaacttgctatatagagcaggctagccttgaactcacagaaacacacctgtctctgcctcccaagtgctgggattaaaggtatgtgccaccacacctgactaaaacaatatctttgaaaaaataggaacaggccttggtacacagggagtcctccctattctagctgagaggcaatattgaatattcaataatggctatgggccttcaggctcctaacagaaccaggagcatccagagtcagatcaagtggcatttactctcgatgaggagtgcaagaagaaatcatatgaagtgtccttgaagctggggagagcttggagtgctcacaggacaaggacactgggcaggagtcaagggaacaagagaaatgagtgggtgagaacatagggaaatccaatgtcaagggcagtggcttcactctaaatgcagtaagtggtcaacacagggccatggagtaacctggtcagctaattttaaacatcactcaggagccaggtcaggaaagaaagaactagaaaagtctgcacacctgctaaagggttgggcataggtagtgaagggaaggtgggtgtcaaggatttagatggttatttgcttagaatcctaaatggatggtggtcctgagaccagaagacagagaggacaccagactacaaggttctagagagtgggagatgtctgagtggtacaattgtagttctgaagtgtgactagattctaataagaatttattggtgccgggcagtggtggtgcatgcctttagccccagcacttgtgaggcaaaggcaggcagatttctgagttcaaggccagccagatctacagagtgagttccaggacagccagggctacacatagggaaaaaaaggagaaaagaaaaaaaagaaaaagaaaaagaaaaaagaagaaaaaaataatttactgataaaacagattgggggggggctatatttagcagataggccaaagttttctgcccagggatctggactgaaaatgtagactatgcaaacaagtctggagctacagcccttcagaggtataatgtcagtcattactgccatgtgtaggcctttgcctctgattgcacccaccactatttaagtgttttacttaagtaaattccctaatctctaaaataaggcaaaaatacttatgcctctattgtgaacaaagaaactacgacaatttatttctctcatgagaaaaatatttagaagttgtcagtaaagtgcaatgcgacagtgttgtggacttcaacaacgtagagcccttcctgccatttacccaccatcctcaatgacaaaagtagtagcttagactccagtcatcacatagattgttgaaagaagttaaaaagcacaatggagtaaatgccacgcccctgatctctttgaagctttttttggagttttctagagattgtttgcactactctatcacacaaaatgttggtcagaattttagaaacatccacaaaagacttacaagtatgattttctcccaggaagcatatgcacaaacaggtcttatagtatctactactccagcagaaagcaagctctgtccttagggcagaaggcaggtgcccgagcccaatgagtggccttaggttgactcattgcggggtcggtggtgaggtcatctgcgcagtctcctcagttctgagatctatacagtttttaaaaagccagttcagagttagcatcttctgtccctggccagcttacagcatgcttctctgcccaaggccagctcttaagtattctcctctggctatgatccttgagacaaacgctccttatgtccaaatgtgaaacccatgacactttgtttaactttgttccttcctggtttgtccttccctatgcctgggaactcaaaagaggcaataccagcttggtgtagaaggcagagttttaagaactaacggaagttcatcacgaagctgaacagggagcacaatcctaggatgcccgtatacatgcagaacgccgacaactgttgggcatccagctttgtttccaaggtgaacagcctggagcactttagggatcttgaggatgacacactggactcccagccctcaggagaccaagacaggaggactgtgagctagagaccagtcagggattcaccatgaaactctctcaaggttcttgatgctgagatctcatcagtgttgatggaatccggttttctacatgggtatcaaagtttaaatgtttctcaattgaacgctatgtgcaaatgtatttgggaacatcatttcaaataaaggaaaagacatggggagggagaacaagagcaactgtcctccttgagaaccctttgaggtttgctgtctgcctgcagacctaagggattagtactatcctttgagcctatttctttccacctatagagaaaggtgtacttacataataaaccatggactaacatactcctggtgattactgtgaaagccctccccagtttattgtgcaccgtgtgacgcactgtgggtcagataactctgtttctcaagcagaataactggaaactgaatagctagcttaagactcttcagtaaagcatcacctgatcgatatcacccaggtggggcagactactatgtcatttcataacaggcaatcccagtctataaccagtaactggtgccattgctttcctgttcaatgtgatttaaccagttctgctaccaccaactacagtcaccagcatccttataagagtgcccccatctgttgcgagaagaacagcattcacaagagtgtagttctgattcctgtaaaacatacaagttacactagggggctggagaggcagctcagtggtcaggagtgcttactgttcttgcagaggacctcattctaatttccagcactctctttgggaacctcacaattcccacatgaaaccccagctccaaggaaatctgactgctctgactgacacagtcaggcaccagcactcacatatgtacagatacctacacataattaagaacaatgtgtggggtggggtggaagaagaaagcaggcacaaagaggtttcaaatgagggtgagggaggaacacacatgtggcgtgaaaacagaagcaaagaaaccaggcaagattggggagcggagatggggaaggacatggggtatgaatacgaacagcataacagatgtaaagagcatacaacaataaaactggtcacttcacttactaactaaaaataataaccacaaagaaaaaaaaactggtttgaaaagacagataaggagatgagtcttttcctagtcaaaggtcacaaagagaattcaatcaaactacagggggctttcagtatgaaaccagactctgagctgtttcccatatccccagtatgtccatgttattatagagaaggacatttccgcgacactcagagaccttctgagcattgtgattttgtgtccccttggaagaaaagttgaaactttggctttcagtggtagaaagcaagaaatggcctgaatctacattgtcagtaagacaagggacagaacagatagtgtgctgggtacagccacaaaatcagagatccagtgcacatctccaagtagaagtgacaaatacagaaatggatgctctcagccaaccattgaacggagcacagggtccccaatggagaatttagagaaaggcaaggagctgaaggggtttgcagccccataggagaaacaacaatatgaaccaaccagtacccccagagttcccagagactaaaccaccaaccaaagaatacacatggagggatccatttctccagtcacttatgtagctgagaatggccttgtcagatatcaatgggaggagaggtccttggtcctgtgaaggctcaatgccccagtgtaagggaatgccagggccaggaagcaggagtgtgtgggtaggggagcaaggggaggaagaggggagggggggttctggaaggtaaaccaggaaagggaataatatttgaaatgtaaataaagaaaatatctaatttttttaaaaaaagaagctataacacatgggacttcctggaaagagagtactgaatggttaaatttaagatttaatttgagaaattttagatgaataaatgggatcagacagcaaacataagtgttggatcctctttcctggagttggatgaaaatagtcattgcttctgatgagatgttttgacgttttcagttagcagaaacatgctaactgtaatggcatgtgcatgtgttcataaagacacttgcaaataaatcaatttgttttcatcagagtatacaaacactgctaaaatgctagctgtgttcctggttcctcatggaaactgtaactcgtgactgttcggaactatgaacgttatatttttccaggttcaagtacaccaattggagagagcattcctttactaatgttgtgttttatggataggttgtgattttccaaggagtgtaattacaacccatctgtctgggtcagcctgggttacttctctggttttaactcatcttttgcttatcagcaagtcaatgtccctttacaatattgatgaaaatgtcatcactcacaaactgtgcagctggagcccacctggctttgtacatttaataaccaggcttccctagtgccagggaccatgacctggacgtacagccttgtctgaatctgccacctccatgcttgggttgtaactcacaggcagtttcttgagtggttgtttaatactcaaccctccccttcctactgtgtgtgaccctgccacttaattccatgttatggttatgatgagaacaacatgtacaaagtaatggtcttatcaccataagctgataataatcccgtccccatgaactgataatcaccacggtcctcaggtgagaaatgacaaagtctgagcaccaccacgaactcaaatgcaaacattatgacctgtgactcccacctgagagtctctgaaagttttctgagagaaacccatagcatgatgtcatgatctagaacacatatacacatgtcatgattgcatgtacacgccacacatacactcaagagaactgttcataatattcttagcaaacactcatgttctaatccagtacttatttatttaaaaagattgcaattttacagaaagtgtgttttcctttttggatcactgtttttaaatgtcagatatataaatactacttaaatgacattaaagctggaaaataatttcaaaggcagatttggaagtaaaacatgcctaagacttcccaggagcctctgatcagagtgaggctgtgcacacagagatcatgacagctgcttttgagtagggatgtccctcagactgagcacaggcacacattcagtggccacaaaacacaaagaatagcgtttagttgatctttaggtcttatgttagtcagtattgacaatacagaaactgaccagctgtgaggaacagatcagaactcaggactccaccagcattagaaagtatgaccagtgggacctagcctggaagatagccaaatctggctgttggaagccaaggtgacattcagttgatggactccacattgaagtttgaacaactagattaatgtctcagagccaattgccagactcattactagtggcttttctctggttcacactaagaaactagattattgattttaggattgtctgtgtgtgcgaggatatgttctaagatgtctaatgtttgatgcttaagttgtcaaccataagggcagtaatgagtaatcatttcctaatcacgtggaaagaggttaaaacccatgtataaaatgaacttcctggccccagcataataggcaccttttcactgtcactgtctaagccaagtacagaccattcctacctgcctgccattttccccagcaataagctgcatccacagcttaagacctttacagccctaagtctgttcttcacggcagtagaacagcaggagagcttgaagatgcagcgtcgaagctgggtcttggcacatcaggtgctactctgaagtgaggcaggcgaggttgctgggctggtggtgtttattcatctcctctcttgtttcatgtgtatgtatgtatgctctccgagtatatgcacggctccatggttcagggggctggcaaatgcatgcgtagagcgtgtgtatatgtaaagtagaacctgaacctggatagcaaaatgaactactgtatgccagaggtacacgaagtgtgcccagctgccagcagcaactgctacatgcaggtcactgactacctcgcatatctggaagacagtccggctctcagtggtcgtgatgtccaagctgtgcccagtagcagcatatatatggaacaggcctgggcagtgaatcagccttatacctgtagttaccctggaaacctgtttaaaagcaaggactctgacttggacatggccctcagtcagtccagccagcctgcacatctccctgaagaaaagccttttcctcaagtgcagtcgccaccgcactcacaaaaaaaaggtagggactctggcttctcttggtttctgtttcattttaaaatgttattgcatcagcttccttgaatctttgcatttgagcaccagagatttgaaattcaaacagcagtaagaggggttgctgaatgagtgagggctctggtgagtacagaagttaccaaacgcctgctttctctttctatgacagctacagaaagctggttgtcacggtcacgcatggcatatatgggcagagatgcatgctgtccagagtgagtgttactggcttctctgctaatatatatatacatcaagggattccctctttgggatagcgggaggaagatcccaattcagaccacaaattcacttgactcttcctactgagagcccgttctcattagctagctaaatggtctaaggctttctcattggctctgagatgttaatgggttatgatttacaaatgttcattttcattttgatgttatttactgatgcatgtagagaagatgttgataactgtgtcatgcttttagaatgtcaaagtcaaacagaaatgaaccctctttacttaggcactgctccctaaaatgtagtagacttcaaacgtgaagaataaactcattatataaaagcaagtgagatatttttcaaaatatccactattaaaataaatttaatatttattcattttaataagcatagttcttaattttctatcaaaaggacatttttccattaccaaaagatcaaagagacaaacaagtacctcacaggggacttagctgcaacttctagagagtttaaattctgtaatagatattccagaaacctctttattctaagtatgatatgtaggatctgtgaaaggaacaaaattcctgggttgctgtcatttgcaagatcatgatgcccgttagtctccaaaggcaagcttttctgtaaagttaatcttatgatataatatagtatatttaattaggtttttagaaaagttagcatttgtggttttatgttttaatgtttggtgttgtttgaggcagtctctttaatattctccctcctttactttgccccttcttttccctgtgagcctcttctttctaactagtccctgtggttgtacccctaaagcaagcgatcctattactaaaatcgccagccatgaaagcagaaagttcaaacaagagctcaacttccattgaagtatgactgtgagagccctagtctacaatgttcagtgtgaaacgttaagtctgggaggacccatgtacagagccctgagttttcagttagattcacatcatcttgaaggacctcagaacttcccgtttatcataaggagtgtgctcagaaggaacatactgttccctagtggggagacaagcatgctccccttctactcactgttgaagtgcctgaccttggaagtgaaaaacttgtcactgcctccctggtcatgccagggcatgcctgtcactgtgttgttggatctccagaaatcacaggtatctgtctcgctgtctatgtgattcataattcttaaaaattcctacagaatattttagctcattttcatctcatcttttcactatattctcttcaaccagcactggggcatatttgcttacaaaatatgaaacaggaaattctttactaattaatttgatgcatgaacggggagaaaagatgcattgtatgcatatattgatgtaatttctcaaagccatatgccattgaaaggccaaagccacctgccaaactcattaaatcaaagcaggcaaatattcttaagtgaatcattgcttaccgttacgagctctgagtaaatcccagtagcactaacgcagctgctaactgtgtgtcttaggacaaaaggtcgtagccaacatgtttatccatatcgagccactattgatttttttctgagttggaagataagcagtgtctttctaagacaaagttaagactgtacacaggtgttcaacgggacaatgcctcattttccagatggattttggtcagttttcatgaaagctataacttgtatttcttgctgctttgtaggaatataaaacttcagtgagatgcactgacaactttttcttttttaaagttccagctccattcagtgtttttgtacaaggagggaagcaggaggaaaggcaaggttcttgaagagtttacttttgctattttctttttcttaatttccactgcatgtggagatcaaagaacactttgcaagacttgggtctctccttccaccacaagggttccaggaatcgaactcaggtcactcgtctttgcagccagcacttctacctgctaggccatatcacaagcccattttctttaatggtttttaaaaagagtatttttttcatctttagttggcatttatggaggtatagagtgtacacataaccctgctttaaggcatgatggtagcagcactgcagtgggctggatggtcagcaccagagcactgccttgtaaaacaacagccagggactctagagcaacaggtgatcaaatcctgacgcagtgagaatacaaacccaggtgtcgtcttcttttcgccaaaccccatttcctataaaattacaccaattatgggaggggctgtggaagatccacactgaacagagcttaactgtatgctataataccaacccagtttccctatggagtagggaacacatttttgagactagttcttgctacacacctctcaagcgagcctcaaaatttctctctctgtgcctcaaccttacagtcatgcaccaccaaacccaatgtgaaaacacattgtatttcttacaattcagggacaaatgaaaaggaaccactgatgatccacagtaaggtatgtgaacatgacttagtctttcatgtgacacagtctcaatgcactctgttcaaaacagtcattttggccaggccagcttttggcctcacctgtttagggaggaaaaactgaagaagaggttaagtggggaaattgtagccaggatctgtgacatctcctttgtgcctgtggtttggggatggttagaagctgacatttttgtcctttttatctatgtttgggttggtcattttcatcagaaattctgattactgccaggatcttcccagcatgcctttagccactcagaaggcagcttctccatacctttcaaaggagtgttccctgggagactgcctcaatagtgcagggtgggctctttgtctgaccatttctgtatcatccatacaggaatagcgtgttcaaaaggtgctgggcagataccaggaagcatttgtctgtgggttttgctttggtttatacctggtccatcattttaacccttcagggagtcaggttcagcaatcccaggtaaaactgaatgttctggccttctgtctccatgacaagatcccatctattgtcttcttctatcgactgcatgatgcattagaaatggagattaaacagtcattttgaagtgacccacatcaagaggatagaaggtgcaccaaatcccctgaatagtaaaatctttaattagaatttcttagaccgcttttaaagttagagatctcgataaagacactctaaagtcagtgccatgttccccctaaaactttcttgacaaatgctgttgaatcctagaatcatgttgaacagcctcatgcaacacaggctgggctggaaaccaaccctgggaagccccacaaattccctggcactatcagtctttgccatgaatgttagcataagacacagctgacatttctctttttcacattcccgtctttctcttcctctcnnnnnnnnnnnnnnnnnnnnccccctccccccctctctctcattatctcttcccttctagataaacttgtttcaaccctcatgtgaatggtttccccaagaaactgttagaaattgcaggtgcctctcttcaaagatcatctttaagtgcaactatgaagctgctcatgcaagcctcaccttttaaatgtggcagtgccatccataagccattaacagacagttctccagaaaacaatgccactggtgttttaaaatacagaacacatttgctgttccaaaggctaaatgagagtgcttctcatcacccagaagcaggaatcgatccagaacagaatcacctccatgcaacttccaggcagacaaaaggatgagcaggctatgtctgcctctttcctaagaatcaaacaccaccagaggtgtgtccttcagccatctccaagtgccctgaccctgtcctggagtggtgccccttattgcaaaagcaggagccaaagggaccataagcaactgaagtcagatgtctggccatcttagggagaaatggtgctactgctaatttcctgaacacaggttcccatcccttaccttcccaaccaatgcctgtgtccccatagcagcccctgcttgcaagtgcattcggggctgagctctgtcttccacctgactgtcccagcttttaaggcccattcagctcaatgagtatctgtatttggtctcttgggcccaaagacaggcttatactgtgcctcctgcttggctttcacagcactgcctgtgtcagggttgccctgggctcttttgagaggctacatggttcagctgcccatgccctgtgcttcccttccttgcagcagattcattccaatgtggtaactttatagtggctctgcagtgttctgcttccagacaccgttgaagggttcttatcctctgtgccctccacacagattttcctggggcctaatgttcttcttctccttttttatttttcttggatattttctttatttacatttcaaatgttttcccctttccaggtctctggaaaccctctttccttattcccccaccccctgtctctatgaggggtgctcccccacccacccactcccatcctcccatccttgcattcccctatactgggacattgaacaccctcaggcccactgatgtccaacaaggccatcttctgccacatatgtggccagctccatgggtcactccatgtatattctttggttggtggtccagtcaccaggagctcggggtcagggtgtctggcctgttgacactgttgttccctccatggggctgcaaaccccctcagctccctcagtcccttctccatctcctccactggggacccccaagctcaatccaatggttggctgcaagcttcctcctaatgttcttcttatatgctgtttagtgatgcaggttccaacaggctcccctgccacaggacattcaacttggactctggctatgtgcttcttccttgccctctgtcccaggaatcacagccatctctctggggggcccaatccacttcagtcccaccccaaaatcaacattgaggtgttccagttccaccccttgccagccacatcactttgtccacagactgaactcacagcccacagacaccttcctccttccagcctcagtcctcgaactgctctcagttccttccttcagaggcaaatgacctctgtttgacacagaatcagcctgaatgggattttacttagacttaaagaaaattaagttatgaaatttgtaggaaatggatagacttggacaatgttatattaggtaaaggagcccagggtcacaaatgctgtgtgttctgtctcccgtgtggagcctaggttccctttttatacatgtgggagtgggtaaaggtcagaaagctagaaaggggctggtgaaaagaagaaaggatttgggagagcctcggggaggacactagaatgggtgtgaaatgaaagtagaaagtagaatagtgaggaagaagacagaccctatagagggcccgaggcaggggactgggtatagaaggatcagctgaaattgagtacatatgaaatcactgtaaagaaacctgctactttgaatgatgtctaaaacaaatttaactgaaaataaaatagttttgaatcatttggataaatcccctgtacaagcaaatttaaaattatctaccaaatgtatgaggccagggtttcccagtgttggcactatggatatccagagccagacaactctgtactgtggctactttcctgggtcctgcaagaggttaataggggctctggcctctgagctcagattagagtagcattcaccacataccccagctgtgcaaacctgttctgtactgctcctaagcatcacaaaaatgctatgctcccttgctttacatggtgaaatacacttccaccttcctgcagaatactacctgaagcaatgagtgttgccttgaaaaataattctaccaccctttcccctgcatgcagtgtatgattggaaaatgaacagttcacattttttaaaatgtgggggaggggggtatgtgtgtgtgcacgcacataagtgcagttacatgtgaatacaggtgcctgaggaggcctgtaggtgttggatcccatggacctggagttacaggcagttgtgatccacccagcccagatgctgaaaaatgaatgtaggctctcggtaagagcagtagctgactttaaccacagagctgtctctccaggccacagtggcccacatttttaaggctatgacttctaatcttattgcaaacagaatttctgattttaaaaagcatccatatctctaaagtgcagaaaaggaaacaattgtgggcataagtggggagtctaaagcaaaccagaggcagctgtaccatttctggtggtcctgtcttcttggtcctcatttacttggccctcctacttgctaacccatgtcttctcagcacagtgatctcgttggcatcaagagtctaaaacaagagtgtttctgaaatactagcaagaggcagacagtatgatttcatgtctgtttagtctaagattttctcagacaattttatctgctacatgataagactttcaacagacatatagttttatagttttatatgctatatgataagctatcttccacttctccatttttcttaagctacttctacccttcttattttgataaagattaaaattctgtgagttatttctttacttttaaaggaggatagccttgagcaaagttaagcaacaggcaactgagtgcactcgagctggaacacgtgggaagtggtacaggctgtggaaagctgggcagggcgctccttcgtgggaagtggggctgtctgctctgctgtgagaacttgggctgtggcaggagaccactcatctactcatgtgatgcatgaaggctggattctatatttttacagcatagttttgggttttggcttagtttatcttaatattatgagtcaaacactgtagactctgtgtgttcttttgattaaaccctgagtgaaattcatcatatcaacctattttctttcttagtgattttctcctcaaatatttctgttcttactgtagatttaaaggttatggtggctatagtggctattaagattctgaggctaccagaaagagaaaagaaaggacagccaggaatttttccatgttaagctgtaatagctgagcctttcaaacccaacactcttgagtctgaaacaggagaatcataagttcaatcctggactgccaaggaaatttaaagaaagcctgcacatattactgtgttggcttgtgacagaactggagggctggatatgtaattcggctgcatggtgcttgcctagaatgtataagaccctaagtaccacagaggaagaaaaatatgtacatacatacatacatacatacatacatgatacatacatatgtatgtgtatatacagagatatatgcatatatgtgcatatacatacaaatgcatatgaataatagcaaagtctggccctaaattaaagaaataacctaagagttctgtgtctcttcctaccctaggagttcccaagaagcctagaggccacctcacagtatgctcttctcctttctggtgttaatctctggcctgcctgccaatgcttttgacacgctattgccaaggcataaaaggttgagccttagacttaagtgtttgtgggtctcatcaccacaggctcagccagccagaaggtaaaatgacaggatgtgacactggagagtatcatggggtacatagtggctgccctgaggaaagagtctgccaagtgggagcctctggtacagttttgcagaggctgagcccatcacagcaatctataaaggtctctaaagtgattagtgactcaaggttttgctcagtaatttacatgtagtagttctgcagtttgttggagaaatgaacagatgggtggcttaattaattaatgtggtgtttatctgagggttaaagattaacatgacgaaaagctcagttcctaataccaagaattaaatgtaaaaggaatcaggattagcatgttaggaaaaggctaagccattcgaaaggcttttaattatacaaagaaataccatgagaaaatgagcttaaattaaaaatctgaacagtggtttgaagtgtacacactcaatatggaattgggaaaaatgactaagtacagtaatactttagcttctctgggagtgttagaatgcagcctcaccctgagtgcagcccacctacagttcttatgctctgagcttttacttcggcattatgaatcatagtcgacctgaattgttctctggagttagtgactagtcctctttagcagttacctgggaaacttgaagagtggttcttcacatggacagtaaaatcacaagttctcttactctaatcttaattactaatatcgatatgaattctcagatcacaaatcacactgtcaccatggtcatttgtatgggtatttatagtgtacgaagaattaaataaggcacagagttcatgcaggccttaccagaagcagaatagaggcagattcaaggacgtgcacagagtacctggaggtagctgcacaagctattaaaaaacctgttggaccccttcatgataaaagtcttggaaagatcaggaattcaaggcccatacctaaacatggtaaaagcaatctacagcaaaccagtagccaacatcaaagaaaatggagagaagctggaagcaatccaacaaaaatcaggggactaggcaatatagtacttgaagtcctagtcagaacaattaaagaaaaaaannnnnnnnnnnnnnnnnnnnnnnnnnnnnnnnnnnnnnnnnnnnnnnnnnnnnnnnnnnnnnnnnnnnnnnnnnnnnnnnnnnnnnnnnnnnnnnnnnnnnnnnnnnnnnnnnnnnnnnnnnnnnnnnnnnnnnnnnnnnnnnnnnnnnnnnnnnnnnnnnnnnnnnnnnnnnnnnnnnnnnnnnnnnnnnnnnnnnnnnnnnnnnnnnnnnnnnnnnnnnnnnnnnnnnnnnnnnnnnnnnnnnnnnnnnnnnnnnnnnnnnnnnnnnnnnnnnnnnnnnnnnnnnnnnnnnnnnnnnnnnnnnnnnnnnnnnnnnnnnnnnnnnnnnnnnnnnnnnnnnnnnnnnnnnnnnnnnnnnnnnnnnnnnnnnnnnnnnnnnnnnnnnnnnnnnnnnnnnnnnnnnnnnnnnnnnnnnnnnnnnnnnnnnnnnnnnnnnnnnnnnnnnnnnnnnnnnnnnnnnnnnnnnnnnnnnnnnnnnnnnnnnnnnnnnnnnnnnnnnnnnnnnnnnnnnnnnnnnnnnnnnnnnnnnnnnnnnnnnnnnnnnnnnnnnnnnnnnnnnnnnnnnnnnnnnnnnnnnnnnnnnnnnnnnnnnnnnnnnnnnnnnnnnnnnnnnnnnnnnnnnnnnnnnnnnnnnnnnnnnnnnnnnnnnnnnnnnnnnnnnnnnnnnnnnnnnnnnnnnnnnnnnnnnnnnnnnnnnnnnnnnnnnnnnnnnnnnnnnnnnnnnnnnnnnnnnnnnnnnnnnnnnnnnnnnnnnnnnnnnnnnnnnnnnnnnnnnnnnnnnnnnnnnnnnnnnnnnnnnnnnnnnnnnnnnnnnnnnnnnnnnnnnnnnnnnnnnnnnnnnnnnnnnnnnnnnnnnnnnnnnnnnnnnnnnnnnnnnnnnnnnnnnnnnnnnnnnnnnnnnnnnnnnnnnnnnnnnnnnnnnnnnnnnnnnnnnnnnnnnnnnnnnnnnnnnnnnnnnnnnnnnnnnnnnnnnnnnnnnnnnnnnnnnnnnnnnnnnnnnnnnnnnnnnnnnnnnnnnnnnnnnnnnnnnnnnnnnnnnnnnnnnnnnnnnnnnnnnnnnnnnnnnnnnnnnnnnnnnnnnnnnnnnnnnnnnnnnnnnnnnnnnnnnnnnnnnnnnnnnnnnnnnnnnnntcagatagggaactaatatccaatatgtataaagaactcaagaaggtggactccagaaaatcaaataacccaatttaaaaaatggggcacagagctaaacaaagaattctttttttccccattttttgttaggtaaattgctcatttacatttccaatgctataccaaaagtcccccatacccacccccccaactcccctacccacccactccccctttttggccctggcgttcccctgtactggggtatataaagtttgcaagtccaatgggcctctctttcaagtgatggccaattaggccatcttttcatacatatgcagctagagacaagagctccggagtactggttagttcatattgttgttccacctatagggttgcagttccctttagttccttgggtgctttctctagctcctccattgggggccctgtgatccattcaatagctgactgtgagcatccacttctgtgtttgctaggccccggcatagtctcacaagagacagctatatctgggtcctttcagcaaaatcttgctagtgtatgcaatggtgtcagcgtttggaagctgattatggggtggatccatggatatggcagtctctagatagtccatcctttcgtcacacttccaaattttgtctctgtaactccttccatgggtgttttgtttcctattctaagaaggggcaaagtgtccacactttggtcttcgttctcttgagtttaatgtgttcaggaaattgtatcttatatcttgggtatcctaagtttttgggctaatatccacttatcagtgagtacatattgtgagagttcctttgtgattgggttacctcactcaggatgatgccctccaggtccatccatttgcctaggaatttcataaattcattctttttaatagctgagtagtactccattgcataaatgtaccacattttctgtatccattcctctgttgagggatatctgggttctttccagcttctggctattataaataaggctgctatgaacatagtggagcatatgtccttcttacttgttgggacatcttctggatatatgcccaggagaggtattgctggatcctccagtagtactatgtccaattttctgaggaaccgccagactgatttccagagtggttgtacaagcttgcaatcccaccaacaatggaggagcgttcctctttctccacatcctcgccagcatctgctgtcacctgattttttcatcttagccattctgactggtgtgaggtggaatctcagggttgttttgatttgcatttccctgatgattaaggatattgaacattttttcaggtgcttctctgccattcgtttattccttgggtgagaattctttgttcagttctgagccccatttttaaatggggttatttgattttatgaagtccaccttcttgagttctttatacatattggatattagtcccctatctgatttgggataggtaaagatcctttcccaatctgttgttggtctttttgtcttattgacggtgtcttttgccttgcagaagctttaaattttatgaggtcccannnnnnnnnnnnnnnnnnnnnnnnnnnnnnnnnnnnnnnnnnnnnnnnnnnnnnnnntgtatttccttaatcctattagatttgaccttagtacaaggagatagtagtggatcaattcgcaatcttctacatgatgaccaccagttgtgccagcaccatttgttgaaaatgctgtcttttttccactggatgtttttagctccattgtcaaagatcaagtggccataggtgtgtgggttcatctctgggtcttcaattctgttccattggtctacttgtctgtcactatacaaagaattcttaactgaggaatattgaatggctgagaagcacctgaaaaaatgttcatcatccttaatcatcagggaaatgcaaatcaaaacaaccctgagattccatctcctaccagtcaaaatggctaagataaaaaattcaggtgacagcagatgctggtgaggatgtagagaaagaggaacactcctggattgttggtgagattgcaagcatgtacaaccactctggaaatcagtctgtgggttcctcagaaaaatggacatagtagtactggaggatccagcaatacctctcctgggcacatatccagaagatgttccaactggcaataagaacacatgctccactatgttcatagcagccttatttattatattcagaagctggaaagaacccagatatccctcaacagaggaatggatacagaaaatgtggtacatttatgcaatggagtactactcagctattaaaaagaatgaatttatgaaattcctaggcaaatggatggacctggagggcatcatcctcagtgaggtaacccaatcacaaaagaactcacacaatatgtactcactgataagtggatattagtccagaatcttagaatacccaagatataagatacaatttgcaaaacacatgaaactcaagaagaatgaagaccaaagtgtggacactttaccccttnnnnnnnnnnnnnnnnnnnnnnnnnnnnnnnnnnnnnnnnnnnnnnnnnnnnccccttcttagaattaggaacaaaacatccatggaaggagttacaaagtttggagctgagacgaaagcatggactatccagagactacctgacctggggatccatcccataatcagccaccaaacgcagacactattgcatacactagcaagatttagggaccctgatatagctgtctcttgtgaggctatgccagttcctggcaaacacagaagtggatgctcacagtcagctattgaatggaacacatggcccccagtggaggagctagagaaagtacccaaggagctaaaggggtctgcaaccctataggtggaacaacaatatgaactaaccagtacccccagagctcgtgtctatagttacatatgtagcagaagatggcgtagtcggccaccattgggaagagaggccccttcgtcttgcaaactttatatgcctcagtacagggaaatgccagggccaagaagtgggagtgcgttgttagggaagcgggcaagggagggcagcagtggaggatataggggagtttcaggatagcatttgaaatgtaaatgaagaaaatatctaataaaaaattggaaaaaaaaacctgttgggagctgctggattccagatgcagagacacaagactgcttagccaaggtacagaacattgaagagtgggcataacatcagatctgatagacttccatgcaagtaggctgtattaagcagtgagggccaaactgagcccaaaccccatggatggttgggagttctctgcctactagtcccttgatgtacatactatgtatgatgcacacatgaaggtgacagtcagattgatggggccatagacatgcaagtgtttagtgtcctcctccatatgggtctaagtgagagtgttgcattcctgttggtcaactgtatctgaaagcccttgggtcacatttttctaacacatgcctgtatcttcccaatcaaccttgatgcatttataggtggtatttttttacttttaggaataagttgtgtatcagtttatgccttgtgggttgtgctccccaggcgatagtgtctatgcacaaatgtaatgtagagtcaccgttcctctgcccttgttctccgtgtgcaaagttgcttctaaaatggtgtctcctaagagcaggacacaccctgaaagctgccattccccacactgtggagtatcatagattccaactcagcctgatttgcatatgtcacctctaggtacatctcctctctgacctgttctatatacatgctttctgtagccaccagtactagtccaaccaagcaaatagtctgctttgatgttaagaccagtccgggttgaaatatatctacacccaggtgtcccttccttcaggagcagaaacttcaattctagatctgtcaccaagattaatctattccatatcctgttactcactgtgtgtttgttaaggtgacaagaaggaccaggaattctccaacaacctgccgtattgcataattcactcaaaagaattaccctagccaggattctggtttatacccacagggaatgcactagattaaatatcaatcagaaaacaaatacaaaactcttgctttctgtatcctaagtcctatgaaaatctttttgcttaatctgtgttatctgcaacatgaatgaaacttgaaccttctgctaagtgaaagccagtcacaaaagaccaactacaattgtatcccatttgtctgaaatgtcaatagtagatgatagagagagagtagattagggtggtctggggcaaaaggggtggggaagatgggtagagtgatatggtgacatttaaagacacttgcagggtttctttgggggataattaaaatattctaaggttaataagtggtggtagttacacaagtctgtgagtatatttaaagccactgacttgtgttacctttgaattatatcatagtaaagttgttaccaaaagaaaaaacatacttaaaaagtagcattttactattgtcttagtaagggttcctattcctgcacaaacatcatgaccaagaagcaagttggggaggaaaggatttattcggcttacacttccacattgatgttcatcaccaaggaagtcaggactggaactcaagcaggtcagaatgcaggagctgatgcagaagccatggagggatgttctttactggcttgcttcccctggcttgctcagcctgctctcttatagaaccaagattaccagcccagagatggccccacccacaaggggnnnnnnnnnnnnnnnnnnnncaatctctaaccatccaatgtctgggatccaactcatgatcttctgggctcctccaagggcttgggtcacttctccagccatgccctctgtaacacacgaatcgtcctctaggatccagttacctgtactccactgctgctgctcttggtggtcatctcatggtactggcatctccaaaacaatgcatgaccccttcagtcctgggccgtcaattgcaactgaggctgcaccttcaccaatggccttccatggcctttcacaatgccgagcctcagctgctctgcgtgacctcttcatgccttcaaaaccagtaccacctggttcacccttacacattaccaagccccgctgcagcaggagtacaaccttggctatctctggaacacaacctctttgtgctttcagaaaacacttcccagaagatgtcacctcaacgatgttggtctcttcttaatcactgctaatttcttagctccagctaatcagcatcaatagttccagtaacgcaaaagtttcactttagtagttctggtatcttgttaatcacagctgattcttcagccccagctaaccagaaccacagaatcttcccaatcaaaatagcaatggccctgaaaagagtctttaattttccctctgaaatttcacaagccagacctccatcttctgcactgttctcaacattatcttccaagctcctacacaacatctgacagagctcttaacaacgaatggatcttcaagcccaaatttccaaagtccttttacagtcctccccaaaacatggtcaggttgtcacaggaataccccactctgctggtaccaatttgtcttagtcagggtttctattcctgcacaaacatcatgaccaagaagcagttggggagaaaagggtttattcagcttacacttccacattgctgttatcaccaaaggaagtcagaactggaactcaagcaggtcaggaagcagaagctgatgcagaggccatggagggatgttctttactggcttgcttccccctggcttgctcagcctgctctcttatagaaccaagattacccgcccggagatggtcccacccacaaggggcctttcccccttgatcactaattgagaaaatgccttacagttggatctcatggaggcatttcctcaactgaagctccttttcctgtgataaggcctgtatcaagttgacacaaaactagccagtacaactatattaacccattttgatatgcaaaataatatttatcaattaatcaaaggagcaaaatattaactaaaaacaaaattctcctgtcttttttgaacaaacaaatggagcctgcttccttatatattgacttgaggggctgaggatgcagctccgttgtagcatacctgttttgcagctccgggtaccatatactcaaacaaaaatacatagatatactaacaacaagagcaaatatacgtgtatgcttgatagcatgacagtgtgtagtttatagtgtgaagagtaattcacacaagcaagtgggagctggggactgcagatcaaccttgaactctccggattgttgggggccttagttggttattcataacctctaataacatttctggtattgatataagacaattgtatgcttgattcctcaggcaaacaattcaggacacatctcacatcttatatagatatccaatcccactgttatgtcacttacaagtatccatatttgacaacaaagctaatgtctgtgcactttccttatttggccacattggcagcatgtgactcatggtaataggacaccatctctgaaagcattattttctggtgaacaatggacacaggcagaacaattggtatgccatggaagtaggatgaggctacaaaatccaaagtcctccccgagtaacagactttctccagcaaggttctatctgctaaaggttccatattcttttcaaatgttgccaccaaataggaccaaatattaaatatatgaacctgtgggaaacacttttcattcaaaccaccacagcaatgctaattgagtgaggggcagaaccggctcttctcacattccgagccaggggagaaatgtttgctcttccctcaggttattttcctggtgagtagctctttgcattggtaacaggtgcttacttggttcttcaagtgcaccccagctagcatcttctctgcaatattaactgaacaatcttatttatctaaggcacaagtggaaacaatgtaatctgatggcttcctgctcctactgccatgtggcctctgtcatggtggactctctctctggaactgtaaaccaaagtaaatcttctttttcctatgttgctttttgtcagggtattttatcagagcaacagaaaagaaactaatattctggatattagctggattccagaattcacctaattaaatgggatagaaattgggaggggaaaatcttcagtggtgtcctcctgccaaagccaaagacagtcccagctgttatggtgaggtcacaagaaggataagagggaaagattaattccctgcatttttttcaactcttgctcatgtccccagacaccatatccctttgtaggcaggcaaggttcacaagtcatagtccacagttggttcctgcatctcctgtccctgaaacctgacacctgcatcagcaccaagaactcaaaagcctctactctgctggtataactgtagaaaagaggccacagcacaattctcctgacatcaatggcttttctatctaccttttcctggaagacacttgtgttaataatttggtttatttgttgtttaaaggttattctgtgctttgtagctagttgtttgtgtgccaggcacctgcatgagctcattccactctgccactggctttgcatcactcctgttaaaacaatctctattagttacttgtctgtcagtgcaaccaggtatctgacaaaagcaatttacaggagcaagggtttcttggagctcacagtttaaggattcagtctatagtggtggagaaggtatgactgcaagaatgggagacagtcattgtgtttaccaggaaactcagaaagattaaaaagatgagtccatacctcccctacccccagccccaccctgcttcatcttattcaacccatggtcagcatagctcttcctatttcagctaaaccgtcatgaaacacccagagatgtgttatatgccaagaggtgtggctcctctgttgttctaaacctagtcaaattgactgtgaaggttagccattacatcttcctactaagtgtggctggtatctgagtgtggtctccatgtacagttctcaacagtgatgtggagaaactttccatagtctttctctcacttttccttccagaacagaactagagaagcagaactggttgcttacaagattcccacagcaagaagctctgttttatttggttctatattacgtgtgccttccatactgcttagcactatgtgtactaaagaggttctgactagagtcatcaataatgagtgactgaagacaaaccattcccttccttttgtccttgctgcagggctcttccataattatttttttaaataatttactgatgaggggctggagagattgttcagccattacgaacgccaaagtttggttcccaccactctctctgggtagcacaattgcttgtagctccagttccaggggctacaagccttcatgggcacctacatacacgtgtacatactaaccccacgaacacatacacataaagttatattttttctaatctttaaaaaatgaaaataagtaaaaccataataaaacgaaataatagaatgcttgagcgactttgagtccaacaaatggacatcaatttgctagagcaaagcaagctaagaaaagctggtgtgatcgaaatcacaatcctgcctcagcctcagcctgcaaagccctccatgtgcatctgaagcaccaacactttcctattagtataagataaatcatttctaagatataaagggaaggattattttcttcgtgccttttctgctttaaaagccatcagtcaagggtgacctgttgtcccaaagggctgatgaaaatgtcataggaaaatacatagccaagtcttcttaacctgagcaatcacagttgaaactcagaaaagttccctgaacccaagaccttcctgagcaccaagaccaagggacgcttcatttctgctgcctgttcacattcacataccaacaaaccatgcacttcctttctaatgtgtttagctcatctaaaggctcatgtgtctttggcatacgtgtgggcatgtggccatgggctccacatgaacaggaagaaacaggcacaggcaggaagtaggctgttctgatgttatttttaacctgagccttctgagggagtttgatccaccaacacagaccccaagggagtcactgtggttaagttttctttcctcagtcaacagaacttggattctttctttgcattcagcaatgttggctgtgtgtccaactgccaatctgcctcaggtgcctgtgctcatctctctccagctctctggtttttcggggaaaaagcacaactccttcttggcagcagatgttaaaagagatggattgaagtctctgtttctcccctgaccctaagcgaagttcaactccttagagccgatgtcttcacctgggaagtccatgactattgtatctattgtacatgacatgatactgtttcttcaccttcctcttttgtcctttgcagggtatatccccagctatttagacaaagatgagctctgtgtagtgtgtggggacaaagccacagggtaccactatcgctgcatcacctgtgaaggctgcaaggtaagtgccagtgtcccagcacagactgcagctcagcatctgcactctcccagacaaccactggacatcaggcttacagaaagagatgtcaacattgatgacctttggcctccaggggcccagaggccctctttatttttgatgttctcaagatctgaattttccttcttcctaaatcatgtataactaaatggaagtttgcaatagtgtggtgttttgttcttgtgtttttaaaacagaaggacaactaacaaaaagaaaataaattaataacacttactttgaacattagagcataatttttaaatatccaatcaatctgctttgctgtttctcctcccattttatgtgtattgtctgaggagacgagtttgctccacagcctttctgctgtggttctgcatgtctatgcccacttctgagggttccattaggcagaatctttgaagccacttaaactcaattacgttccagaatttattcgaagtggctttcagcagagcctgtaataaatggaatcaatttgccatcagataattttgtgctctgcaaacttttctttgggagattcttgacaaaaacatactggtctattcacgtctccaaatggagtctacatctgcctacttaacaatcttaattagtaaaattaagataagcattatcttatgttttgatccatcaacctagattagaaaataaagacaaggaactcaatccagagtagtgtccaagcagccgatgctgtctgtgtaaatagggatgtattctaagccagagacagacttctatttcctgtagagtttacaataaaacttgtactgaagccaaacaaaaaaacaaaaaacaaaaacaactttccctcttctatctttcctcctcacccacctccctttccttcccttcccttccctccttcttccacctttcttcccaaacctcccagctttcttcctgcccttgcctttaagtgcttacaattcaaattcacaggttgtggggacttaatacaaacccagaaaggaacctaagagtgaaaagacactcttaatatgatgcagaagcaacttgggaaagggaaaaggtcttcaaatgtaacatcatcttcaagagtgtcaagagattaaaaaaaaaaaagctacaccccaaggtttattcaaaccaacagtgtatgtggccagaatctgtactactttagcaacagaaagatttgtgagtttttaactctgctgaggtgtgtaacttcctgcacacttaatgctgctgaggtaacttcctgcacacttaactctgctgaggtgtgtaacttcctgcacacttagcactttgtagaaagaaggttcatgtttccatataacaaactgttttcgaagaaaatgtaacaatattacagtgcttttacaacaatataagatagaaatttgaattgagagaaaacacaatgaaaagtcaaggtgactcttaactccccaagcaattctaacatttagaattctaaactttctaaaaggcatagacataaacaatttctaaactgttacattctaaaaaaatatctagtggcttaacttgcaggccacagaacattccaggaccattgaaggagtcagggcaggaatgtgaagcagaaacatggaggaaggctacttgctggcttgtccatgcttagctagctttcttatacagctcaggaccacctacccagagagtaataccacccacagtgagctaagaccccctaaatcaatgaacaaccaagacaatccctcacagatactcacaaggcaaagttatctgggcaatcccacaattgtgactcctttagttgactaagttatgtcaaggtggaagttacagctaaaaatgatggatagtaacaaagaggccctgtgtgtgtgtgtgtgtgtgtgtgtgtgtgtgtgtgtgtgtgtgtgtgtgtgtgtggtgtgatagtgttttgagacaggttttctatgggtaaccctggctgtcctggaactcagtaagctaggctggctcaagctcagagatctgcctggagtgctgagattaaaggcatgcaccaccacacctggctccataggtgtccttatgtctggttagtccatcatatgggaccattaagaaattaatctggcttttctctgagtatagaaatatttctgttataggttttaaaggcaagttctccattcatgtacaagtcaatgaaacatgcccttagtccttaagaagcctctttgtcagctcacaagatctggcggttggcttggctttggtgctggggaattaactcaaagcttcatgcatgttcagcatgttttatgccgctgagctatgcccctaacccctaaaatgatttttcacataaatgtcttatctttaattttatctccgggagttaattttcattgtttttttttaattaagagacttatcatccttacatctatctaaaggtaatatttcctcatcctatggtaaaagatgcttttccacagattagaatgatgcttaaaagtaatttggcccatgaatcagaggtaggctcagaaaagaaacagcacagcatgctgcagtgcttctattttctacaaaagcgaagtactcatgccattaaggagtacacagaatacctttgttgagatatacgatcctgtcctcattctgttacagccttgctcaccctggcctcaacgtggtcttcgtaggccaccagtgtaagggagaaagcgctcctcctcagcaactgtccatctcttccctggctggcttctcggtaaacatggcttcctcctggtaaacaagagagttgttctgcctcctcccagtgcatctagccagaaatgactgggtttcttttgtcccctattctgcctgggaccgagaacacagttagtgaagggaaagccacaagaaaacttgccttacattctggagtcaagctgtgatatggccctctgggcagattcactcattctgcacctggggaaatatggttgatgtctctctcatccagctgcttgtgtgtggttcctggacctgtaacagcatatcatgcagaggcatgcacacatgtttaagaacacaaatccccaattcatagagttttcctgttagaattttattttgaaagaaatcatatttcttttttttttaaatgacagatatgagtcttggttatatctgctttgcttaatataaggtcctactctggaccctattattgcaagaaagagctttttctgagtagggactatgcaagtgggcatgtgcccacaaccaaagccaaaaacttaaatgaaagaagaaaaatgggcaaaatctggggcaactgggacaaagggatgcagcatgaatctgctgcccatctgtgcccaccacagcaagagctcactgtcagtgtcaattcctgtcacccagaaacagtggccaaataagtcttgagaaagttgtataaattagcaaaatctagaattaaatagtgttcttcagagaagagaaagcctgttgaacccatatgcctacagatactggaggaaaagaaggttttagaaggcctcaagctcaagttatctgttcttcaagtcctgttgtttaaaaggttaagagagttggtaaaggccatcattttttttccattttctcctcctcttcctcctgttccttctcctcctctttctgcttctgcttctcttcatgctcctcttcttcttctcctctgtctcctcctcctccttctccctcttcctcttcttcttcctcaattttttttgaaattagattatttttaatacaaacatcccaaccacagtttctcctctgtctgcacattccagctcccccacagcttctttcccttcagaaaaacgggccaccaaaagaggacagctgaacaggacagaacaagctacatatagacaaaaatcctgaggctggacaagacaacccaattggagaagaaaaatcccaagaacaagtcaaagagtcatagatacacccacccccacagttaggattgccacaaaaccaccaagctaacagtcacaacatagacaaagagggcctggtacagacccatgcaagggcccatgctggctgcttcaggctctgtgagcccatgtgagccctactttgtcgattcagtgagccatgttctcctggtgtccttcatctcctctgttccctgatttgctatgggagggacttgatggagacctccaatttagattctctacctgcataatgtctggctgtgggtctctgtatctgttctcatctggccggaggaagcctctctgttgatgactagataaggcactgatctgtaagtatagcaaaatgtcattaaaaatcatttcatttcattgttttgttttgtttttccagtcatgtttagttctatgctaggtctctgaactatccattctctggttcctggccatccaggctccttctcgtggagtgggcctcaagttaaaccaaacattggttggccactcccacaagttctatgcccccatcaacccagtctgtcttccaggtaggacagattataggacaagagttggtacccaggtttctctttctgtaggctttccagaccagagactagagggtagggatgtaggtttcatacagacaccagttccacctttctatatgcaatgaactgggtggttgttgtcttcagcaatggagccttgctgtcagttttcagagtgaccctcttttcaagtatcagcctgggttgtttagggatctccataggacaccctcagtcaacagttcaaccaaacacaaccagatcttgccactggaagttttgcctgtctacaaaaagatggccagttcagactctgtatcctccattctaggagtcctcactagagtcaccctcatagattccgggatgtttccacaacactacgtttccatatctccttccaaacacttcctaatttcagctgtctctgcttgcattctttccctccatcccctaccctgacctaatccctccctctcctctccctatccaaacccagtctaacagcaaaatctattctatttcccccttcccatggagatccatgcatcccccctagagctgctttatctaacctctctgggtttgttattatattctttgtaacagctactatccatttatgactgaatatataccatgtttttctaggtcagggttatctcactcaggatgattttttttcttaatttcttccattcaccttcaaatttcatggtgtctattttttatccactgaataataatcgattgtgtaaatgtaccacattttctttatctgttcttggcttgagggatatctgggttgtttccagtttctggctattgtgaataaagctgtaatgaacacagttgagcatctttgggtatagatcatggccatcttcagagttgaagaagaattaagtgaaatctctaagtgaaataaagacatatatttagtcaccaaacaattttaaatgttcttggtgtgtgtatattcattgtacatagtaatggatttcttatagaaatattcaatcaagtatcctgcacttttaattcaggataaagtaataaatctcttcattcacttagcagaaaaattatgacactatgtaaataaaggttataccatataatgtatagaaaaattagagcaaacaccaggttgcccgctggcttcatttctttgagtaaaatacataatagtgaatatacagcagccctgtgaaacctccctcagctccttagattcacttgccaccaccatcctccatttgagggtataaagtaggaggccccagcacaggctaaggaccagaacaattgctcttattcttaggtagacaaaattccagagtcatttagtttcagaaaatatgaacctattatctcgggtctttctcatttagggcttctttagaagaaccattcagaaaagtctccatccatcttattcctgtaaatatgaaggaaagtgcatcatagacaaagtcacccgcaaccagtgccaggaatgtcgctttaagaaatgcatctatgttggcatggcaacagactgtaagtacatgttcttcattcacatgatattgtgaagtgtggagtgggagaggttttggttcaagatcaacaaagaaagcaggaatccttgtggatagaatctggctctcacacaccctccctccccacattcagtcttgccataggtgaaaatcattggctttcttcctcctaacttatcaattcccaacttccaaagcatccagatgatatgagaaggggtagttagatcatcctgtgtgggtttgaagcatgtagcttggtcacttctcacacacaggctccacatgctgagagtcttagagaccagtccttgtgttttcaaaagcagaaataaattaacttggtagacatctttgagatggagtactgcagaaaacatcatgcttaagaacttttgaagaattcaagtttaaggttcccacatgagtcatattgctgttgatagcttgttgtatttttatccaaaatagattttttaactggaactcaattttctcagtgccatagcacatagcactgagattaaccctggagtctctcctcctaaccctgggccagcggttttcactccctttacactcagccccaagcctgacagcctataaacccagtccctgaacacccacatggtggaaggagagaatggactcccacaggtgtccactcacagggctgagggtatgcacatggacacatgcatgcatccacacacacacgcacacacacttcaacaaataagtaaacaacaagaaggaaaaaaaaaaggcaaacctccatgccggtgccagtcctatcactgacaaggcatgtaacccccagattcctgcctgagaaacccccacataccttacagctttaggcccgggattcagtcgattcagctgcaatagtgtggcatactgaaagccttgaagcaatggagcttcagttttgtgagcctttagggggtaaaccaaagttacctcacaagttgcctcgtccatatttcccacatctgaagactctcatgtgacatgggtggctgaatcctgaagagatactgccggagggcttgtgaactaactggacaccttgcttttcttctcgctatgtccctttatacggcacaaggacagtgtgccttcattgcaggaaccgaaagcaggagtcctgggtcttcccctgcctctaccatgagcttgatctgaccttagagaaggcatagtgtggtccatcctctgtgaaaagagactggacctatctgcagtcatctgaagcctgagccgtgtctgcagtgaaaacaagaaggcctgagttctaacctccaacacacatgtaaaagctgcaacgaccacatgtattgggttacggactagtacattctgtggactcactagccaggaacttggcctaaatggcaagcttcagattcagtgacagagcctttcccaaaaatgtgagtgtggattgaggaacactcctggcatacttctctggcttccatgtgtgtacacagaagttcactaccacacacacacacacatacacacacaaaataataattaataataataataataataataataacaattaagtaaaataaaataaaagtaaataaagcctgagtctctcaatcttactacaaatctaatgaaatagtctatttgaaaactaaccacagaaagataggtttcttgttcctttttgcacaaatggtaaatatgactatatttactgaacacttaccatattcacattgccatagtgaataccttgtatgtgggcattattgatcccatctgggtaaagggaggcatgagagctcagagaaccgaacaaacttgcttaggcgtcacgcagctagaaggtgctggtgtcaggactcaaacccacatctttctagtccaaggctctttatctaccatggaggacagaccaggtacaaagatttgcaaagatgtacctgtaagactcaagagaatcaaaggcaaattacagtctgccctgagggagccaggaagaaccattttccctcccatcactactccagaagacttccttaacaggaagcacaggaggcccaggggtgaatgcagatggctgtccaactgatttctctgctagtgtggttttaagtctctctgctttagtctgatttcagccactgccttctgtagagctgagttcctagtgcccatgtcctttccaagctctgctttggacacttggtctggacactggactcatagtgggctgtttgctatgcgaggaaaaatgtgccccgtgtgacctgaggctcagaaactacaatcttctccaagctctggattagcagtgggtcctctcacctttctactttgcagtggtgctggatgacagcaagaggctagccaagcggaagcttatagaggagaaccgtgagaagaggcggcgggaagagctacagaaatcaattgggcacaagccagaacccacggatgaggagtgggagctcatcaagacagtcactgaggcccacgtggccaccaatgcccagggcagccactggaagcagaagcggaaattcctggtaaggcttctgaccaagctcactatttatgtagcctttgttttctgccaaagtttagagtcctctggaccctcctgacatgagtctcctatttttgtgatgggcagttgcagctcagagggctggaactgcaatgatgccaatgaggttacagaggctactggagcaatattcactcactggaacccagagcagcttcctaggcctccaacctcaaggtgaggccagggatggagcctctcctcaggaatgtctgctatctgatggcttacccttctccccccttctgccttcagacctccagtgtttatattcagctatctaggcttgttcacgtgcccccttcagcaaaatctctaggaggaagggtctcagacctcagatttaagtttttatctgccagagttcaaatgcttgtctaggaataaaaacttgagttcagaagccagagaaaatgggcatagtgatggggaaagcagagagacaaggcagaccttttcggatctgtgtgcacttattgggttttagagtgcaaccccttcccatccatttctcatttagacttcctggtgttctaaagtttctggagttgctatccctgttttatagataggcaattcaatcccaaggccatacataaatgtcccagatgatatggcagtaagtgactaagccaggcccaaagccagcatgccctctgatttcaagtctctctgcccacctcattaaacaaacttcctgcccaagccagtgtctagccacctcagagactggatgtgccttcataaaggcttttgtgagcactttgctggcctgtggatctgtctatacatcagagttgctttctttaaacaaggagctgtggtggtgaaattgcctgtacaccacaacagtgacgttataatggtgttacacttataatcatagtactcagaaacccaaagtaagaaggttgcaagttcaaggcctgcttgagttaccagtccagcccacgacacttaacaagatcttgcctcaaaagttaaagccagaaagagctgtcacacagctcagtggtatagcatttgcctagcctgcatgagatgctgggtcagtacccagcaccataagtaacaatcacaaaaggaaattttgaaaagaaagggctatgaataatttgcctttcctacaccaaattgtctcattatcaacataaacaaatactgtcatgtgctactttagaaaagtcatcaaacactgaaatgatgcttatgctgtgccaggttcaagtctaaatgctttgctccctaatcttcagaccctataccacctctataggtagaatacctccatttacaggacagagagatgtgggaaacttgtggggctcccacagctagattgtgctaagacatggaggagcaggtatagccagtgctgggtctgcctgggctccttctgcccaccgcccatgtagcctaacccaccaaactaagagaggccttgggagggtggcattccactacttcaccctggtgtatctgactggaaattaaactgcacttattctgtataataggccaattccaatccaatatatatggaccatatcagcacagactccagcatacccacgggcctaagtctatcaaagtgtactctttcctcagaagtgtgggccactgccaggcctggtgctgcattctaattctaagtagtcaacaaaagtggaaatcaagctgaattctgagtcagatggaggagtcagggcccattctggactcgtggagaattttatgctttccccacctaggagaggatgaatctaattaagccagtttctgacataactaaaatacgtgttttagagtctaaggatttagtcttttaacttatgtatatttgtatatgtctatgtgagaataagtgtatgtgtacatgtgtcaaaagccagctcgacacccaggctaaactgagatatggtgttggtgattgcggtcattgctcatagcagccaatggtgggaaggggctctgctgatagcagcaggagatttacagggtgatgggagtaaaacttaattatctggggccagaactctcagtaactgggcaagaaacactgaactcttttaactcttaagagaaagaaaaggatagaaagtcatgcatacattcacacacacacacacacacacacacacacacacacacacactctgccgggcctgacaacctgtttcatcaatttcacaagtgcacacacatacatatatatatatatatatatatatatatatatatatacatatatgcctacatatatatttatgcatgtatatatacacagtcagacatgtatacattatacatattatacagatagacatatatacatatatacacatttggtggatggagcaaagtcccaacaaccacactttatttttttctttcagcttttttataacttcttagacaaaagttcttaataaaattatgtcatagctaaaatgtcaaacaagagggtgttacagaagaatgttaattgcaagttcaaaggattgtttcagtctgtaagctcataataagttcaaagcaacagtttcacatagccttgttttatcatggagcacacctgtcgattcatctttgaacctgacctagaatgtatttttttccttgatcattaacctgtctcaagtctatttttctttctggcacagtctatgtgcttgttgtgcatgaaagctcaccgcattccttcttacacagcccttacctactatactaagagacctgggcacattctattcttgattctaactttattatatctttctggcaaaacaactaaaaccatctccttaaactttttatcaactattctaactttctaaaaaatatatgaatcaaattaggaattctataaagtcattaatttatcaaaatagcattaatacatgaaagtacatcttcatattgatctgcaggaagtttgcccaacagagtgggttaaaactcaggaaacagtgggctctgtcagatgtaagagggatactgcagtagcaggctgatcagaagcaagaaacaatcctggggaaaagtttctgggctccatgcctctccagagtgcacccatcacagccatgcaaaatgatgggccatctctagcaactcgcttgccataagctttcctgcatgactccttccatgcatgtatattagtgtaaggatgagtgtatgtgtgtgcacatatgcctgtgtgggaatatatttatgtatgtatgtacatgtatgtctgtgtggagatatgtgtatccacgtgtgtctgtgtggtgatgtacacacatgtgcatgtgtctgtatatgtctatgtgaagagatgtatagttgtatgtgggtacatgtgtgtctacatgggatgtgtcttagttagggttttaccactgtgaacaaacaccatgaccaaggcaactcttgtaaagacaacatttacagggacaggtttacaggttcagaggttcagtcctcaaggcaggaacatggcagcatctaggcaggcatggtacaggcagagttaagagttctacatcttcatctgaagactgatagtaggagactaactttcaggcagctaagatgagagtattaagcccacactaacagtgacacacccactccaaggccacacctccaaatagtgctattctgtgtgtgtgtgtgtgtgtgtgtgtgtgtgtgtgtgtgtgtgtgtgtgtgtgtatgtgtgtgtgtgaatgtatgtctgtgtggggatatatgtatgtggatgcatgtgtatctatgtgggagtacatgtatgcatgtgtgtctgtgtgtgggggggtatgtgtgtgtgtttttctatatagggatatctgtatgggtgatttctgtgtggatatatgtacgtgtttgtatgtctttgtgagaatatgtatgcatgtatgcatgtatgtccaaatggagatatatgtgtgtatatgtatatgcatgcatgtctgtgtgggtatatgtatttgtgtgagcagatcctccagagatcagaaggataacactcttttaagttaagtgtatatgtatgcatgtatgtctgtagaggggtgtatggtgcatataggtctgtgtgaggatatgagtatatcagatacctccagagaccagaggtgtcagatcctgctggagctagagttacaggtggctatgaattacagatagtgcatgctgggaattgaaattgagtcctttacaagagtcatatgcactcttaacctgaacaatctctcctgtccaagatctatttttttttaaatctaagaagcatccactagaactatagaggtatgtagctcagtcactaaaatgcttgctgaatagacatgagggcctgactttagtccccagcactcaaataaagctaaagccaggcatagtggtacatacatgtaatcccaacactggagaaatgaaaacagagcccagataaccagccaatctaacataattaatgagctgtaggtcagtgagaaatcctgtcttaaaaacataagatggacaactaagaaataatacccacactgatctctggggttcatgacttacatatgcaagtatgcttgtgcacccacccacacacacatacacacacacgagaggggggaagggagagaggaagggaggaagggaagggggagaggaagggaggaagggaaggagggagaggtattaatgatcagatgcttactttatgggaatcacaaagtaagtcatattccttatataacaagggcaagcagtaagggatatcaaagatagtaagtacggtcagtgttgaatacagggaaggttgtaaacagtatgaaattacagagttcttgtgagtggaagatggggaaagacttcattcctctaactagagcattgaaaacagaaaagggcaaaatatcaagacataagaaccagccttgatgtctcaccttcaaggctcctaatagtcttcatgaatttgatcatccaaagaagaaaagtgtggcaaagtggcctgctgttagacttcggtcagagcaatgaggtgatctctgcactgattttcttcaggaagttgatgaaagcagctattatacccagcagtgcagtacaacatgacatgtgacatgtaccttttatagatccctgatatgttcaagaaagtgtccagattgatcgggatccttctctatcccatcttactctttacatcttacatctttgtgcctagatcacccctgtgccatcatggaactagggcaacccaggtccactaagcactagttctccagtgcttatgggtgaaactctcaaaagcatatctaggaatagctaccactacacaatactcctcagtatacacaggccctgtctcctatagaaagaaccttcttccctctccttgaaaatggctgtaccgtgactactttaaaaagaggattttagcagaagagatgtttaagtgacttcttagtttcttcttagtcataagaaacttttcaggtgctgggacagtagctttgtggtagagagcttatgcaaatgcatgaggttcttggttccaccgcctcgagcacgtgggcacaggagaaatttttcctgaacacaacaccaatagcttatgctctaagatcgagaattgacaaatagtgcctcataaaattgaaaagcttctgtaaggcaaaggacactgtcaataggagaaaaatggcaaccaatagattgggaaaagatctttaccaatcctacatctgatagagggctaatatccaatatatacaaagaactcaagaaattagactccatgaaaacaaataaccctattaaaaatggggtacagagctaaacaaagaattctcaactgaggaataccggatggctgagaagcacctaaagaaatgttcaacatccttaatcatctgggaaatgcaaatcaaaacaaccctgagattccacctcacaccagtcagaatggctaagattaaaaaaaaaaaaaaaaaaaaaaaccaggtaacagcagatgctagcaaggatgtggagaaagaggaacacttctccatttctgttgggattgcaagctggtacaaccactctggaaatcagtttggcagttcctcagaaaattagatatcacactacctgaggacccagctatactactcctgagcatatacccagaggatgccccagtacaggggattgccagggccaggaagtaggagtgggtgggttggggagcagggtggggggagggtataggggatttgggggatagccatttggaatgtaaatgaagaaaatatctaataaaagttttaaaaaattttttaaaaagacaatataaccctgaatgaggtaatccaatcacaaaagaacacacatggtattcactcactgataaatggatattagcccagaagctcagaatacaattcacaaaccacatgaagctcaagaagaaagaagaccaaagtgtggatacttgggacctccttagaaggggaaacaaaaatacccatgggaagatatatagaaacaaagtgtggtacagagacttgaggaaaggccaaccagagattgtcccacctagggatcccagacattattgcaaatgccaacaagagctagctgacaggagcttgataaagctgtctcctgagatgctctgccagtgcctgacaaatacagaagtggattctctcagccaaccattggactgagcacagggtccccaatgggggatctagagaaaggacccaagaagctgaaagggattccagctccctaggaggagcaacaatatgaactaaccagtaaccccagagcttccagggactaaaccaccaaccaaacacatggagagacctagggctccagctgcatatgtagcagaggatggtcttgtcaaacatcaatgagaggagaggctcttggtcctattaaggattgatgccccagtgtaggggaatgccagaacagggaagtgggagtggttgggttggtgagcagggggagtggggatgggataggggattttcagagggaaaaagaggaaaggggataacatttgaaatgtgaataaagaaaatatctaatttttaaaaaaggagaaaaaatgctttgaaactccaacttgagacttgtgtctcttaaaggaggaaagtatgtcgtcaacagcattactctcataatcaccatcatcatcatcatccttgtaatcctcccctcctctccctcctcttcttcttcttcctcctcctcctctccctcctcttcttcctcctcctcatcttcctcctcctccctcctcttcttcctcctcctcttcctcctcctcctcctctccctcctcttcttcttcctcctcttcctcctcctcctcctctccctcctcttcttcttcctcctcttcctcctcctcctcctctccctcctcttcctcctcctcctctccctcctcttcttcttcctcctcctcttcctcctcctcctccttcatcaccatgtaagaagctggggatgccatcttgcatctataaccccagctctaggaagctgagtggtaacacaatggttaagcactttatgtgagaccctaggttcaatccccactaccataaagaaagaaaaatcaaaagaacccttagctatgccactaacccccaccataccaagaaagaattttaaagttgtcatgttaagttgcagtgttttaaagtaatttgttacacagcaatggctaaccaaaatggaactcaataaattttgaagttgaacatgtagctctactgttacatcctcagagacagtgcagtcaaacactgaaccacagtcagttttcatgtttacaaatgagttctggtgctcagagtggaaaccacactcttttgagcagtgaattatttctacaagaatgccaagaaatcttactttaaaacaccatagctaacgcttctgtctagttagccttaactgccagcttaacacagcctggagaacctgaagagagaagcgtcagttgaggaattatccagatcagattgacttgtgacttatgtgacaattctgtaaagaattgtgttgatataagaagggactgtctaatatgggctgcgcttgaattcttgccctggtaccctttaataagaggctatgacaaggaaggtataagctaaattagctttttcctcccctaagttgcttttggtgggattgttttatcacaacaacagaaagcaaactagaacactatacatgtaccaaaagttttccataattatgaactttccatagtcaaagggaccttttagggtttatatttcctacatggctgatgtatttagaacactgcatacgaattcattaatttttatgttctaatgtcccaacttgttcttgaaaaaatgtgacaggcttgtgaccttaatagtgcagtagccatgagggctaagactcatgctgtcacggaagctgcagctatcctttgattaggggtgagtatctggtccccaaaaggagctccttcatcatttatcccttaaggtcaggatccagccaagtcaggaaaagcgatggtggtttcatctgcttcccagacttgtgcttccttctgagaaaatgagtgtttggcaagtgaggaacgtttgcaagatccataatgagcctaaagccatgtgtcaagtcacgcacaaagcatgaaaatcatgttctttccatgatattcttcaatctacttcagtcactgaggtaacagaagtgttttcaacactgaagacactgttatgaaggcagaatcagactgaggaggcaggctcgtttctaccctctcccagggaggcagaaagacaatggcacaaaatccatgcccactgcggtgagctgtgtacatcattatctggggacacagcgcatctgttctcctccctggttcattacaaaggtgtagctggcaaactttctgtacaaagatgaaatgtggcctttcaagtcagggcacatctgccctatttctacccctgccgagtcactgcctgatgaccacattctcagctgagacagtgtcagacggggcacacacagactgaaggatcagataggtccatgtgtggtctgtgaggtgaggtcagggcacaatcagaaacttcagaaacaagcaggagagcctagcttcaggagcagacactgaagccagactacctggctctaatccttcctaattgtgtaagcttgagttagttatttctttccctctctggtcatttgccctgtgtccacctcaggtggggtaaaactaatcagtggaatggacacagaggtgcctggcatcttgtgctccaggcatcttccctacactgtacaactctcatcttacctcattcatcccagaacgagtaagcctggagtcaggtccaaggcaccggggccctgagagtgtcctacattgttttccaatggtgtgagcatacaatgtgctgaacagagagaagaactcatccacctggttgaatgccactctgccagtgccaaggagctgccagactaagccaagatgtccttggctttcacccgtccatttgcaacaaggccaactggccacatttcctacttatctgaaacaatgctaaggaaacttcaacccagagagccagctggcagaggtctgtgtaacttcagcctccccagtgctgaatggagacagatgtcacacttgtacacacacctgaaccccatttcatacctctctgtccctagtgcccagaggagctagggagctgggagttccagtgcatcttcatagggtctccacttctggatgttttacagtgagcccatagtccagcccacctcaacctgccacagcagcttctccttgctcatcccttcccaaaccaaacagccatacacttcatctagcctctgtcctcactgtagcccttcagtgaacattgttctgtatttagaagatgtttttgtcctcctgtggtccatgggactgaaaatgatgcttctctgccaggctttacccacctgggtctctttcctgtcctcagaactttgcactgctatatcagtaactcttcttgatattttggccaaatccttgacaaggacagtttcaagaagggaagattgattctggattacagttcgagaaaaattgtcccccatggccatactagctagggttatttttgcagtaaaataccatgaccaaagcaacttggggaggaaagggtttatttcatcttatactttcaggtaagagttcatcactgaggaagtcaggacaggaactcatgcagagcaggaacctgagggagctgatgtagaggccatggacagatgctgcctactggcttgctccctatgctcagcttactttcttacaaaacccaggaccaccagcccagggatagacacctgaaatgagttgggcccctccccatcaatcattaatttaaaaaagtaccttgccagatcatacagaggcatgtccttaggtgaggtttcctcctttcccagcttgtgtcaatttgatgtaaaaactagccatcataatggccaagaaggcacgacagtaggagcaggaggcagctggcagccacactcaggaagttgcaaagagacaggaagtggaagcttgactataaacctggtagattacctgccagtgacctacttgctccagtcacactccacttcctgaaggttacataactttctcaaacagcaccccagggagtgtggagtatgtgaaaccatgaggaacacttcccattcaaaatagaactactggcttcttccttgccttgaatgtttcttcttcaactccatgaacggctgtctccttgacattcttcagtccaaagccttgactactttgcttgtcaccaggaccttggtgccccctgtctcctgaccatggtggacatgtcatctccaggcttatcacaaaccatagttcttcagtgaatttctttttcttgcctatcatcccttaccatgaggcagtttatcttatgagagacattgttcactgctgtaatctcagcatcaagagtgaaatctggcctatagtatttactggatatgtgctgccaaggtcatgtatgaacaagaaagtggtctgccctacttcatccaaaggcctggtgcacatcaggcagaaacacaaaggctttgtcctttccctttgagaaggctctatctttgataagcgcctatttaactatgaaaaataagattaagagatgttcagtgccataaaagtgacccctactggccactatgagtatgcagagaagatcaacatcaattcagatgaggtcatctagcaaaacgtctaggagtagacagaattcagtgagcagagacaacagactgaagtagggacttcagaggaatgaaagatccagagagagatgcagtagaaaagagaggcaatctgtgggataagggtgttaaggtcaaatgtgctaagccaggtggctcattgagggcttagaggacagaagtcaatgctattgctggaatgccctctgagcaagctaaggcagctaagcaggccctctctccacaggtaaacacaagctgatactggagcttggtatcagggcacagttacatactgggcataggatccttagtacccaagacaactagtcacagtaagctaacagattcatcacgaacccaggaatgtgcagtccttatgggtaaaaatctacagggaagccacataggtgtttgcattctgctgtctcatttctctgtaccaggaggcagctcacctcctcacatattcttcttcttttccctagtacccgaggtccattatggaaacaaactctaatgatacaacagcatgcttttttttctactctgctgtttatttcccttcagaaaagcctgtgaagttacatctaagctgtaattttatcgttaccatattcccttgcatgattttcctcagtctttcaaatcattggtcacaggaagtgagtgccctgcttttctactagcagatgaaatggaaactggtagtctgaagcattgtccaggacactgggctgaccatttcgatagtcagattagacctacccagtggatgtttgaatgtttgggtgctggggagatgttcagttggtaaagtgcttgctatgcaagcatgagtatctgggattaggtctccagcacaacacataggcagagtatattcctgaaatcccagcattaggaagacagagatattcagatccctggagctcactggataggccggctagctgaatcagtgagttccacattgagtgagagaccttgtctcaaaacataatcttggtcctttcagcaaaatcttgctggcatatgcaatagtgtctgcatttggtggctgactatggaatggactcccgggtggggcagtctttggatggtccatcctttcatcttagctccaaactttgtctctgcaactccttccatgggtattttattcttgtaaggctatgccagtgcctggcaaatacagaagtggatgctcacagtcatctataggatggataacagggcccccaatggaggagctagagaaagtatacaaggagctgaaggggtctgcaaccctataggtggaacaacaatatgaactaatcagtacgccccaaagctcgtgtctctagctgcatatgtagcagaagatggcctggtcggccatcactgggaagagaggacccttggtcttgcaaactttatattccccagtacaggggaatgccagggctaagaaatgggagtgagtgggtagtggagctgggcgggggagggtataggggacttttgggatagcatttgaaatgtaaatgaagaaaatatctaataaaaaattttaaaaaaacataatctgggaataaaaagatgactcagcagttaagaacactggcagatcttccagggagacctaggctcaattcccagcacccacgtggtatcttaaaaccatctgtaactccagttcctagggatctaatgtcttattctggtttccacggccaccagacatatatatggtgcacatgcacacacacacacacacacacacacacaaacatatgcacatataatgtatgcatgtaggtaaaatatctgtaaacataaaataaaaataaatacatttttaaaataaactaaaatttattaatgagcagcagtatctagaaagaaactgaagaaggcacctgatgtcaaccctggcttctacatgcacacatatgacatgacatataccaatgcatatgtacacacataggaacacatatatactctacatatattcgataaatttaacgcaaaactccctaccttgtcaatatatggccatgtttatttagcagctgaccttccttcctaacaggcttgtgaagaagacgggaggcaagagcagcctccttttcaggggaagaagaaaatatacaagccaacaaggatattctctagatgcaggaatccaaaatagggttgacattcatttttccttagctcaggcaatgacagaaagtggaacaggaattgtattcatcattagtctatctatcagatctgtgtctagaaaagccatgtcactggttacctcaaatgcccccattcaccacaaaaacatgacagaacccagatctgtccattcactatccccaaaacaagaaacagcgacgatgacaaaaccagatggtcctataggtaatttcaacaaggatggcactgctcacatttgctgtgaacacacacatccttgaaatactccccaaggtttgcagggcctggctgctcctgtggctcctgatacacaggcaacttgaggataagaattatctgctgtcctatgaggtgtaaccactgacagagtgtagggagaaagatggttgctgctgcagtgctccaagctgaatttgctcagtgacatcctggcatcctcagagtggctccagactaccagtggcagcacatcccacaacatctgtggaaagacagatcctctagttccacctggttctaggttcagacccaataggtgaagcctagaaatctggaatacagtgaagtttggggccacagtgtcttatgttccacctaccactctcactccccactccccactcccaccgctgggtgtttggggaaaccaggtcttcttcacacctgttcacatagtattagacaaagatggctgccatcccacacccatgagtctctggtgtttttggtggcatccacaacacctagaggatgcttgaagacaccacgtgtttccaggtgtcagaaggtgaacgggtgttacagacatgtttccctttcctgctttcggacttattcaaaggcctagactgctgtgagcaacatgggatagagaagtcgaggctggcatccatgtgctgttaagccatgtgtatcatgtattatgttaatatatgttaatgcatggtatcacaaagacaagaatgggcaataaagaggcttgttctcatggaaaatatagaaacagcacaaaataaccctagtggagaatgctcactgaagacaggtggcttgtggatatgggaagtctaccatgcacaaatcacttaaggctgggctaaaaccatgcttctgaataatcaggtccaaaaaggactgagaacatcccccaagtgataaccatttcactgtccactcttcccagtgcagttgtggattgtcttcgagcaagtaaacagcaaagaactctggggacataaaagataagcggatgtcccacctgccctaatgtttgccctgtttgtacaactgagtttcctgcagggagctgagagattgtcaccctcaatgctcagcagagaacacctcaaactggagttcacatttagaagcccgagggcttgttagggctcaccagctgtgtgcctccattactgtccatgtgtccattactttcccaacacacatcccagaacacacagtgctctgaatgtgcccaccagtgacctagaattcttactacaggcctaaatatgacccttgtgccagcaacatatacctatctctctttcttccccgcctccctccctccctcccttcctcttcccacttcttcttttcatcaacaatcctatgagcattatcccttgtggggggtggggataggggtattaaagcaatggccaacgtatacacatttggtcaaagccgtaattgatgtgaaaattatccactttgtcaacacacaggggcaaccagaagaaacagtcctttagccctaccatatgacggctgtaataaacctaggtttcttcagctttgctgaaattgttctcacttctcctcttcagccagaagacattggacaagcacccatcgtgaatgccccagaaggtggcaaggttgacctggaagccttcagtcattttacaaaaatcatcacaccagcaattaccagagtggtggattttgccaaaaagttgcccatgttttgtgaggtaaggacatggctcttctgtctgggtcacttttctttatagctccatttccaagagtgcagggtattgtttaacagcaatcaggagaactccatgctaggaaagcagagttggtacaaagtgagaatgtctgccagggctgcagctcagtgggagagcacttgccttgtatgtctgaccttggatctattcccagtactgtcaaaagaaaaggactggttccccaattgtgccttctctctacagccattgctgggtgggggacaaaactagcttatttgctaattttagcaaaaaaattattagcaaaattgctgcagtttgagcttacatctatagcccttctacagaatatcccagagatggctatgtgatcagttcttaatggagaagaattgaagccaaatggccctcacagcaagactctcgctgtctctgtggggatctcttcttccctaggagcttgatctctctggagcctggaaagctcacccaacagagcccatgctttccctcaaagatacttcctccctctcttagcacatgtttcatctcacctcagcttacatcctgtatcactttgacagtgctatcctatagcaggtgagaacagagccactacagggaatgcgcaagaatcctggacatgactgtctgacctgagtcatgtcatctttgagatttacactggtgtctctttaaagcagttggcatgttcagataggagcatacaaatagagtgttgtccttctgccctacctgagtgacaaacactgcacacatcttagctactgatgctgttatttcttctctttgtctttctggaacattccaagtagggtaggccagctccagcaattcccctgtctcttcctcccctgccctaggattacaagttgctactaccaccaccacacctggctttagaaagtaaaaacccatggattttgggaacagggtcaggttcaagcagcatatcctgactatgctgtcttccgggctcaagttcatcatgacatttccatcttgcctctgactttctgaatctaatagggctgatggtatcctctgcggaacatctatctccctttgcaaaattccatcaggtgtcagaccattgctctcacaccttcaatgaagcccagagagttagcatatagatacagtacagactgtagtgaacctcttctataagctttgagagtagtgtatagttcttcctcagctgagagaaccaagtctccttgtctaggatgagcatctgctgccttaactgccagctcatctgtgctgtgagtttacagtaaggacagcccagctgcaatgagggtgaatcagatactggagggggaaatgtcttattgcttacttttgagcatccatagaatccatacccagaagaacagagcagtagcctaaggataggaactgagacggagaaaacactttcttccttctgacttctaatatttttaattaatatttatgatcattctagatgatgaacaaatagtaccatttctaatttccttcctattgtttgggcaaacttagccaaaagtaatttgggggaagaaagggattatttgacttacacttctaggtctgctgaatgattcttctccagagtgggatcagcagtgtgtgagcattacctgggatcttgggtgacagtaaggatgagagccacatagaatcctagaggagctggaacaggtgcctttctgtcctccctgctgtctgtaacctagctcagccttcctccttccaactccctcttaagtcaggcatctaaggatataattaaaacaagtcaggacttaaacaaaagcaaatctttaatgcgttatcaaatagaatcattagacatagaagcctgtttctcatagagaaataaaaagtttaaggttgaactttgaataggctgactactgaacagaagtagacttctcagtgtcttccagcaggattgcttttagttgcataaagtaacctaaactggactagtccagagtccccacctccaaaaagaagctacaacagtttcagggaagacttagacattatgtacaatttacatagtcttgcatggtttacgtattgagatgtgttggccttgaattgtgatagagatagtttcaaatcccagccttacctacaaaatatccctatgccaggcatactagcacactgaagtctgagtgcttgtttatcacatgtgtgaatgaaactggaattcaaatgtttacctaactgtgaagttcaactgagatgactgtaaattttgacaagaaacagaagatgtaacagtcattcagacccattcaaatgacatcaatattgaattcttgaactttttctccaaccccagaaaataattttctatttttactattttgccacacagagttctgttgtaaagttttattagcccattgtcataaaacctaaatagcatggtgaccaaataagctttaaatgaccctgaaatctgagcagaaagagctagcttgtccattgactctggtatctaggtcaccaaatatagaaacctggaagccaggacactggattctggcttcacctctgccctggatttgctggttgacaatgagcaaagcttgtactgccttagtcacttgcatctggcaccttctagttttgtacttcctgaaaagctcagctgcccactgaccagcagagctacacacaataaaagaagatgagtcttgaactctgctcagccgcactttcaagtaaaactcagaatgaagggctgactgatggagacttctgcattactataataccagttgaagacctgtgctaaaagaaatgtaaactgctgaaattaaccagcctggagatttaaaaacagtgattgagggggctagagagatggttcagcagttaagagcactggctgttctcccagagaactcagcaccaacatgcagctcacaaccacccacccatacctctagttctaaggatccaatgacctctttgggtgcatagacatgtgtgcagtcaaaacagtcataaacatttttttaagtagttgtagtctgagcatgttattatatacctgtagctcctgcatttgtgaggcagaggcagattcccactactttaagtccagcttagtctgcatagtgaattccaacccaggcagaactacatagattgtctcagaacaaacatggctgtaagtgtccctccaggtagagaatgagagtaaggacctcaggggatacagacctaggttggccaccaaggctctgtggttgcttttccaacaccctagctggcactcatcctctgttctgtgcttatgtgtctgcttcttttcagctgccatgtgaagaccagatcatcctcctcaaaggctgctgcatggagatcatgtcccttcgagctgctgtgcgctatgacccagacagcgagactctaactttgaatggggaaatggcagtgacacgaggccagctgaaaaatgggggccttggggtggtttcagatgccatctttgacctgggcatgtctctgtcatctttcaacctggatgacactgaagtcgccctgcttcaggccgtcctgctaatgtcttcaggtgagtgtgctgagattctcaagggtgtgagaagagcttcttggggtgggggtggggggcctagtgctaattcacatcacttaatgggttgtctgtctccctttagtttctgagaaacttatctggctctcttgcatccagaaactagaagggtcaattgacagagagctgaatgaggggttatctagggtctgaggctctatagctctgactagcttggaactcattgcatagaccacactggcctctaactcaggtgctctttgaaattgtttgtggaaacacttatatctgaggcatttcagaagtgtgtgttgccttggccttcgattctgacagagctagctagctacatgtcccagcctcacttgtagaatatttgtattaagtcccagccagcatcttaccgttcagctgcctaaatttacatatctccagataaagttgaaattaaaatatttatctcactgtatttttgtgaagactgactaaggtaactaagtcttggtatgatgcccaatttggataggggaaggtgggcaggggtagctgaagccctgtgaaatgatcccatttgcagatagttcatcaacccctgcctgtttgtgcctttgcagatgctaggtatagatgtgagagatagtgccatcctatggatcacttggctcaagttttagtttcctcttactgaacagcacaccaacccaaaactggcttaaggcatctgagactgccaaagctagagctgaacatggctgcagaggttgctcccagcagcctttcctctgaaagaatactcagacccttacatggctgccaggttccaagagggagggcttcaagcatgtgaaaacaaaagctgaccagacttaaatccacggccacatactattgaccaactagctccagctccagcccattcaacagtgacctcaccagtcacctaccagggaggacatgatgttgtctttaacctacctccatctttttaaccaatatctatcagaactctagctcccaacagtggaggtttaatgacagagctgatccatcctctttttatttacatcataataaataattgcaaagcacactgtattgtttaagggcatttagtcttaaaatacagaaaattgattcaggctctcctcttcatttcagaacaggttaggtttttatttctttagcacttgtcattttctgacaccatcagctagttacacttagaggtcatagatatgtcaagccagtgttcaggaggctccaaaactatttaccaggtatgtggccaaacgtccacaaaacctgagtcacagatatcttcagagttctttactgagctgaaactttctaagtatttttaaattgatctagaaattcatttcctacataaaatttagatatggcagatatttttaaagcagtaatatttaaaattatgtttgtggaaaatttcaaatgtagacagaatggcacactgaactctttgggtgactttggaaagactccagggggttccattttcccaatacctactgttctcaccctggtgtaacaccctccctatgacttgcttttaaccaatagaaccaacatattcgctgttacctcatgagattctatatgtaacataaaattattgcaaccagacttattctatcagggccttggggactttgagagattgacacgcaggtggagaaagttctcacagtgggggaactgcacagctggtatccaggctagaaccagtggtcacgtgaccctgagtgttttagggaagagagagtcctcaggggaatatgatttggtgcctctctaagggccacctttgtgatacagcctctctaaattaaaatagaaattgaacatatgtgggaatcaaagtcatggagggaatgaaagcaagttttagctaagtcattattggtacaaagacacatctacataatgttgacttacataaatattataaaggtggcccttagagaaggaagctatttcttctgtaacatcttctaattgtatgccctaaagaaggcagaaataaagaatcaatgtgaggctagtctgacttctatactgttccaatacttactacccttttgaacacttttttttaacaagaaagtgttcaaggacacaaaatcttcagcaataacctttggctttaacaaagaaacttattatttaataagcttttctgcaggcttttgttttcatagtcatcagcttatggaaaatggattttaatactgtgtaataagatgtttcctccagaaaaagttagtaagaagagagaataggtagagaaggcaaatgtgtctgtttttacattactatgacaaacactccataaaaccaacttgagggatggaagatttaccttggctcatggttccagaagcttgtgtccacagttgactgatcccattgctttcatgcctgtggtgaggaagagcatcatgataagaagctcagggtaaagtgaagttgttcaaattatggctgccaggaagcagcacacacccctcccctcaccacagtatccctcacagcactgcacccctcccccaccacagtatccctctaagcattgcacccctccctcaccacagtatccctctcagcattgcacccctccctcaccacagtattcctctcagcactgcacccctcccccaccacagtatccctctcagtacttcaccccctcccctactacagtatccctctcagaattgcacccctcccccaccacagtatccctcccagcacttcacccctcccccactacagtatccctctcagaattgcacccctccctcaccacagtatccctctcagcactgaacccctcccccaccggagctatccatcttaaccttggtgtctgatactctacagcctaagttgcattctcactcactcctaggagcagtgaagtccccagatctataactgaatcagacaagctcacttcttccacctctgaattcaaatccctttcttcctcccttcagatcgcccagggctagcctgtgttgagagaatagagaaataccaagacagtttcctgttggcctttgaacactatatcaattaccggaagcaccatgtgacacacttttggcccaaactcctgatgaaggtgacagacctgcggatgattggagcttgccatgccagccgcttcctccacatgaaggtggagtgccccactgagctcttcccgcctctgttcttagaagtatttgaggactaaatttactggacaagttcttgtcattcctgcagcatgactgggtgtcattgcattccacctgtagcattctgttgttgtttcttcgtttctttgtgtcaagtgagatcatcgatggtcagcagatcaccaatggcatagacttggatgaaattgttctttgaatgtgggtctttgtaaccattgcattttgttctccagtccttggtgtgaatgctttgaagggcttacagcagtgcagtctgagtggggtacaatcattatttcaccagcacgaagtcatcaccagctcccatctgtccctgggcagactcaaacaagccaaacagaatttcagaagactaaagaagccttaaaaccgagaccacagtcatcttgatccaacatgatccattctgatgtgtgcaaggtgaagctgtagagcccaggccgcctcagggtaagcatggcttttatcacggaaggggagaaggagcagtttctactcaggagctcatcattgccagcacccgtgttctccaagcagcctgacttggaatgtgcaggaatatccataccataacaaatcaactttcctttccatggccttttgtaaccttatgatttacttcaagttgcacaagagtatgacttgactggtttgaggccacaaggaaagtctttttttttttttttttttttcagtatgcccatagagcttgtaaatcttcatcaatgttaaagcatactttccaaaatgcgtgtggtgttacctcaagcaggaaggcacctttccaccttagattcacaagccacaaagctcgaatctgtttacatagtgcagtcccttttcaatggcctatgaagcagtcctctgcccagcttagctcacaaaggtcttatccaggctgtgtctgttgagctgatgatgttcccctgtagactgaatcttccaatcagggagacacatggggaaattccaggcttgtttggaaaaatccctggaaaagatcagtacaggaacaatcagattcaaaggaaaaaaactactcatggtataggctgtcagattagagggaatgctctccctggatcagcaagcgctttacttattcacaaatatctcccagtcccatcccatcgctgtctcccaatctcacccttgtggctacccacctccctagattctgaggcactaaatagcttctctctctctctctctctctctctctctctctctctctctctctctctctctctctctctctctttctctctctctcacactctctatctctctctctcttctctaaaatacatctatagcttacacaccattaccctggcaaatactcctcataaaatacagcagaccattcatacctgctacccaacttatccccaatgaccaagtagagtagatgtttctaagcaacaagtagtgacaacttacccaaaaatgggcaaagactgtacacatacaactgaatgtactgactcttcactgacttcgcagatgtaaaatattctttgcctgcctttcactgccttagcctggaaatgctgggaaaaaaaacaagccatatcagcaagaattacctaaaagcaaaggaagtcactgtgaaaagcaaggaaactcaattctttccactaggcttggtggggcatctttggatctttggcctcgctggaagtcgggctgcctgagttctactttgtactctgcagcctgggtaatttaggaccttacaatttcagttttcttacctcctgggaaatgagttgaactccaaaaatccttcttctcttccctattgtttgacttccaggaaagagaggggatgtctttgaaagatccttttgtattcaaatttgtagcttcaaaaaggaatgtatttgggcaatcaatttgagtgagaatgagaatttgattcagaggaaggcagaatggccttagaggcataaaacttagaggcacagcactgaaagtcccaagagactgggaataaccaaggaagcaggaatggtttgtcactaaaggatttagcctgacttcccagataaaacatcgctgaagagattaaatagaaggaagaagccccattagattcatgttcaaacatgtcagaggtagcctgtacctggcctcctgcttcaggaacttcattaaacatgtgatccctatgtcagctcttctggaagaccttcatccaaacaataaaaactttgctgtaagaccaattctccttccaaagggagagggggaggcagggaggcgagtcctgcacaggcatacaaacttctggaacaccagaatttctaaggaagtttcctgattctgacagttttcaaagggaatcagaaaccctggcactagtgcagggtttgacccagaatcattcagagtgctgtaaggattaagcattgggcactagcccagtcttcacaacccagccagccacagcaaagtgaccctccctctacagaggcccacctttcagggacagacccagctctggcaatcatgtttagggttgaatactccacaagccatgcgagcttcactcttctggtgggaaggaaccagaatgatagtaggtcaggacagccaaagacacgcttttgagaaattcattttatgaaactagattgtaagggatttcctctcaaatttttttcttctcttttaaaaaatcattctcttctaatcttgtccagactttcaaatcaagtgtggacatggtggcaggaacctttacacctgctccactgtggggagatattccagtcaagaaaacacactcatcctgctgggatgctcactgacaaatggaatttatggacaagaaggctgtgcacatgcagcaaaaatgtgcatgtgtacacatgtgcgtatatctgttcattgcctcaagtgtacttcgcacttcagtttaaatgtgcagaacttccagaaactggaaggaaaaaaaaaaaaaaaaaaaaaaaaacttcttcatgattctgctgaaaacaccacgtgctgcctctgagctttttctagtcccttgagcctcagtcctcagtgatgcgcttatgtgatgaagcctcagcccagcgcatcccctgcctctttcccagttcaatcttggggagggtccttctcacagtgacctgcaggctggccctgccaccttggcctcctcacactcagttctccccaagccagcatcccgacctgctgagcctcttcagagcatgtcattgtcagtaagacctcttcattctgtggaactcaagcctatccatgtcatattgaccttttgctgcatgagtcataaattatcaaatcagtcttacggtttttgagatgtagccagtgttttataaggctaaacctttctcatgaacttaatttaagtgaataaccaaactaccggtccttctccaatgagagatgacagacaattgaatctctgccctttgcagtggcgatggcatcaggtcctaaaataagcttataattttcctgttattttaataatatggaaatattaaaataatgtttcttttgatagtgatagactgatccatatttaaattttatagagaagaaattttattgtactgtgatatagatatttattatccaggtaaggatttgcccggtgtgtattttttacaattgaaacattttactttaatctctaaaagaaaaaagactataaaacatatacatattaaaaaaaaggctagggagaaaaaaggtttggctttatcaaagaatttttactgtgttgtatacatgtttgcaaatgaaaaatttacacatttttagtgtttccacattaattagtgccgccttcaagagcaatattgtgcagtaaacactgtttgtggctttctgttgcccagctcaaactgaccccatcttatgcacaagacaatcagatgttacgtctttcctctgaggacatagacaatactcaacagagcacaatgtgaaacaaagaacaagattgtaggcatgggctgtgctgctgatggagatgatcagggtgcatgcgcactcacatggccttgtaccactgcctccttttggttgttctttgtgacgttggtatctttctcttgacatcaaatagccaaagtagttctccatgttttcttcagaaaagaccattctttttcccataatgtgttcatgccctgagaatcagaaaaatgaaaacaaaaacaaaaaaagatacggatggaatagagaggtttatagtcagtggaagattggtattttgcaaacagtgttaagtgatattgctattgctagattggtaattttttttttcagcctaaaatcgttgaaatctgtgatcaaatgttttaaactatccagaaagaaaatttgtatatttgggaaaatggatttttacatagcttttgtatgcggatattaaattgtaattatgaatatagtggacataggtactcataagcttaaattctaaaaaagaaaaagcttaaaatagatatatatttgcctgtctctttctttaaatatttctggatataaggggctgcctcccacctcaacactgaggcagggaaggaattacaaatacaaggcacatctactaagatgaacgagttcaactttggggagcatatggaaagaagggagaaacacagacagacaaactgactgacaaacagacgtcatcaaaacatccaacagaaatctaaggcaactccactaaagtagggtgttggggttctcaagaaaagagaacacagaacttggagcagaggggagtgtcccttaggataagaacaattagcgtcataaagattacatcgtcaaatcagggcttgcctaccagaaaaaccaatggggaaagttgaggcagtcaactagagtttttgggaattctcttcaaggctgaactcccaacaggtgagctcctgtcaggggataagtagctaagtcctttgatcttgaaaagataccatgatttatctctcagctatgcgtaaggacacaggatttactttaacaattcactctcctgttctctaggacatgatattttcattcgtaggctattttgcaatcattgtcacagagttgggggtaggaggtggaaagggagggtgggcagaccaaccccagacaagaaaccttggaggacactttgatttaagcatgcttgggcctgaaaggaggggttaccccgcagaagagagagccaatcaaaggtcattttccctgaatatttgtatcacacttcataggaatcaatggaaatcttctcccatgtgaaacttcacttaatccaaggactttgggtgatgaagagcacaataaaatgaaggatgttttcttctctcaggctgctaacaaccatttcctttgcattttcttgcatacaatgagttgccctgaggaaggcagatgtgtgtagaaaaggaaaaaacttcaaaacagacttaggataaagtagtctgttctagtgctcttggatggagtgagataagaaccactctcagtctgactccaagtgatacagatgctgaatgccttcctcacaccagatgcacgcaatcctgtgtgttctggggcttgtgactcagtggctattctgagctcagaagagatggcgggtttgtttttaacaggacttttgtaataataacacatccaacatggatgcctgcatcccctgagagacatttactggtaagtgagctactaatcagactttccaggaagttcggatctccctgcatgttaacatcactcactagtcactgggtacttgagagtcccaatggctcccagccccagatcttcagtgtaatgttaggttatgtgattctggccagccttgtatgaacattactctgtcctaggaatcttgcttcacccttcattctacctcaatttctccaaagcacatgagagaacatgaggtttctgatgacaggataatgcaatccactgtggtgatgctcactgcttaccgtccaaaactgctcacccaccccactgcaaaaaacccacatccaccaaaagaaaggctacctcaaccctcaatagactagatccactgcaaatgtactcacgaggcttaatatgagtggtgatttctcctggtggcatttatgtattgtcccaatggcttctagagggctaacccaaaggtatttttgtccttttgcttgagacagtctcactgtatagcacaagctggctaaccttgaattcacagaaaactgacatcctctccccccaactgctggtattaaaggcatataccaccacaaactaaggtattttgtcttgtaagcacttgggagtcaaatttaggaaaagctatgttgtatgatagaatgagaatttatagcagtgggagttgggcatcctgaaagggggagctgagaaaatacgaagatggaagtatttgccttctaagaggaaacaacatgctataccactctcaactttatcaactttaaataataaaattattggcaaatgaatggtgcaggtgaatttctttgggaaaaggggggattaaatcatactgatatggaactggagggccccaaaatgaaaggaatctaataagagcacaaatgtcccttgatccataggtttctggatctgtactgtttagtttcaaagagagttgtttttaatatgtctcttccttcttcaacatgtgtgcagacaatcatgatcatattcctctactccttccacctactctcatgtcctcttcctttaacaggccccagacctcagcacaactgatgccgtgatgggagtcacattcaggcagcaatacctatcaaaactagaatgaagacttgatccatgaaagtccatagttctgggaaagcccctaaatgtactaatcttgctttttgccttctgtagttccacttatacctatctattcttgctaactgaattatgtcaccccaggatgtgtgtagttttgtgtgtgtggtttttgttgttgttgtttgtttgttttttttttaagctcaccctgaggaaagtgacttcgctgaggtcctgaacactcagtgtagtcaatggctgcctaataaaggcttaaatctgtgcctgagcagtcttttctggtggatacctcacatttctggagatcccagcaagattcttagagacctcaagatattaggggcgtccagagccccttggagcaggtaagagcacaatggtcaagcatctcctaggaggaacactccagagatattccatggctctaggactccctctgattaattaatttctaaataatactttatagtatgtattttggagtcaagttgtggatgtgagtctctgttttctccctctcagcatgtccaaatgctctgcacactgagctaaaaggatgatgtggagtccagagcaggtggggtcctacagaatctgggtctagctgggagttagagccaagggagaggaagagggagaaggccttctctgataatcttcaatgaaacagctctctgagatgatcttagattgtgctttattcggagtgggtttgaatgcatacactttggagtgaaccaggggtacatatggaccttgaagagtagaaaggagttttcagggtaaatgctaatcattggctagagttttaaagttctgtgaatcccttgtttgcatggagaggcattccaggaatctcaggtgcttgctggacaggttcttaactggccctgaacctgaaatctcaccaagtctacatgacattctgcaggtagagggtatagaggtttcaggctcctcagacaagatcagaaaaagggaagccctgctggttaaggaaatcccccattttatacagagctcaggatatctggacaatggtagaatttgaccttaattagcagggcccaacaacacttcaaaggaatctgacacctccagcccaacagggaacaaaatgaaagtcagctggtctggtccttccagaggttaactctgcttacggtgccttctgtgtaggacacaaaagagaggcaggatggtggtaaccactgatccggtgtccaggatccatgtgagatggcactggattcccctggtttgttcagacgcatgaatgtgtggtggccatccctaggtgtatttactatgagtgtattacaggaaatactttaaaatgtaactggcatgtcctccaactctctgccccaccagtctggcaggctatgtattggcgggcaatggccgacctgtttttaatctcatggagactctgacttggaactccacagtctctccacccatctcactaggttcccactggcaggttgttaccatgacaacaatgtgcttcaaatcccccacagcctttgtggtgcacctcaggcaaacctaccctttgctgctgtacctttctctcttgaacccagactagccacccagtgaaggaaaacagaacacaaacttagttcagaaatggcggtaacacaatcactttgtgcagcaactaaaactctaatcttttaactttattaaatctaaatcctacagtggcaaatcctgatggatccacaactgaaaccattgtagctacatcttgtcctgtcactctccctgcccaaaaaaggacctctctcctgcttcctctcttcctccatccaacccagaagtactgcttactccacagtgattggttcctttatacattaggggattggttcacaagaacagcaccagacccacccataacacttccccatttctgttctaataaaaaaagaaaacctttctctcaaatataagtagaacacaactattaccattttgtagtttttaaactataaaacagacctaacacccagcccatcatttgtgtcactaagatagaacattgccatctatcctaaatttaaaaacttatgattctacctttacttatgtcctggctttatatagtgtgccatctgaaaaccatcctctcaaatctattccctcaaagtaaatagcctgggttggctatgagactataagtagtttttcaaccctgccagaagttcaagaacaactattattaactgaaaagatatacgaagcctaatacagcttccagacctaagacaaattgtagagacagctgcctagctatacagcaccagtataagtcagtaagttggaccatccatctggtttcacccttctggcccaggatcatctgaaagacctagagaaacaggaaattaaggactagcctattctgtctcagcagaactaagctatcctaacctgtaaattttgtcctttttctggaaactacaggtctgggtcaattttctgcccgatggcaacctagccacaaatgtacaggctcacctggacatgtaatgttcagttccttctttgaatccatgaatgggaaattgttaggagcagacttgtctcaaaaagcaaataaataacattaaatgttacatacattctgtggatctctgacattgtttaaaaccaatatatatataacctatataaatataatctatataaatataacctatataaataaagtaatctggactgtgctccattaacttctctcagctatatcttttttttttctggaataaaattttttattatatattttcttcatttacatgtcaaatgctatccccaaaaccccctataccctcccccaaccctgctccccagcccacccactcctgcttcctggccctggcattcccctgtactggggcatatgatcttcacaagaccaaggggcctctcttcccattgatggccgactaggccatcttctgctacatatccagctagagacaccactctgggggtactggttagttcatattgttgttcctcctatagggttgcagatccctttagttccttgggtactttctctagctccttcattagggccctgtgttccatccaatagatgactgtgagcatccacttctgtatttgccaagcattggcatagcctcacaagagagagctatgtcagggtcctgtcagcaaaatctttatggcatatgcaatagtgtctgggtttggtggttgtatatgggatggatcccagggtggggcaatctctggatggtctttcc

SEQ ID NO: 456 - DNA, 1837 bp, Mus musculus
agcaataagctgcatccacagcttaagacctttacagccctaagtctgttcttcacggcagtagaacagcaggagagcttgaagatgcagcgtcgaagctgggtcttggcacatcaggtgctactctgaagtgaggcaggcgaggttgctgggctggtggtgtttattcatctcctctcttgtttcatgtgtatgtatgtatgctctccgagtatatgcacggctccatggttcagggggctggcaaatgcatgcgtagagcgtgtgtatatgtaaagtagaacctgaacctggatagcaaaatgaactactgtatgccagaggtacacgaagtgtgcccagctgccagcagcaactgctacatgcaggtcactgactacctcgcatatctggaagacagtccggctctcagtggtcgtgatgtccaagctgtgcccagtagcagcatatatatggaacaggcctgggcagtgaatcagccttatacctgtagttaccctggaaacctgtttaaaagcaaggactctgacttggacatggccctcagtcagtccagccagcctgcacatctccctgaagaaaagccttttcctcaagtgcagtcgccaccgcactcacaaaaaaaagggtatatccccagctatttagacaaagatgagctctgtgtagtgtgtggggacaaagccacagggtaccactatcgctgcatcacctgtgaaggctgcaagggcttctttagaagaaccattcagaaaagtctccatccatcttattcctgtaaatatgaaggaaagtgcatcatagacaaagtcacccgcaaccagtgccaggaatgtcgctttaagaaatgcatctatgttggcatggcaacagacttggtgctggatgacagcaagaggctagccaagcggaagcttatagaggagaaccgtgagaagaggcggcgggaagagctacagaaatcaattgggcacaagccagaacccacggatgaggagtgggagctcatcaagacagtcactgaggcccacgtggccaccaatgcccagggcagccactggaagcagaagcggaaattcctgccagaagacattggacaagcacccatcgtgaatgccccagaaggtggcaaggttgacctggaagccttcagtcattttacaaaaatcatcacaccagcaattaccagagtggtggattttgccaaaaagttgcccatgttttgtgagctgccatgtgaagaccagatcatcctcctcaaaggctgctgcatggagatcatgtcccttcgagctgctgtgcgctatgacccagacagcgagactctaactttgaatggggaaatggcagtgacacgaggccagctgaaaaatgggggccttggggtggtttcagatgccatctttgacctgggcatgtctctgtcatctttcaacctggatgacactgaagtcgccctgcttcaggccgtcctgctaatgtcttcagatcgcccagggctagcctgtgttgagagaatagagaaataccaagacagtttcctgttggcctttgaacactatatcaattaccggaagcaccatgtgacacacttttggcccaaactcctgatgaaggtgacagacctgcggatgattggagcttgccatgccagccgcttcctccacatgaaggtggagtgccccactgagctcttcccgcctctgttcttagaagtatttgaggactaaatttactggacaagttcttgtcattcctgcagcatgactgggtgtcattgcattccacctgtagcattctgttgttgtttcttcgtttctttgtgtcaagtgagatc

SEQ ID NO: 457 - protein, 480 aa, Mus musculus
NLNLDSKMNYCMPEVHEVCPAASSNCYMQVTDYLAYLEDSPALSGRDVQAVPSSSIYMEQAWAVNQPYTCSYPGNLFKSKDSDLDMALSQSSQPAHLPEEKPFPQVQSPPHSQKKGYIPSYLDKDELCVVCGDKATGYHYRCITCEGCKGFFRRTIQKSLHPSYSCKYEGKCIIDKVTRNQCQECRFKKCIYVGMATDLVLDDSKRLAKRKLIEENREKRRREELQKSIGHKPEPTDEEWELIKTVTEAHVATNAQGSHWKQKRKFLPEDIGQAPIVNAPEGGKVDLEAFSHFTKIITPAITRVVDFAKKLPMFCELPCEDQIILLKGCCMEIMSLRAAVRYDPDSETLTLNGEMAVTRGQLKNGGLGVVSDAIFDLGMSLSSFNLDDTEVLQAVLLMSSDRPGLACVERIEKYQDSFLLAFEHYINYRKHHVTHFWPKLLMKVTDLRMIGACHASRFLHMKVECPTELFPPLFLEVFED

SEQ ID NO: 458 - DNA, 194534 bp, Homo sapiens
  misc_feature (1)...(194534): n = A,T,C or G
aaaggaaataagaattgagagatctgaatagttgcattactagtgattttttaatacttttctgtagtttaaattttttctccaaagagcatgtgttccttttatgttctaaacaaataaactttagctcagactttaccatgttatttctcttcagtaaatttaaaactaattcatggtttcagatagtgttcagcatacacatggcactgtgtaggatatcaaaatttgcttgccaacatcagtgagtatatacttgtttagtttaattaaaaattattgccaagtaagaaagtaacattaatattttattataatttattattatatttataaaaacagccaagaactctcatatgattcatttttttattttgagaaaaaaagaatgatctgtaattgtggtttgcttttaaaatatgactttttttagaaccagatatgatagactaattaattggctcctaataaatagtgtgcctacctaagtgattattaaactctatcagttaattgtaggaaagtaaagagacaactgtttacatccagatagattttagctctcttgagaagtttcatcaaactccaaccgtacgtggttacagggttgtgtatcacattctgcaaggtacagtaatgtgccaattcaaagactttgagcaatgggccggaggcagagggtgtaagcctaacactttgtttcttgacccagtagccaaagtatgctatgccttagaaaaaaaaaacctgagatcagctgttctgatcaccttgcaaattttgtgatgcagccaccaccattcctagagtcgattttagccagatacatgcaggaaaatacaaagaatatttatgctatttttctttgggataatttttcccttgttccccagcccatttataattcctgctttcagggaatctatatttatgacaacccaatcatcttggcctgtgcactgcatctcactgtgaggaaccagagccctctgtggaaggcagctttatagaggagaccacactgttgacagattcctgcctcctccctgtgggtggtctgaagcaaggaaatctgagctttccagcgcaggcctggcatgtgccaggaaatttagattcgggggagctgctatctattacagttatgaaccttctgaaaaccagaattgcaggtaaccagtattccttctgcatgccaaagcaaaccccgggcccttaatcttcaaatgactggactattaatattaaaatggtttctattatatagcctgggtaaagatttgttagtttctgaggtaaagcaacaacaacaacaacaaaaattgaaggacttttactttgaaacatgtctaaattagcaagaggaggaagtatgtttgttatctattggaagaaacacttttagaagcccattgggggaggagatagactcagatttcttgggagtcagcccagtcttggaaaaaaagttctaagaagtttagtaggagatgccaaggcacgattagaggaaggtaaacctgattttgaatgctgcatagaactaggtattcttggtaaagttcctgaaattttctgaacctttctgtcctcatctaaaaaactgagctaataataatactttttgtggtagatacagagggaaatgagataagaatggatgtgaaatgcctgaaatttgtggtgtgaagctcacataactctttacctcattattaaaatatattaaaatgcttccaacccattataaccagtttgcttttacaatgaaaatataatttttctcatttggtaatgagaatgcagtatgcaaatggccatgtctaaattagttttggatcaattaccacttatgatttctaccactatataagcagctgctaacattaatactgtaattgtaatcccccttgaccttaccctacacatgcaacttctattgctagaggaagtcccaaccctagggtgttggtgctacatccaccacccctacccaacctgtagccttttgtatataaaatgtaggccagctacctctacagcaatggttttcacactttagcatgcacttgaatcatcttagagtcctggatgcccaaccccagagtttctgattcagtaggtctcaggggaggacagataatctgcctttctaacaaggtcccatatgatgctgatgctgatgttgctgatccaggaaacatactgtgagaaccactgatctatataattcataaaataaactcaggaggttttcgtctttttcaatgggctagactagtttaaatagcattggaattatctgttctttaagagttaaatggaacccagctgtgaaattatgtaatcctgatacttcttccccccatttaaatgatagacttttaatcaccatttctgtctcttcttattacattttagtgcttcctcttgggtcagttaatttctgttttgctaagaaatcatccattttttctaggtttcacatctattacaatggggctagttctagtactttcttaataatcattttcatttttgtgtgcatgtttttctctatttgctcaatcctagtatttccccctcttcttcctttaatcatattaataagatggttatatattttataaaagaaccagcttttgaatgtatttgttctttctactatttttgttttccactatatttcagcatctatctttattaattccttcttcatactttatttaggtttacatttttgttcttcatgaaacttactaaggttagtactatgttaacgtcttagttcttcagtaatgaagctattatagctataagccacacatttttcctctgagtatagctttagctgtgtttcataactttggatggaacatattctcttttttattaatactagatagcttatgattttaattttgcttttctcatgaatcttacagctattataaaggatgtttcttatttttcaagtagataagatttactagctattgctttatttaaaatcaattttatttgcttacgatctaagattatatcctatcaaaatatctacttttaaaaaaaggtgttcattttaaccttgtgatttatattttattaatattccatggacaatcagaaatctattttattaactcatatgatgtgagttctgtgtacaaatctattagattgagtgtgtagaatatgtcgttcaaatatttatgtcctttcttgtatttgggctccttgatcacttccaaaagtttcaaaatcatttcccaaagctaatataatctttattctaaaatctgaccaagaaaatacagactaaaaaaaaatatgagctaatttcacatatacacataagggcaaactttggaataaaatattaccaagtacattccaaagccatctcaaaagaaagaatactctatgatcaagaaaaatttattcctggaattaaacatcgttaaaaattaggaaatctatcgaaatatttgtccaatcaataaattaaaggaggaaaaagattataaaagtacatgtaggaaatgcatctgtaaaattcagcagccatttttaaaaaacttagtcggtgtatccttctgtttcacttaaacatgataaagactatccaccaaaaactaacaagtaacagaattctaatggcaaaactctcaggctccttgtagtaaaattagacgtaagagaatgtatcaattatctcttgtcccagtaatgttgcataactatcaaacttcagtgacaagtgataattaacatgtgtagctcacagtgggaatcaggggatctcagctgggcctgcttgcacgtctgtggtcagctatagatcatctcagcagctctgcgatgataatcgggcatgctcacgtgtctggtgtctggggctggctagctgtgggctgattgaggatggcctctactagaacattggaaaaactccacaacatattctcttcctgcagcaggctagcccaggtagcggccgagaagcaagagcaagtctagtgtgagaagcacttttcaggcatcatgtttgctgaccaccctttggcccaaacactcacctcactaagcctagactcaaaatatgagggcactgcaaagattcacagcaaagattcatggcacagggcctagacacagggaggagtctctgtatttgttttttctttgtatttgttttatcaagtgaaaaacaaataaggatctctgcttccatcaacattattcatctttgtttcaggggtccctgtgattttagttggccaagatgtaactggcataatgaatacaaccaaatgagaaatattaccttttttgttgatgatgtgattgtatacctgtaagagtggaaggactccagtaaaaaactggagtgcaacaatcagtaagaatatttgacaaggctgttggactaaaaaataaatgtagaaaaatcagtaagtcttctttatagccattcgttcaacaaatatttattaaacactcactgaataataagcattcatctggtccctagtacagtcgtgaacaaaagaaaaaaatcattttctgcatagggcttatatattagttgggggtaatggaaaataaatgagtaggtaagccagatggtggcaagtgctatggggaaaaatacaaagccagagaagaagtatagtaaatgcttagccgatggactggatggcaggcagtggtgtgttgttttctatgaggtgattagggagggcttcacttacaataagttggcatttgagcagaaacttgaggtttgtgacaaattctgctgtgcagacaactgtgacaagcacattccagttcaggaagagtgaacagcaagttcaaaggccttgagacacggttgtatgtggtatactttatttacaagaattatcaattacaaatggagatggaattttcaccataacaacataaattttaaaagacttaataagatacaacaagaaatgattatttagaggacataaaacaaaatctataaaaacccagggaaactatttaaaaaacaaaacaagaacagaggctaacttgtcttttaccaggtacttgaatgtgtagaagtgactatatcaaaacaactggatattggcaaaggagtaaacaaattgatcagtacaacagaatggagggtacatctagaacggttgttgccctacttgctaatacattcaaaagtaaatgataggtggataatggtacacattaatttaaattaagcagcaaacatgtattgatttgctattgctgccataacaaattatcaccaacctagcggcttagccaacaccaagttagggccttgcagtctgtagggaagaagtctgatacaggcttcacaagggcttaggtttcagcctggagcctctgagggagaatcaactttcttgccattctcagaggtcagccatactccttggcttccttcctccatcttcaaagtcaacaatgttgcatctctccaacccttcttccatagtgacatctgccgctcaaggattcaggtgactagattgggcctacctggataatccagaataatatccccatctcaaaatctgtacccttaatcacatctgcaaagtcccttttgccatgtaagatagcatttttacaggattcggcaataaagtcatggactttttggggaaccatctttgtgcctaccacaaacattttagagaaaatttgggagaataattttataccccaagtgtcagggaaatgtttataatcaatacagagctaattaataagggatagataaaaagataagcatactgtaccatgtaattttttaattgcatgaccaaacatatcataaacaaactaaaaaatacaggctagataggtgtcttacaacatgtggcaaagtgttaatgtctgctttgccacagcattcataagaatcagtagggaaaatggggaaaagatataagtagttaactcacagaaaagcacattcaaatgatcattaaaaccacatgaaaatacgctcaacctcagaagttttcagacaaacacaaaagtttatggtaacaatgagtatatttagtttcctagggctgcagtaacaaattacatgagcttggtggtttaaaacaacaggaatatatgctcacagttctggggagaagaagtttgaaatcaaggtgttgacagggccacactccctctgaaggctctaggagtgaatccctccctatctcttccagagtctggtggctcctggtgttccttgatttatgaatgtgtaattccagtctctgcctccatctttacctggccctcaccgcttctccctgtgtctcccctctgtgtgtctcttataaggacacttgtcattcaatttagggccagccagataagccaggataatttcatgtagagatccttaattatatctgcaaagactccctttccaaattaggtcatattcatagttttgggggattaccacatggacatatgttttgggggtccaccattcagtcactacaatgagatacccctcccatcaaattagtaaaattttaacttttttcattgacatatacaagcttgtaatatattccaaatacaaatctaccaaatatatgtattacagatttaaaaaataattagcaaatatttcaaaggagcgataatatccaccactgcagttagatgaagagatggggggagtctaatacattcctgtggtctttgaacttttgaaaagcaatctggcaaactctattaataaaaaacacagggagatatcatatatgacccagcttttggaagctagcccataaaaataaaagcattgatatgcaagattctgtgtacaggaattttattgcatcattgttgtagggagggaaagaagaatctggaaaccaagcgaatgcccagaaattggggaatagttgggaaataaatgtggtgcacgtgtatcatggatattatatactgtatgcatagagattcgagaactacatggatggatgagtattaggttttatcatggccagagtggttggtagatcatgcaagaatccatgtttgagggtttaagtgaaaaaaattcctttcttttgagtcgcaacacctggaatagtgtatcaactttgtccttaattcctggtgtaactgagcaaagtcacgtgtaaccagccaccctgggtctctggttgctcagcctcaggtgaggaggtggcactgcctgtgagtatatgctaaattccaggagtagcaaagtgttctgccctccctcaggcatagggaaaatattgttttgtgttggctggacagatctagagatgtaatcggtggcttttgaagagtcattgctgagtaagtgagaaaaattttatgccatttagtctaggaattgagagtcagtgttgggatgtgcaactcaaagctgtcctgctcctctttcctgtaattcccctggagtattttcagcaataggaacacactgaaaaagtacactgcttcctcctccagagaaaaccacatgcatttaaaggtataaactctggtatgtttgctaaaaaaaaaaaaaaaataaataaataaataaaaaagcatacttccccagaagcctcaaggcttcctggaatttctgttaagaattcagatgtactgatgataaatttctaaataccacaatttcagccaattctgttaacaaataggaaaaaaaaagaaagtttttatgaccacagaaactgttttaaaaaattgtgggggaaatgcagttacacttggtaatctgtgaaaaacagagatcagatagagttcttgatcttttcaaattttttgcatattgtataggatacagcatcgggtctgtaccaactacaggacacttacaaataagttattcacattaaatttcttgaaaagcatccaaagatcaagttactcattctccttcccccaggcaaggctggagaactacacagcccaggctctttaaggtctttcttatttttaaagaactcttagttataatgcatgattcttagtttcctctacatttttattttattctacagtgaacctgaattacttttcttttttttttttttttttttttttatgagactgagtctcactcggtcgcccaggctggagtgcagtggcactatctcggctcactgcaagatcagcctcccgggttcacgccattctcctgcctcagcctcccgagtagctgggactacaggcgcccgccaccacgcccagctaatttttttgtatttttagtagagacggggtttcactgtgttagccaggatggtctcgatctcctgacctcgtgatccgcccgcctgggcctcccaaagtgctgggattacaggcatgagccaccgcgcccggcctgaattacttttctaagcagaaaaaaaaatattaacttaaaaaacttatctatgtgatttgagaactatagttcataaagtattttggaatgaatttttaaaaaacaatcaaatgagtcacaatccataatcatgtctagagaccctttttcatgctgatttcttacaggaggttacaaaggtgagagacggtgtgcatgcagcaatggagggaaaggccttccatgtaagaggaacatgaggccaaatcttggcaattcacttcctccctaaggctctatttttccatctgttaagtagagatgacgataattcttatctgtacagagttgttacaaggcttagggtaaaaagtatttgaaaattgtacccagtaactaacaatctatgaaaatcagagacggtatttcttcctggcctcgttttcttcttccttgtttaaaataatcataaacaaatgcaatacaagatgtgttaggccatttgtcctcaaaatactattggcctcttaattatatctgaataattatttgcatgaaattaagtcaactttactgcaattgtaccgaattggaacaaataaaacttcaggtgggagaaatgttagaatcaggtttgtggttcccatggggcgtggatagtacctagaagggagggattgtaggggactggtaagcttcagatttttgatctgggtgccagtgacacaatttgtgatcctttctcaaggcactcactttcaatctctgcatgtgtctatttttaagtatgtgacactttaataaaaagttgaaaccaaaataaataaataaatatcctctatgtagtctttaacggacctattttcattttctcacatttcatatgcacaacattaaagaagaaatagaaattcgatgctttagaacaaggttttcaactaagggctggaatcaaactgacctaagagtttattagaaagtaacatgaaaatctgccccccagagatggtgattgagtagatctggggtggggcctagaaatatgtattttttaaattcaaaagttaggagccactgctctgaagtctaaagcacgggcccttacacgtgctacaagttggaatcacctgaggcatttaaaatgcattatgggctgggtccaaacccacagcttctgatttaattggtctgggatgtgtgacccgagcatccaggttttttaaagctcccaggtgattataatgtgcagcatcaagtgtggaacagctctctaaaacagagggaaggagtttggaagtctgttgtagctacttaacagcaggcgagaacagtgagggaacctcacatcatttaactgcctcaagacgaagccgccagcatcccaccatttccctggcctgtggatgccacgtaaggcaagtgcttactatatgtttctgtaatgagtatgcatttgtttatagggccttcataactcgtctgggtcatcaccatctttttagcctgtaaatttctaaatggcaggggcaaggacaggagaactgctttgtaaaagcaactaagtgctacaatgaaatagatgatcacaataatgcagaaattcctttctgcagctcgccagagaggcaaactccagcattttatatttcatctgcccccagtgacttcactgtaggaagaggaaatgcagaaaaacaaacgtcttgaagactgaaagcctgttattcaaagaggttagcagtagactgttggaagtaaggtatgtattccaagattcagtctgtgtggtgataagaaatggttgttttgatggaaaaatttatgcttcctattactcactcatcacttacacttcttattaattcattgtctcctttctaacccatggatactacctggcattcagtgccttcaaaagatgtcttccctcagatatgccttgtgatttctcatactatacgggtagagttaaatggggttagaagtactagggccactcattgtttatgaaggaagtgaaagttgctccttgaaatcaacaaagattcagaacccaaagtttgaatcattttacctatttgagaaatcaccttgctaaagggctcttcggcaggaagtcacaaaatcagtactcagttcttgctgagttccctgaaactcaaacctaaagtgtgtggatagccctatttaactgacatcccttaaggagccatgctcctctgccaggaacatcctccccctccttggtgctggagttaactcctgatcaccctccacaggatacctcctttatgctctcccggctcaccagaaaggaggacagggcttgctctgttctctgtactcttacagcacttttgttcctgtactggtcataggatgtgtcacagtgtgttataaatatttatcttctggtcaggctcttctgttagacctaggcttttattactggagggaaacttactcatattctcagcctctgaactcagtcctgtgccttggcacatagtaggggtcacaccacgtaattgcagtagacggtgtttgcaaaagaattgcccgtcctaacaatgtggccatatttattagcaggagctttgggaagtcaagcttctaaccgaagccgacattatcctaaaataggaagccacatcaacgctgccttttgactcaataaatgtcagatcttattccatccaaataactcttgactctccaactgagctctaatggaagatcaaagagcctctgagagctggtccttttctccatttcaagaagtgggttaatgcttatagttaattctaagctcttgactctaggctggaatggcaataaaggcatatctgacctttaattctaagtaaaataaaaagactggagagttgttacagaggcaaatgtaggaaagagaaaactaagtggaaatttggggtaggaggagcaaataatctttagatcagaaggacctagatcacctatctgtgctgtccattactgcagccactagccaaaggtggttaaatgtaaattaataaaattaaataaaattaaatggttggtagccacacagggctaatggctcccatattggaaagtgcagatgtagagcattgacattatcacagaaagttctattggacagtgcttgataaattccatcgctttacagatagggaacctgacagctggagaagttcagtgactgacccaaggattcatacatagttggcctagacctgagacccaagcctcaggaaccccaagctggcctcattaacactctgtgatacggggttttcctaagccaaagaaaatgaagagggctaacaagtttcaattgaattcaaaagtgcagagtagccattaagtagtgttatacaggcaaacttactgaaataaaatttgcaagcaaaaaactcctggcacaataattgtcttaagtggaaaacttaacttctgaacaaaaacttgtctttgtacttaagtcaaaacactaagttatgtcacagtaaaaagtaccattcaatcactcaatttaatgtcaggtgaagcagttgcatactaatcaataacctcagatgcacacatttgtgcctatttaaatgcctgccctagtaatcctatactgtattattgtgtagtaaaatagtccccaaagaaaaatgtaccttcttgcatcttcgaagtatacatgcatgtggttagggctatcacttaccatctttagatattaattacttggcttttccaaatgttgtgaaatgttttttcatatttctatcttgagctagtttcgataatacaatgctgtgcctatgtttgacctcctataaagaatatcagcccccgttatatatttaaatctggtttccaggtggtgagttttcagacctaggacagcatttaaaatataattgtgtgaggaatttgagttggtatcatagttacagggacatttttggacatagtatttcagaaagctaacatggattttattgaattcacaggtgatttcttacatttcagtgaagacatctctatcctgtttgttttagcaccttggatgattgtgctgagagccagtgtattattagaaagcagcatgctgctagcattaagggaaagtttccttgctagtccctagagtcaaacaaataagatttgtgtcatttgacttgaaatacagaattctagacccaaaatgacttaatggagttccttcacaaagcaggaactccaaggtagtgggtttaatttagttaattgggtggcatgacaggtcatcaaggtgccctccatcttgttgccctactattgtctccgtgttgccttttgttcccaggctgtccgctcagagtcacctctctaggcagcatatgttcacacagccacatccaaagaccaaaagagaagcagtgtcttgtcacatgtgtcttcattacaggaaggaaaatatctcttccagaaaccctcctcatactacctctagcaaactgcctcttacatctaattgcccagaattgggtcatgggctcataccttagcattaagggaggttgggtgagtcagttactcaataatgtgtaacaaatcactctaaaacttagtggctttaaacaactattttttacctctcatgattcttcagtctgggctgggctcagcaatgtggtatttctgcttcacatggcatctgctggagctacaacatccaggatgtcctgggggttggccaggcatctaactttcttcacgtggtctctccgtttagctagcttgggcttcctcacagcatggctgcctcaggatggtctgactgtttacatggtagctggtttccaaaagagtataaaagtggaaactacaaaacctcttaaaacatagtctcaagccacacagtgtcacttatgcactctgttgatcaaagcaagccgcagggtcagctcaattgagaaggagtccacttctcttgatgaaaggaatggcaaagtcacattgccagagacatgcagggtggcagtgattattgcagccatttgtggaaacaatctaccacactggaaatccaagtaccaggcattttcagactctgaaggaaaacaagatggttggtaagaaagagtctgagtagggtgggtaattaacagtgagtctaaactaaacttgatgctgcagccgccacaatggcatctgctttgccgcactgatcacaacctggacacagcctattttagttaagcctccctaccctagatggcctttgggaatgtaatcaggccatgctcaggaaattataccctatacccaaattccatttgaatgaactgaattcatctggcctcattttattgaaagttttagttggtaaaagaatagattactgtacctttgtaacagaataaaaatgttcatgggacagataaacactacattcagcattatggcaaaatgatacaatttgattaattgaggtagcatgtccttggattttgcaatattgtcttcttttcttttttgcatgtttgacatagtatataattttaaataaaatgacagattaccataatgagctagagttttcttagtaagaaggggaaaggcatttctagttgattttcattcctttctctatgattttcatttctttctcttgctaggggcacagcctaggaagggagaactctgcagtatgattgaatgatactgggatgggtgactccacattctagggaaagctcaatagcttaatgatcaacacgtctcaacattctcaaattcattcaggtatcagagcttgtagaagtcgtgataccctttcagaccaccccaaaatgatgatggccaggaacttttaaaagtaacatgcctaattttgggtaaaaccagcttatattttatacttgattctgggacagaccagtgagtggtagcaggtgcaaaaaattatgagcaacaaacaaaaactttgcagctgagaaattctatcaaatgctatttttagaaaattgataaaattgactaaattttaaataaattaaacttttttaactttagccaaagttctgttttttttcattgaaatgcctcagtgtagtttatgggaccccaatgttttgtatagtccaagattcccttgccatagatcagtgagagggcccaggagccgagggatctggtccaaacatgcagctaaaatcccttggttatagcattctattattgttattgattttcttaactctaacatttaattatcctgttagaactgtagttgaaatgagaccactgacttctttactcgacaagatttattgagagtccactatttgccaggcacagtgctgagaaccaggaagtcattaatgaggacaagatggttcctgacccccagcaggaagcttaacgtcgagccagggagaagggcttgaaacaaggtgatgcacacagtggagaggacagggagcttagaggacggcaccagcacagcacactttggggtcagcacctacatctcagttcagagccttgccaccatctaaaaatataaatattagaattggatgtgtccctgatgcttctggggactgaaagacttaatttttacagctactatggccctggagcacttaaaaaagcattttagtaaaagcaatccatgtttatggtaaaaatagtaataacattgagcagttcagaaggatataaaatgaaatgtagaaggccccctccctatcttccagccctactccctgtaggtgaccactagttgcattttttcattttcttgtataccttaccagaaatattgcagacatagtacaaacatgtgcacacacattgtatgtaacacagattaaattttttccttaaataataaaatttggcaccttttcatacctctctatataactttcactttatgttactcttttttctcaacagccacatattagtccattgaatgattagatgtaccaaaatttatttactgagtcttctgttaatggacatttaagttatttccagaatgttgcaatttcataaaacctacaatgaacatatatatatacatatatatttacataaatgactatgtctgcaggataaattccaagatgtagaatcacagtgtcaaaaggcatgtacatttggaattttgtcagatattgccaaaatgttggactaatttgcagtcttgttgacaatgtgcaaaagagccccagttatattttgcaagaaatgtagagtcagccctccatatccatggattctgcatccatggattcaaccaactatggattgaaaatatttggaaaaaaaatgcatccatactaaacatgtataaaccttttttcttattgttatttgctaaacaatacagtataacaactctttacatagcatttacattgcattatgtatcataagtaatctagagattatttaaagcatatgggagaatgtctgtaggttttatgcaaatattacacccttttgtataagggacttgagcatctctggtgtccaagggaggtcctagaaccagtcctccacagatgccaagggacaatggacaataactcatgtgcgcacagaaacactgatgaagctttgaaagcaaagaggagtttgcactttatatttaaatatgtctaggcagagccctgtgtcatttgctaataaaaggaagtggcaggactcaatattcaaaaggcctcccattttctgtgtctttcttctaaagtctttaaactgctgcatcataggaatttagtttactaaatccaaattacaaatttcaagtacaacttggcttctaatctcctattgtgagaggaaggctgtaacaggaacctattttgtggatctctcttttgggtaacgctctcaggtggtaaggtgtggaaaggtacattaaggaaaatgggagggcagttggaggggatcaattagtgttttttgcttaattaagcacagtcctctgtagtcccaaagcctgggctctgttgatctgcctgaaccacttctctttggtacggaaattcatgagaacaggacatcttacttgagtaacagatgccacctccctatagtcaagttagtcaagaaaattccaagaattattttaaggtattttatttcatgcctggcagagcatagaaaaatattagcttctagggctagacgactgctttggggtttccaagaaaaaggtttcaaggttagtcattactatgcaattctgctgctgtgactgattttaatgccatcccaggatcaacaattgctagaaaaatcaggcttcttgtcagaaaaatacatttcttcccctaatatctaattaattaaggtattttaaccacttgattgtgcatcgtgtctcttggaggagaaactgaattgagttgtcagagaatcaaaactttaatgaccaaagtcctttgaatataactagggaggaactttgattcataatcattttgtttcaaaatgctgagtatagtttttgaagtttacagtgaacatgcccaggatatgatgctcactggagagaacattttgtttataagatgtctcccgtgttaattcagacatttcagataggcccaaagagggtctcggcctggtgcctctccgttgtttgcagaacatggcaggcagacactccaaatgtatggcccaagagagagacaggccttgcatttaattaaagtaacccagtaaacttcctgaaagatttatccccccaaccccaccccttcatatctcaaaagaaacgtaactaagcaccaaatatttttctttctgctagtgttttgaggtttttcttggctcattttttgcagctcagacactatggaaaactttattgccttgcaaacatgtctctgggtggctgaggaaacagggaaagcacaacctaattcatttcttttctataggaaataatgcccagaagagtaaatgttgtctgccacagttaaaaatcagaagagaggagctaggcattgactttaaaagtaaggaggtttttcatgaaagacactggaggcctttgctggggatgggggaatctataagtaaaggtgaagagattttaggtttgtcaccatgatagggaacatcccaatactctgaggtatacatatagatataatgaatttttagtcatgtcagtaagtagggagattgacttcagcctcaaggtatttaaaaatatgttagagagatttcatgaaagaaaaaatgtgacagccttttcgatattttagcctaggctgcaattaatatccactaaccaagaaacagactcctcgaaataattaggttttctttgagtagctgctataataaaaagccaagtggtattttaattttcacgtcatttctgaaaggcaacttgtattttagttcttggtccctccctcctcaactccaaaaaaagaaaagactgatagagggatagataggtagatgggtaagtggatgagtagacactgatgaacttgctatttacctgaagaaaaaaaaatggaatgcaatctctttgaagggaaaactatataaaattgccatttttgtaggttaaaatgactgaatgttggcaattttttatgttttaacctaaaagaatatgcatccaagcacatttgaacttgtgtttgtctttactaaacatttagaaatttgtgatacagtttatgaaacatctttctcatagtgaagttgtctacctaaagatcttgttggtgctttaaatcctacgtgtttcatttctttaaaaattccttagtattcatgcagctaataggcagcagtaatgaagccctcgtctgtccacttgccagccttcccatttggccagcaagctctggcttgaaaccccacactgggctcttgtccatttttcatgaggctcctcatcccctccctcttcttagccagcactctggacaacagtcagaaatcagaagggctttatttccttaagcaagtcacttctttcagtgtttctggcattgctttggtgcagtggctttccaattgatgaccacagcccacagtaagaaatacattttacataacgaccaagcatacaaatggtgtgtgtttgtaaatcaaacaaaagtttcacaaaacaatcctaactcttaagaaacgcagtgaactgacgctttccagtctacttcatttcattttttaaaaggcactgcttgctacccactaaattgatttcacaacccacttatgtgttgggacccatagtttgaaaaacactgctttagtgtacttgattcaacccgggaattttaagtcttggcagtcaatcacaggcttgcttatatcggcagaaaaagacaggactattcattgctgggaacacggtaaaaacatcctttggcagccttcagaaaaattttttaatagcagtggaaataaacaggtattaaatctattaatggaggacagcctcagccaaaaaataacaaggggttaaaaaaaaagagcagtcacatactcacagaaagtagacagaatcctgcagaacctagttctagaattttgtgtccaagcacaactctcagctgagaacaacaggttagcctattttctaggtagtatggaatgtgtaaatagttcagatgtagacggtggaaaactcacaatgttggtttagaaatcctggctctgcagctgccaatcatacttcatttcttgttaaggccaggaactgagacttctctgggcttccagccactggctgtcttcatccacatcttggccttcacccagccttccttttactaccttgggtcacaatttgtcctgctccggccacttggtagaaaacttgccttctatatttgggacagaataaaagatgctcttaaaacctagaggaagtcacgtatcaggtgctactggtatcatgatgtgttaatgtaccaaatcagaatcctattcagtgcaactttggaaccacagcttttgtgaagctataatgtggagaaaatccaagacaagtgcacagtaaattctgtgcttggcagtgttcactatttatatgagtaaatgttgttcctttctcttcttggcctttggctactggtgtttccttttaaagttcatgccaaagtagggtgggaatttatcatttgacaatagaaagtgaactggatctaatcagtccaggagcctacatttgaattgtgttcctacaatgcaacatcaggttctgccttcaaactttcctgctccccacatcatcccaaaaacattttaaaggccatcaaaagaatgctgtcataataaagattctcaaacattctctagaattgcagaaagctgggacaacgctcctgttgaaagttagttttcttctctccctttcaagttgaccaggaagagctggaagagcatttttcaggatatcagaatcccagaacaactctcatctcacttacaaactaaaggacagtggcctcatacaagttatgcttcactagaactgattttcttcttctctaggctgggaaagccactcttggcctacattgctcataaaatgaatgaaagtttaaataaaataatgcacataaaaatactgtgacaaacatacagtccaactgcaggttctttttctgtttttgatcaatcaagacctaaattgaagtcttttaagtccttgtagccctaggaatctgatttttaaggtaaatgtgcaggtctcagatctgcttaaaggagagtgggtaaagctgaaggcgctgggtaggggacgaacagagttattcagtggcaaaggaaagaatatgaaaaggaaatgtgtgtaagatatctatgtagaacccactgcattgggtctgcaagtggtggtagatattctgaaactctgcaaaagcctggatttccacaagctttggggccttcaaaaggttgcttgagtacctatctgtgaatgttaaattttattccttggaatttacccaacttcaacttctgtctaacttgatcttcaacttcttactttacacaagcacatctcacttaaaagtgagaagggtcattttaagccccactctcgtgttcctcttggaaccccatgccgcccaggctaacggtgagaaaatgtagcacatgcccttctcattgccacatgcttgctcctcagagaaataaaggtaaagaaaggtattaaaaaaatagtgttttcatagaaggagatgttgcaatgagaaaactttgacataaaatttctattttatctagtcatactatggttactgggctttgaaactgagtttcaacatgaataaacaaagctgctagtgaaatgcgtcgagcttgaattgagtgtcctcagcctaagagtggatcaacattcttcagctatatctacaagccatctagctgtttgtccaaatgcagatttttgagatgtttggagaagaacctaacagttgaggctgaaatcttaaaccatatgcattaagtctcttatgtacaaaattcctctcttgcctcttagccaatgatggtgacagggttgaacggtgaagaaatggagcatgtctgggatttctttctttcctcccaactatgaatatcttcttgaaccaagctaaaaagagtacaaaaaatataatgctttccttagaaagttattgttttatgaaagcatgttggtattgttgaagctgttttgccaatacaggcttctaaatgggaagaggtatgtcatagttcaggctgctgtaacaaaatatcatagattaggttgcttatacaccaaacatttgtttctcacagttcttgaggcttgggtgtccaaggtcaaggtatcagcagattcactgtctggtaagggcccacttcctggtttgcatatggttgtcttctctttatgccttcacgtggtctttccttggtgcatatgtatgaagagcaaaatctctccatcttcatcttcacataagggcactaatcccatcatgaaggtcccaccctcagacctaatctaacccaactaccgcccagaggccctacctccaaataccatcacattgggggttagtgcttcaacatgtggatttgggcagaggaagacacaaacatttagcctataacaaggcataaccctccaagtgaacattataaagcactaaaaagactctaaccttaggaatcaatgtaatgcaaaatcacttttactctaggttaagaataggtataatttagcaattgtttatatgatagcagaagcactgttttcttgggcattttagttaaatttgagacataggaagttaccaggtagttagggttaaatggtcagtattcctgggagaaaataagattaatatggcatcagaaattggttctatggcttttttttttaattacactttaagttttagggtacatgtgcacaatgtgcaggttagttacatatgtatacatgtgccatgctggtgtgctgcacccactaactcgtcctctagcattaggtatatctcccaatgctatccctcccccctccccccaccccacaacagtccccagagtgtgatgttccccttcctgtgtccatgtgttctcatagttcaattcccacctatgagtgagaatatgcggtgtttggttttttgttcttgtgatagtttactgagaattatggtttccaatttcatccatgtccctacaaaggacatgaactcatccttttttaaggctgcatagtattccatggtgtatatgtgccacattttcttaatccagtctatcattgttggacatttgggttggttccaagtctttgctattgtgaataatgccgcaataaacatacgtgtgcatgtgtctttatagcagcatgatttatagtcctttgggtatatacccagtaatgggatggctgggtcaaatggtatgtctagttctagatccctgaggaatcaccacactgacttccacaatggttgaactagtttacagtcccactaacagtgtaaaagtgttcctatttctccacatcctctccagcacctgttgtttcctgactttttaatgattgccattctaactggtgtgaaatggtatctctttgtggttttaatttgcatttctctgatggccagtgatggtgagcattttttcatgtgttttttggctgcataaatgtcttcttttgagaagtgtctgttcatgtcctctgcccactttttgatggggttgtttgtttttttcttgtaaatctgtttgagttcattgtagattctggatattagccctttgtcagatgagtaggttgcaaaaattttctcccattctgtaggttgcctgttcactctgatggtagtttcttttgctgtgcagaagctctttagtttaattagatcccatttgtcaattttggcttttgttgacattgcttttggtgttttagacatgaagtctttccccatgcctatgtcctgaatggcaatgcctaggttttcttctagggtttttatggttttaggtctaacgtttaaatctttaatccatcttgaattgatttttgtataaggtgtaaggaagggatccagtttcagctttctacatatggctagccagttttcccagcaccattgattaaatagggaatcctttccccattgcttgtttttctcaggtttgtcaaagatcagatagttgtagatatgtggcgttatttctgagggctctgttctgttccgttgatctatatctctgttttggtaccagtaccatgctgttttggttactgtagccttgtagtatagtttgaagtcaggtagtgtgatgcctccagctttgttcttttggctcaggattgacttggcgatgcgggctcttttttggttccatatgaactttaaagtagttttttccaattctgtgaagaaagtcattggtagcttgatggggatggcattgaatctgtaaattaccttgggcagtatggccattttcatgatattgattcttcctacccatgagcatggaatgttcttccatttgtttgtatcctcttttatttccttgagcagtggtttgtagttctccttgaagaggtccttcacatcccttgtaagttggattcctaggtattttattctctttgtagcaattgtgaatgggagttcactcatgatttggctctctgtctgttactggtgtataagaatgcttgtgatttttgtacattgattttgtatcctgagactttgctgaagttgcttatcagcttaaggagattttgggctgagacaatggggttttctagatatacaatcatgtcatctgcaaacagggacaatttgacttcctcttttcctaattgaataccctttatttccttctcctgcctaattgccctggccagaacttccaacactatgtcgaataggagtggtgagagagggcatccctgtcttgtgccagttttcaaagggaatgcttccagtttttgcccattcagtatgatattggctgtgggtttgtcataaatagctcttattattttgagatacgtcccatcaatacctaatttattgagagtttttagcatgaagtgttgttgaattttgtcaaaggccttttctgcatctattgagataatcacgtggtttttgtctttggttctgtttatatgctggattatgtttattgatttgcatatattgaaccagccttgcatcccagggatgaagcccacttgatcatggtggataagctttttgatgtgctgctggatttggtttgccagtattttactgaggatttttgcatcaatgttcatcaaggatattggtctaaaattctcttttttggttgcgtctctgcccggctttggtatcaggatgatgctggcctcataaaatgagttagggaggattccctctttttctattgattggaatagtttcagaaggaatggtaccagttcctccttgtacctctggtagaatttggctgtgaatccatctggtcctggactctttcgttggtaaggtattgattattgccacaatttcagctcctgttattggtctattcagagattcaacttcttcctggtttagtcttgggagggtgtatgtgtcaaggaatttatccatttcttctagattttctagtttatttgcgtagaggtgtttgtagtattctctgatggtagtttgtatttctgtgggatcggtggtgatatcctctttatcattttttattgcgtctatttgattgttctctctttttttctttattagtcttgctagcagtctatcaattttgttgatcctttcaaaaaaccagctcctggattcgttaactttttgaagggtttttgtgtctctatttccttcagttctgctctgattttagttatttcttgccttctgctagcttttgaatgtgtttgcccttgcttttctagttcttttaattgtgatgttaggttgtcaattttggatctttcctgctttctcttgtgggcatttagtgctataaatttccctctacacactgctttgaatgcgttccagagattctggtatgttgtgtctttgttctcattggtttcaaagaacatctttatttctgccttcatttcattatgtacccagtagtcattcaggagcagtttgttcagtttccatgtagttgagcggctttgagtgagattcttaatcctgagttctagtttgattgcactgtggtctgagagatagtttgttataatgtctgatcttttacatttgctgaggagagctttacttccaagtatgtggtcaattttggaataggtgtggtgtggtgctgaaaaaaatgtatattctgttgatttggggtggagagttctgtagatgtctattaggtctgcttggtgcaaagctgagttcaattcctgggtatccttgttgactttctgtctcgttgatctgtctaatgttgacggtggggtgttaaagtctcccattattaatgtgtgggagtctaactctctttgtaggtcactcaggacttgctttatgaatctgggtgctcctgtattgggtgcatatatatttaggataggtagctcttcttgttgaattgatccctttaccattaaataatggccttctttgtctcttttgatctttgttggtttaaagtctgttttatcagagactaggattgcaacccctgcctttttttgttttccatttgcttggtagatcttcctccatccttttattttgagcctatgtgtgtctctgcacgtgagatgggtttcctgaatacagcacactgatgggtcttgactctttatccaacttgccagtctgtgtcttttaattggagcatttagtccatttacatttaaagttaatattgttatgtgtgaatttgatcctgtcattatgatgttagctggtgattttgctcgttagttgatgcggtttcctcctagtctcgatggtctttacattttggcatgattttgcagcggctggtaccagttcctttccatgtttagcacttccttcaggagctcttctagggcaggcctggtggtgacaaaatctctcagcatttgcttgtctgtaaagtattttatttctccttcacttatgaagcttagtttggctggatatgaaattctgggttgaaaattcttttctttaagaatgttgaatattggcccccactctcttctggcttgtagagtttctgccgagagatctgctgttagtctgatgggcttccctttgagggtaacccgacctttgtctctggctgcccttaacattttttccttcatttcagctttggtgaatctgacaattatgtgtcttggtgttgctcttctcgaggagtatctttgtggcgttctctgtatttcctgaatctgaacgttggcctgccttgctagattggggaagttctcctggatgatatcctgcagagtgttttccaacttggttccattctccccatcactttcaggtacaccaatcagacgtagatttggtcttttcacatagtcccatatttcttggaggctttgttcatttctttttattcctttttctctaaacttcccttctcgcttcattgcattcatttcatcttccatcgctgataccctttcttccagttgatcgcatgggctcctgaggcttctgcattcttcacgtagttctcgagccttggttttcagctccatcagctcctttaagcacttctctgtattggttattctagttatacattcttctaagtttttttcaaagttttcaacttatttgcctttggtttgaatgtcctcccatagctcggagtaatttgatcgtctgaagccttcttctctcagcttgtcaaagtcattctccgtccagctttgttctgttgctggtgaggaactgcattcctttggaggaggagaggcgctctgctttttagagtttccagtttttctgctctgttttttccccatctttgtggttttacctacttttggtctttgatgatggtgatgtacagatgggtttttggtgtggatgtcctttctgtttgttagttttccttctaacagagaggaccctcagctgcaggtctgttggagtacctggccatgtgaggtgtcagtctgtccctgctggggtgtgcctcccagttaggctgctcgggggtcaggagtcagggacccacttgaggaagcagtctgcccattctcagatctccagctgcgtgctgggagaaccactgctctcttcaaatttcagatggaaatgcagaaatcacccatcttctgcgtcgctcaggctgggagctgtagaccagagctgttcctatttggccatcttggctcctcccccggttctatagcttatgaaggaaagataataaataattatctttgagctaaggcagccaagtgtttgtaaccatttttgtgcgctggaccctattaactatctggtgaagtctatggaccccttcacagaataattcttttaaatgtgtaagataaaatacgtaacaaaggaaactaattctactgaagcagagctttatccctagacctttggggaccatggtccatggatcacagattaagaactcctcgtacttgaagcctaccaggagataagtaagggagagtaataaggtttaaaaaggaatttttcagtgttataattactgtcttacaaggcaatgtgaggatgaaatacagagttttgaagtgatctaaaagtagaacaagaactcattgcatttggccgggcacggtggctcacgcctgtaatcccagcactttgggaggccgagtcaggtggatcacgaggtcaggagatagagaccatcctggctaacacagtgaaaccccgtctctactaaaaaaaaaaaaaaaaatacaaaaaaattagccagccgtggtggcgggcgcctgtagtcccagctactcgggaggctgaggcaggagaatggcgtgaacccgggaggtggagcttgcagtgagctgagattgcaccactgcacctccagcctgggcgacagaatgaggctccgtctcaaaaaaaagaaaaaagaactcattgcaatgcttgaggagagagtgcccgagaatgactgcagaaaccatagcttctttcactgattcacttctctctcatgaactttccaggtgtttttcaatattagatgtttttatttttctctcaggcaagcgaacatgttcaagttttctattgtaaatagttccagttctccatttatggaatcgaagtaccaatcaaattatgttctttgaaagttgaaaattaaaatgtaagccagtcatagaggttcatacctgtaattccagcactttgggaggccaaaacaagaggattacttgaagccgggagttcaagaccagcctaggcaatatagtgaggccccatctctatgaaacatttaaaaactagctggacgtggtagtatgcaccggtagtcctaactacttgggaggctgagggggaaggatcacttgatcccaggagttcaaggctgcagtgagctaacatagcaccactgcactccagcctggacccagagtgagaccctgtatctaaaaataaataataaataaataaatgtaatataaatgtaaggaatgaatggtgcatattcatcagtgagcagttctgagcagctgccacgttgggtgctgtgctggttactggaattataggcattttgagacaaggttcttgcccacaagaagttaaaaatctggaaacagttacagagaagtagaaagataatttcaataccatgtgatgagtaatttttttaatcttgttgtctcaaatgttgcaatttaaatagagggttgtgatatggctttcttttctataatcctaggttctttgtaagtgaaaaatctgtcatcattttgtataaatgataatattatgctttctattcagaagcaaaaataggtttttcctggagatgctgagcagagctctagaggtcaaatattctatacccctgcttttgggccaggcatttgcagaccacacaaatagaataaaatctgcctgatttttaatatattacataacttctcagcaagtcttaccaattttaacactgttcaaattatttctcatttcttttccagtttctttatagcatactttatgcctgcttctgccagtcctgaaaatggaaattagccagacatcattatggcttttatatacttcatatattttatcaaataaataataattagtgagagagtgaacaaatgtacttgcaaggcattacaaatctttctgttgtgtaatctgtaattcagttccctttaatttttctgcatatcttctgttctctaacattattatggatttctttaacccaccttaaatccccaagcccttcatcagattagaagaacagaactagacttctgcctatttggaggaaaaacccagcataatgaaactgtccatgcatggggcaaatatcataccataattattggcaggtgaatgcattattaatgttgtcaccccttaattgagaacatcaattatttgataaatgtcaaagggctgatttattgtaacaagcttgaatcttagagactgccagtaattctttatacctcatatttatatgtaacattagttttggccaggaaagctcttgagggaaggcatccagaaggcagcagctgaaatttggggtaactttataactagcttaattctacatatttctagaactcactgaataacctttgttggtaaatgacataaatataactttggtaacttttcacccaaaatcttgtatagatgaaaaaactcacataaatcatagattttagatttgagagggaatatatagttatatagaccagtcattctcaaaatgggatcccaaccagcagcatcagcatcaccggggaacttgttagagatgcaaattcttgggtttgctccagactcactgaatcaaaaattctgggggtgggactcagagacgtgggtttctacaagctctccaagtgattctgatgtacactgtattttgaatattactgatttagattggcattactgacattttgaaccagatgattctctgctgtgagagagtgtcctgtgtattgtaggatgttgagcagcatccctagcctctacccactagatgcccgtggcacccgctcctcagtcatgacaataaaaaatatctccagacattgccagatgaaccctggggtgggatggaaggtgcaaaattgctcccttcccaaaattgcaaaattgataaccactgttccagaccaacttccaaccctgacacaggaatctcttctatggcaacgttgacagctacgattgttaccagtgtaagatatttgctttcccttctgcctttgaaagccatggaattgagaacttatacccctcctcctaaatcattactggaaacttaaatattttaagtagttttttattttgaagtttgcatataacttttataaatggtatacatttaatcatataaaagacaagagtaaatatgttttataaaatgtagttgattacgaatctttcttcaacactttgctccaacatcgtatcattcaggcttccctgagcacatacgactttccctcccctacccactcccagcagacactgggtccaccaggtgttttctgcacacttactccacgtctgttatagcattggtgttgcctcctcccttctacagtcttaagtcatgtaatcgtatccatcactgcatcctcaggacctagtcccctgccttgcacattgtggtaataataatggctaacatgtctgtacagtcactatgtcctaggcactgggctaagagttttcaaattcatttcctcataccttcaccaatgaggcaggctgtatcattattccttttgcagataacaaaatgtagatttgtaaaattaggtactcttttcaaggtaaaaatgttgagaaatgatgcaacctgggtttgaaccctggaattttgatccctgagctcaggctgctaataatcactgcactattgaaaagtgcttaataaatgtttggtgaatgcattcacgattaagttaataaatgaatgactgaataattgactattaagagctaatggtgaatgctttcagatgagttacctaaaagttcatacgtcaaccaattgtacaatgtgaataccaattattatacactaactggcaatattttggggaaatgatttagcaactgctaaaaacaatactacttagcatagccatacacaatagatgtttaaacttgtccttgagtctccaagtatgataatggcttaactcagaaggctgtctacaagagcatggaaaggaggttattaaaaaaaaaaaaaagtagaagactgcagggagatttcccacacttctttcttctcttgcagtccctggacatttcagtttctgggaaatgagtaaagcctgtggtgtgtgaaaatccagtagttattcagcctctggagtatatcagaattacctggagggggcatatttgaaatgtagagggttatggggaggtgaaactgaactgtagaatcagaatctcaaagggcatagcccagtctttcatgtagcgttttaaggtcctcaattgattcaactgtacaccaagaactgagagccaatgcatttcactgtctcctgtcagtcagttcataaagtccaaagaaggggacagaaaagaagccagcaaaaaccagagttggatggctctcaaaaacccaaacaaaaatacacattttcatctcgctcatgttggaatctaacaagaaacagaagtatggccccccaaaacagtgacatgatgatggtggcaaaacatggctctccaaaccattgcctcaaatgtcagctttttccccctgacctcttccccttagaagaaaactgtcaaagttttcaaacagcagatacattagccacaaaggtgcctaactgtaggctggcccctcaaagcagagaatttttaagaaagttcagagtgtcctgagagagtattcgtttcaacttcatttaatagatgaagaaggtgggacccatttgtgtggccaattttaatgttgcataaacttagaagtggttattaatgccttgggaaaatgcacagagcatttttttaaaacttttatttaatttttagtttttcaagactataaatcttttttgcacgaagaaaataagacattttatttatccttgtgtgaatttaaaaatgactgctatatattgttttctatattttttccaaacaaatatttatgtttttcttaaaacccaagatacaaagttcctgtttcaacaagctgccgtgtaaatcaagaactaagcttacttgcttctttgctctttctcatttttctcttcaatcgatgagtagatggatagataaggaaaaatagatgaatgcgcaaattctcatacatacacataatttagagttcagatattgtacattttataagtacacaaagctcataaaacacaacataaaaaaaactgtctctctcatagaaaataaatagaaaggcaaataatatatgtgatatgtaagtgaaacctttgctggaagtaaaattttctattaggctcagtgtttcttaaaatttaattaaccaacaaccaccaattggggaagcaacaatgccacattgaggtagtgaaccaaataagatgaatcttcccttcactttttctaggcagacacctgtgaaattgagctgctttgtatgtcatatataaggtataattgcttttgattatgataatttaaaaaaagaaatagacaagaaagagagaagggaaagaaggaaaggaaaatggaaaggagtgaaagtcaccaaaattgttcattacaaaggctataaaaagtgtttagacacatactcattcctggcttcttgagataattttttaatatttggtaatactgtgcatgcatataacccacaaagaaagagaacacaaatgaatctataggctcttcaaaatagcactattttgcttccctaggtaaccctaattgcttattttttgttttctgttctgaacgttctataatttaagtccatataaacagtatttcaatatagtatataccattattaggcctgtgtaagtgccatcagatgctattcatggcaagtgatacaggctttccatttatggtagtgatataatagttcagttttttaagtggatcattgtaaagaagtataataaataatagggcagatgtctagaatatgaatgtctaggcaacaagtttgttagatcaggtcagtatcgcctgagtttcacatttcacaggtgagcataatgttaagaaaaaaaatagaggattgacaatctttctattttgctaaataaagttatctgaaaacagaacaaaccaatatttatgctatcacaacataaagaaataatattttcctacccccaaagcaagaaaaataaaggataggcctttctgagaaaatatggttggtagattcaaaaagatacatacatacaggcccatagttccttatccaaaatccttgccagaaataattcagttttgtttgcttgggtttttgaggggtgggggggttcgggaagatagtattgtgctctaccgcaatgggtagaactctaccccagtgacatctgggggaacgccccattgcaaacacatgaatatttctgcagtgaagcatacaaatatttacactaagttggatcaataaagactatgaaacactcatatgaaatcaggtcagcttctgccaccaactaagttatgaaaaaactttctgtcttcacaagctttaggattttgagattaaagctaaggaattatgtgcatatatatcattgccctttttcttctcattttgttgtggagcagggaccactctttctgacaggcacaatttattctaattattcagttataaccataaccctgtggtagatgataagagatattaattaatgtcatattccactttaatcttattggagagatttccaaatggacacctgttagaatgtaagctctatgaagcagggaaatctatattgtccactgaattaccccaagcacttaaaggtgtgccagagtgcctgacacattgtagctactcagtatttcttaaataaatgaaagatttgcaagttaacagcctcctgcaaatactaaaattattgttggcaggtcctggatagaaagagtggagttgtggtgtgtgtgggtgtgtgtgtgtgtgtgtttaattcagagcaacctgttacattctttctattagaaaaagcacgtgtacatttgaatgcttcacacggattcttccattgtaaacagaatttgggtaagggagctccaggtgatgatgtcatatactgaggtatctgaaactctgagtcaaaaccaacaagtacttagtattgatatttgttttttaaaaaactgaatatttaattttctttgctattttggatccagagggtctaaaaataggtgaagggtcaatgaactttaataggaggaaagaccataggaagagtaaaataatcctgcgaatgaatatttgaagtttgaaaaggaaattgcttagtgctaaggatctgaaatgatttatatggtcacaacaaaagtgactacagctaggtgaaatatgatgtcaaaaaagaaactagtgtaattgtgacctaatcctaccagaaatgaattagttctgtcctcttgtcttgacttacatgctatggttttgagaaaagtgtgagtcaatgagcaaaaattccttgccagggaaaagatgtacccccaaataagggtaaggtagtatcagtatcctttaagtgaggggaacatgtgagtgcattacaaattgttggcaatgtttttcagaactaagacaaaatcctgcaggcacttaacaaacatggtatatagggaaattttatttggttttctggggggctttgagagggtttttggttggtttttttgtttgtttgtttgtttttgtttgttgttgttgttgttgttgttgttttgagagagagtcttactctgtcacccagactagagtgcagtggtgcgatcactactcactgttgcctcaacctcctgggctctagtgatactcccacctcagccttgagagcagctgagaccacaagtgcgggccaccacatctggctaatttttaaaattattatttgtagagaagagatctcgctgtgttgcccaggctggtcttgaactcccgggctcaagcgatcctcctgctatggcatcccaaagtgttggaattataggcataagccctatgcccagactataggaaaattttaaattgtccgcaatcctatccatccaaagattatggagctaaattattaatgagtagccactatcttctaaacataataacccaagaccatcataatcataatagctaataatcaaatattaacttaggacctgtatccttttctctacatcatttaccatgtgataaatattttcccttctacctttactattgggaaacaaagttccctagagcttacatacctgtactctgactattaaattaattattaaattaaattaaattttctcaaggaaaaaaatactattgtaatagtacatgtagtatatactgagacatacagtatatacttgattaagaaattaggctatgaggaatagccaggacaagcttttaagctaaaaagttattacattctaattctggtaagaataggagcttcttggaattcaaagagggcccaggggggtgtattttcttctaatgagaacctctaacaggaaaaaaaataataatagaaatactctgttcatccctgatcaagttcagtgtgcttcgttttaaaggatatcagagaagccctctctttgccctgcaaaagccctgtagtaacctcacaccacagcattggttcccacagccatttgctttacaagtttagccacactcaggaacggacattctagaaaggtccaagtcttatcttcattactctctttcccctgtttttttgagctgctgatcctgagagatagaacagagaaaaaagagcaagttctgattgtttagtattttcataagccgcatgcatacagtttcaggaataaaatgctctggtttaaaaacaaatggttgtttgattttgtaagaataaaaaaagaaggaatgacactttggttccagcactaaatatcctcttggtatatagaacttttttactgcctttctatcctcaacgaaaatatccagtaaaaaattttgtctgagaaaatagtgacaagttatcctcacatgcctagggagggctatggtttggatgttatctctaaaggaaaaatttgttagaccagagcatccaagggagaaggtattttggaaagggggggagcctttcacacccttgcatcattgtaatgaaccttgtcaggggtcactaaataggtagaatcctaaacatttctgtgtgagattagatgaaaactcaattctttttaattaacaagaaatgttacagaaggtaagagcttcagaaataaactagtcaagccactccactttacaaaaagatccagagggcaaaaggattttcccaagagcccctggctgattgggaacagaagttaggctagaattcactctgcccactcccaggcctgtaaatttccaggacactgtctgatttaaatctccatgacctgatgaactgacccccgttagctgtcttttcaagacccttgcaagaattgcatggatgccaacaatgcttctcttaagctccagctggaagggctgggacgtatctaatttctagccagtctgagtaatggcattatagataggtgctcataatgttagcacctaagcctgcaggctcacttgattaaatggcaacatggatctcttttcattcttgttattttgataattaaatgggatttccagctcatctctgacctgacacatgtttttcatttttaaagtgagtcagggagtgagcaattcatggtagtttagtagtacaaactatacccatagctcattaaaatgtgtttaaagattaataaaattgcaccctgtccagtagtaaacctggttaagtgtctaacacatcaggcatgcctttaatggcctgtttgcttttcaaagatgtgaagcaagaccaattattaaaaagaaagatgcaatactgccttagagttgcagtttttaaaatttattttgcatagaaccatcttttagcttttatgttttcaaaatataaaattctgatcagtgtgaccacattaaaaaaagtttatttcccaatctgagtaaacactatttgtaaaaccttaaatagcatagtttaatttttgatgctcaaatacattagatggtgcaaaaaaaaagctaagagttttgtgagaaaacaattcagaaaaagccaaagaaggaaggaccaaaattatttttgcagaaattattaaggtacatgtcaaaatttaaaaattacacttaatttcttactgataaagtgggcatctccttgctcaaaatacttgtcaaggtgaataaaatagtgatggaacacagaagctgatgccattacccttaatcagaaataacttaaggctgggtactgtggcttatgcctgtaatcccagcactttgggaggctgaggtgggaggattgcttgagtccaggagtctgagaccaactgaggcaacatggtgagattctgtctctacaaaaaaaaaaaaaaaattaaaaattatccaggtgtagtggcacacacctgtagtcccagctacttgggaggctgaagcaggagcatcacttgagcccaggaggttgaggccatagtgagatatgatgggtgtcattgcactccagcctggacaacacagcgaagataacttaagtgtgtgtgtgtgtgtgtgtgtgtgtgtgtgtgtgtgtgcgcgcgcgcgcgcgcgtgtgagctatgatgagctatgatggtgtcggctgcactccagcctggacaacagagcaaagataacgtgtgtgtgtgtgtgtgtgtgtgtgtgtgtgtgtgtgtgtgtgtggtgtatccattttaataagcctatgggaatgtctgcccttatttcctgagataacattagtaaatcattaaaaccttaatccttctcccatttgtattatgtttctgtgactttaatcaaattgacatttcttagaaagaaggcaacattttataattgtgggaaaatgactgaagcaatatgttggtcatgaagcaatatgttgatattgccataattccatgtccatctgtgggactaggtcactgtgacaaactatataataccctgaggacatgggccatgttgcctgtatggctaatggtgcctacccagaaggggaatttacattaataatgccagtgctaaaagtatgtaagaaattttctattttctttttatttttaagatgtcacttttataaaatataataatgtatattgcttaattatttatataatagaatgtagcacttcctgttaaaatttaaatataacataaaatgtaagaaataaagcagaaaataactcaaagctttaacacccagagataacaggcacaaacatttgaagaacattctttctagattatttatccattcataggtataaaataggagaaaacaaggagaaaggaaggatgggtaaatagaaatagttttataaatataggatcacattataaatgccattttaaaatgtgtttaattttacttgaatttgtcaggagaaaaactaaaaggaaattgaagaaattgctgaatttcagttaaatgttcttcacccaagggatgttaagtttcaaaagatccccataaaattaaaagatttttctaaatgaggtcttttttaatctactgtttcaacttgaaacaatattaattaactacagcaattttttaaaggatctcatttcttcccacctcgctgcactatcttccagcttttgttatattgcattatttttatttgtcagggtttacaacatttgcattctaatttcaccaattgtttagtcatattctataggtaaataggtgatgctcactactggatttcactctccagtttttttgtttgtttggctgttttttcaagaatcactgaggggtgccttaatttcctaagttcctccatttttgagaatgcatgtcttttataatctcgatgatgttggctgtgtccattcactttatttcagaattttgtagatatttgtctcattgtctttggggttgaatgtcatgaaaacatcataggctgaacaaaagtattgcctttatagagaactttctttgtgtgcctaattgactaaagaattattttcttgaccctgaaattcataatttatctaggatagggctaatggtgttgaagaaatgttactcaatgatgtttgttaattcatgataaggaagactttcttcaggaccattgggatgggtaccgggaccacagcatggggtgttgcagtcagggagagagattgggctcaaccccaaaagcagcgtgggcaagtgggaatttatagtcaaggggcagagtgtggtcagtggatgaaaattactaagaggcaacatcaagtgtacaggagattctggctaaaccaacctaccgggattattctgaagacaggctagagtgttagacatgacctgagggttggtggaggatgatgaacctgatcaaatatcaatggtgatcagatattaaggataaggggttttggttaaactgacttagcagggttctttgctaaaactggattttacaaggaagtgcatagatgagcccaggagaggcttcaggaggctgactaaattttggtctagcagagaatttttgtcagtggtcagtcattgtttatcactctttatcctggaacactgtagtttttttgatctgcagattcaagtcttttttttttttcaggaaaagtttctaacattatacctttacatacattttctattatatttctcatctctagaaacactaatccttatgttctattgtcttggttctccacctctacccacttatgtaactgctacaaattctgtcattttcctcttcactgactattttatgaaattttcttcttgtcattatgttagctttatattcctcactgtttcaatagttttatttctgtaactatggcattttggttctcagtttgtttctctcgttctgtccccccttttcatcccttttcatcttattctgttcttttataatcttcttttaatcttattttatttaattaagtattcaggggaaactttcttatttttcttgggttatgttttctttatagatggagctattctatttcttctctctttttctctctctctcctccacctctctcctccctctcttccttcctcgtcctgtcctccttttctgtcttcctctctttcctccatccataggttcatgttatatcttttcatcttatttatgtttaatatggaaggtctgtccagattttttcactctactagagtatgggtgaatttttattggcattttctccatgtcatctcaaaatccttcatcttcctcactgagtacattttgtggactgggtattagcttccaacatcagtgtgttgcctttgctggggacctgggcttggctggctccctctttaaatcccattcgatgtgctaaacccgagtcccttccatcagctgcagtggatcctgtggctgtgggcttcagctctttcactaatttgggtcagagccctgcctctgccaaggtttcatgactgtacacaagagctcctgttttctaaggtgtttttcttgactttttccaagcctgcctcttcactaccctcagatcatttcttcccaagtctaaagtcatcattagagattctttggattcggcccactccctttctttcctcagtattgtctcagaggtggaggagctggagccacaccgccacagcccagctattcctactctttagccaaaacattttaagatgaggatatggcgttacactcctttcttggttttgtggctcctggcaacactttgttttgacttgttttattttaatatatgtttttgttcgttcattaagtgttaaaagagggcagagactctatgatctaacttcactctacaaaattatcttttctccctgtcatctcaaaaaccatatcaatttctatacaaaatgcagtactaaacagattttgaaagtttagggaagattaaaatttcaatgccagatatttaatttcattattatgactgtgaaatagatgcattctttgcagaaattttaatacaaaaaagtattataaagaaaatacagacattcattctcatattatttttgatattcttatactaatttgcttatctgtgcatagttcttaaaaattgggttcaaacttcatatatcatttttattttgttgcttgtctttcctctaacagtaccctatgagtatgtaacgtagccttacatattccttgaaatgatattttaataattttgaagcaaattaatacactcaaataatctacgattggacatttatgctatttataatttttgttaacattaatgctgggatgaacatccttctatataaatcttaggatgtatttcctttaaaatatgttagtaatactttttaatgaagacatttctaagataagtattctttgccttagcaaaataatttaatggacattattataaaccttgattattatacagtaccatataagtagataaagagaaatcctgcacctgattagacttagaacataaaattttgaataaatttaaatatatgtccctcactaatttttcctcataatttcaaggtctaaaatcatgtgatttctgatcaattctttactgagaagcactgagacatttcctaaattattttcattatttccaaaaaataccacttttactgtcttgatcagtgccctttggctttttcttcagagttcaaagtagcatagtgattcagtgaacaaactccaggatcagaaaggcctgggagctgctcattacttgcatgatctaatgttccctcctcacctctttcttcactttctttcactgcccttctttctgtcccccaagtagaccaagaccatgtccaatttggtccctcctattttttccagtgtaatactcttccccccagtctactgatggctaacccttttttatccaaaggtcagttctccactcagttaatgttcccattaactttcccctcgaggcattctctgtctaattactctgctttattttcttcatagtatgcgttatcactcaaaagtatcttaataatggctcccattgatggtattattagcttacctcatcacccacaattcccttccacccacctacggttctggggccctctgctgtaaggaggactgccctcttgtggacttttaggatattgctactaaaagcacaaagtctagttttttttttttttgcaacaagattgctgttttagggggttctctaagtgtcaaatatttgaaacattgattttcaggtttattctttttttgattaattgaagtttttaatctacctggaacaagaataacttaaaatgtgaaatgaccttggtaataacgatagttctgtttaatgaatgttttgtcagtagcaaccactgtcctaagtgatttttcatatattatctcatttagtttacgcattgtcagctgggaaaacaaggagataatttaagacatataaagaaagcttttccaagtgtcagggtaaagctgattccctatgtccaaactttgtctgcaacttttcaggaaaaacaaacaaacaaacaaaaaatttaagaggtacaataaacacagttatttttttaagcaccaagggggcctgggttctctactcaactctgaccctaattattgtgtgtcatttagaaatttgtcttttcaaggccctagtttcttcaaacgtaaaatgaagctttgcagagagctcatgttcaaaggtcctgaggcacaagaaacactgatatatttgaggaaaagaaggaggtctgtgagactagaatggagtgagtgaggaaaaacagccagagatgcaatcagggggaatggggaacttggtttttaccctgagtgtgacaggaaagcattgcagggtttggtgcccagggattaaatgaactgacatgtaatttggccaatagacattaatgtcagtaagacataaatatgttctgccaatgccaagcaggagcaaaaacatcattttttcatctttcctcagttcagtgcctccaaaactctaagaactgagacatcactttggatgatgacataggacttgtgtacttattacatgtagtatcaactgtccattaatacttttaaaacccatgctttccaacaaagttacttctttaaagcttccagaggtcatctttaatttatgaatgaaagatatgttctaaaaataagctatgtactagtataattatctatgtctatatttaagtcagcaagtatctattctataaatgtttattgagtgcccactctgtctaggccatggtgctggtatggaaggaatgccagcaaaaaaaaaaaaaggcctgtaaccccaatccacatgaagtttactatctagtgtgtcattaagtcatttccagtataatctccaaaaataattgagggtgaaaagccaaaatttaaatactaggaaactggacatataagatatattatgcatattggtgacatcataatataattttaaaagcgtggactttaggatctgacacattctgcttcaacttcttgttaactatgtgatcttgagcaagccactttacctctctgtgcaactgtctcctcatttggtaaacagagataatgctccctaattcacagtggttttgtaaggattaaataagataatgtgtataaagagtctggcatacacattcggtacatggcagctgttgggtgaaaaagaacaggaaaggagagagaagaaaattggaagcagtccagcaggcaaggtgggattggaagaatgccaaaagtagcaaaatattttaatgttgcacataaatgactgaaaggcataaaaaagctcaagaataatgtccccttctattatgtttaaagccaaaaatggaatggtttacccctgtatgtcacactaatatttattgtctttcaatgctgggcccagatactctagaagacatgttcagttttcgccagccacctaaactggatgaaagaatatttgcaagaatcaaattctacacataaatgtattgagtatctgctgtgtgcccagcaccattgtagtttctagagatagagtaattaacaaaatagaaaaaaaaataaaaaaatcccttcctcatggtgtttaccgtctagtagggggtaggggaaaataggcagtatattagaagtatattcaaaggtgaaaagctctctggagagaaagtggaaaagtgattaggaagagaggtgtaatttaaatgggtgattaggcaaaatcttattgaaaggtaacatttgggcaaagacttaaagaaggtgttggtataagatctctgacagtatctgggagagaagctttgcagagagctcacattcaaaagtcctgaggtgagagcaacccttgatatgtttgaggaacagaaggagttcagcaagactggaatggagtgagtgaggaacaacagctgaagacacaatcagagggagtggggaacttggtttttaccccaagtgtgataggaaaaccattgcagggtttggcacccagggatcaaatgaactgacatataatttgccctgtggagtcatgggacataatttatgttttaaaaagactacctctggctgctatgttgagaataaaatgttgggggacaaagatgaaagcagaaagaccaggttattataaaaatccaggtgagagatgataacagtaatgatggaggtagaaagaatgttttgattctgaattatttagaatcatcatttatagtgattaaggaagacagaggatggaacaagtttgtttgtttgacttttaagggaggcctggggaagctctgtaatctagtttggacatatcaagtttattaaagtagacaattagatatacaagtctagagttcaaggagaggtctggggtctatagagacacatatttgggaaatgtaaccttatgaataatatttaaagccattgagacagaatgagatcaccaagggagtaagtacagatagagaactgaagaataaaaggtatccaaggcgtaagtcttgtagcttgtaaaggctggatggaaaagaaccagaaaagtctgaaaaggattgttcagtgagaaaaatcagcaaagtgtctcatcctggagggtaaatggaggaagatttgaagaggtagtgagaagctagctgtatcaagtgttgctgataggtctaataaaatgagttccaagaattgcataggatttggcaatatgagcctcatgggttggcttaactcagacagttttgaagagtggggagagaactaagtctgattggagaaactttcagagaaaaaggcaggaaagaaattggaatcagggagtaaggacaactcctttgctctaaaggggagcagggaaatggagtggaagctgaagagtatagtgggatctagagagttttttttggttttttttttttttttttttgagacagaatcgcactctgttgtcaggctggagtgcagtggcacgatctccgctcactgcaacctccatctcctgggttcaagtgattctcctgcctcagcctcttgagtagctgggattacaggtgcgtgccaccacgcccagctaatttttgtatttttagtagacggggtttcaccatgttggccagaatggtctcgatctcttgacctcgtgatctgcccacctcggcctcccaaagtactgagattacaggcgtgagccactgcgcctggccgagagatgtatttttgaagattcaggaaataacatgtttgctagttgacaggatggccaagtaaagaagggccaagtaatgaggcaagaggtaaaggagagaatttctgcaacatgtctctaagtgggagggcttggggtcgcattcccaagaagagagattgagcttagataggaccaggtgtgggcccagaccagcagcatcggcatcacttgggaattattagaaatgctaattttcaggcccttcccaggcctactgattcagaaactctggggttggggccagcaacctgttttaacaaaccgtctgggtgattttgatgtaaagtctgatctgtggtaatagaatacgtaggtatagatcctggtccgagagtagatgtggtcctaagaattgtagggaattatcttccagttgcttctgtgttctcagttaaataggaagacaggacatagctgagagtgaagactggagggaagttgttggagatctggggagacaggagaagtttgatacagttgtctaggagaatggaagagtcagtgacctggggaagaactgtgagtgcctgagagcatttagtgcgcacctgagttcatggccatgtgtctacccagagcccatcagtatgattgtgtctttttctccagtgatgagcagctggaattgacatgatgataaagagaaagccagagaaagaataagtgaataaaatgactactgtctcataaacaggagctttacaggcaaacattgctttccagcatggaaattgtaccatttcctgaagaccaccttaccttttattcttgcagtccaaaatccaccctgcaaccccagcctacttgcctcctggtgagagtcatgtctacagtcttggggctgccacacagctcatgagtccagagtgctggatacggcaagggctgcctggctagtaagacacaaactggtcagctagagataaagtgtgactcaccgagtgcccagaaaaaaacatttcttcattttctctcctgacaactgtattttcctaaattattatatagataagagcttgtcagacacaaaagaccacaatattatataattccatttacatgaaataggcaaatctatagaaacagaaagtagattagtggttgcttagggttgaggtgataagggagtgacagctgaaaggtatggggtttctttttaagatgatgagactgttctaaaattgaccatggtgatgaccacacaactctgtgaatgtaccatgaaccattaaactgtatactttctgtgggtaaattgtatgatatgggaatcatatctcaataaagctgctttttaaaacttacatacacacacacacatttaattaatctatttgtatagatgaaaacaaggacttgttaatggaaataaaccaaatcacttaaatctataactgaatttctttgtacctatctttaaacaaatagaacttcctttaaatgctgagggctttccaatatattaaaaacaaacaaacaaacttctagtctctgatatgggaaataacttgtaggagttaagcttttttccttaaaaaaaaaaaaaaaaaaaaaaaaaggtaagcagagctaattcccactttgtagtgctttgttgtgaaaaacttggaccaaagtggctgttaattctacttttcaaagctgaattctttctgacccttcaaaacgtatgctcccaggagtcttaaggcggtgtgttcctctctcgtcaaagcagcatacacatacactgttaagaacatgttcatttctgcttctgtcagctttgtgtctgagcactaatagtgtccatggtttcacttttgcatgaacgtttttgctctaagcttagggaaggacactcttttccatgccgtagttgaaatgtgtaacttgtccctgtttagaaaaatgccgccacctacttgcttcatgtatctggtgatttaaagcaactcctgaatcattcaacttggccagcttgtctttgtgtaggaacaatcccaagcccatgtagagtcttgccttgcagcacctgaaaataaattctgtcgagactgatgctccatcctcgaatttttgataaatctttatggaagagttattggatgctcatggagcaggtgtgggtctgcagtgggggcacgaaggaagcatcaggaggccaagttagcttctcagctagtggctctgtgaccttgggcaagccatttaattttccatttccacatctaaaaataaggactgaatcaagcgatctctggagttccttccaactctacactctagaaaaggcagtgtacttctgagaggttaagagctggggcctccagtcagagtgacctggtttgaattctggttttgctacttgctggtaacctcgttctagttctttggcctctgtatgtatcaatgacttcctgttgaaaaaggaaataataatcatacctgctgcccaggtagagctgtaagttactgatcacaggactcatgctagagtaaaagctgttggtattcaaagtaatgatgtgcccgcacagatccacactgagcctgcactacagcgtatgcagtaatgtatacatctgtactcaacacaaaagcagatgagatggccccacctgcatgcttttagtctagctggggaacaaagctatcataggtgagatgattacccgtatggtactaagtacagagcagcagtccttcaggggaaggttcaatgccacatgagaactggagttgcaggcagcttggcgcaggactggactgtgggttgggagaaaacataagctgaagctccacttgtttgtttgtttctttccttcctcccctctggctctcctaagtttattttggttttgaaatcaggcctgcccaggggagtgaatcaagcagcagacccttcggccttttcctgtctctgtgcctcagacggacagggcctcccaccctgttggttcttaggcgtcgcttgcattgctgggtgccctttttaacttttccatcttcccccaaatgagtccgaggccccagcctctgtgcctaatcctgcctcttggcatgcttcctttcaccttattctcctccctctcttctctgttcaaagtcactcatctccagccctgcggtgaataaattcatacaaagagagtgttttgatttatgtcaccaatttgatctcaaaaaactacagaccctgattctccatgcagtccatttattgttcatgcactcactattttggaagtgttgctccaagtgtgaggtgccaagccacataactgagcttctaattgcagagttctccaagctgaagctgaatgaatggctgtggaatattagcctctgctagaatgctcaaggcctcacagtgactgcaggaggctgtcccacttgtgtctaacagtgtgcattcacttgttttgtttgtgtgttgaatgcattatataattcactgtggaataaactgtggaaagtgcccactgcctgtttttgtaaataaagttttattgggctgtgctcattcacttaacattgtctgtggctgctttcacactgcatggcatggttgagtaattgcaaaaaatactatttggcccaaaaatcctaaaatatttattatctagctctgttcagataaaatttgccaacacttgatttagatgtggacatcagatattataggtctgtagagaatagccatataaattatctaaatttctttttttactatgaagcatgtattttcctatagatcttaaaaagatctatttcatattctataacctaaaattaagatatttagtttcttctcagagttttgcttttgttttgttttgctacttggataatatcataaacatctggacttgttggttcccagagtagaattatttaatgaaaaggtatcaaaaaataccttttgatataccaaaaaatatatcaaaaaatttatttcattttaaaataaaaactaaaggcatcaatagaaaaaccttaataagcttaaagggcctctccatgaatattgaggacatcgtgaatgtttagagctggaacaagacttcaggtatcatctaaactgatctcaccatttggaaaattgaagaaactgagaaccagagaaggatgtgcttaaggtcacatgacaagttacagctatcacaaccgagaacccagaactcctatctttctgcaaagggcttttgccagtcctgcaaaaacaaaaaaggtcacagaacagagctaatttgtgctactatgaattcagatggccaccttcaaatgggccatcaacatttccctgaatcctactaaatatctctgttcaacatactcttccactttctgtaatgctgtttcagacttcatcttccataaccctctaacatctctttgtcctcccttgctctcatcaaataacctcaccttctccttcagagaaaatgaaacctatctctctgtaactctaattgtcctgacaccagacacatgagcctacctacatctgtgtccatcctcccttcctcccaagtacagtagaggtgtccacccttcttgtacatacttgagacacgtatctctctccttccagatgggactccctcccaggatctttcagtatgagttatctttttccctctctcaaaaacaaattactatcattattattattaatatatcttccttctaaacatgtccacatcttccattaaatttttttaaagcatatcaccatttattccctgcaacgaactcacaattatttattctcctctttccagccaaacttctgaaagtttggcttcccagtctttggctgggaagaggagaataaatgtgcaccatttctgtgtccttatctcccatttactcttcaactccatctgtctggcttcaggccccttccactaaccaagtaatactcattaaggcctctgatgaccctcatattgctaaatccagtgaccattttctagacctcatctcccttgacctctcagcagtattcagtaccactgattactctgtccttcttgtctcttcccttagttccatgacacaaaactctctgggatttctttgtacctcacagactcttgccagctcacttgatcctcagactctctcactagctcgctgtttcttcctgacttttcaatattagagttctttaaatagtgggtgctcctcttcttgctctagctgcagttctaaagcaatagcatccatgttgacaccttcagttaccatttatctatatgacaatgaaggcttcccctcaccccctcaacacagtggatacagtggtttttgaaatgtaaatctaatcattgctacttccttcacttaagacccttcaaccttttctgacttaggataaatataaaatcttgtctatggcctaaaaggccctgcccggccagtctcctgtctgtctctccagactcatctctctccagctccctgtcctcacccttctgcctacaccagccatctatcaccctgtacataagtacgggtccctcccttctccatgaaacccacacatgggattgcccttccctctccttccacctgggcaactcctactcatcctttgacttcattctagttggcacttctgggagtctcatcccactcatcactttgtctagaaagccttatctaagtgagagcccacattttggccataaaggaaaatgacacatagctttaattttacattggcttgcataattaacttcattaatatatattctctccaaaagacagcaagctccctaaaggcagatattattattgtatatgtgttgtattgtatatgtatatattgtattatatatgtgatatacatgttatttttgttttacactgcatgcctagcacttagcacaggggttaatcagtaaaaggcactcaaagaatatttcacaaaaggatgcatagagggagggaagagtagatacatggatagacaaacagttatggcatatttgatctaagatctgtgctttaacaaaaatactggaccgatgggatgaatgtttacagactttccagtaaccaagagcaaaggaggcataagcatcagacaacaatggaattgataaagcctatatcttggtggatgtctcagtgccatttttccattcttcccaaggacactctatttctatgggaatacaataagtgcagtatgtttcctaactaccacaaatatttctgaaatgcaaactagtggcttctgattcatacatgttattagagaggaaaactgaagctgtcaggggctcatagaaagctttgcattcttcctcaatgtgattctacatggctaatgtcactaactgaccacagaaactaagtcattggtcataggaaaataaaaatggtgtacgtgctggttatgtttggcacaaggcctttgtttgggtatatgcattccaaggatccctagaatgaactgccttatagcactcaatcaggtccaaagaactgagccctttagaagcagaagaagaagaggaaaaaccctgatagcaatcaacagaatccaaagtattgagtgttttattaaatgcctgtaaggctgggacacttgtgttgactcctacacatttaagtgcaatcttcttcaatgattaccttggaagatgcatatttattttagtgacactgttcttactctaaatatttgcagccactcttttgggactacctttaaggccaatagtatatgtattattaaacacatcctgagcctttggaaggtaaatttggttttcttttctttttttttttttaagatggagtctccctctgttgcccagactggagtgccacaatctgggctcactgcaagctttgcctcccgggttcacaccattctcctgcctcaccctcctgagtagctgggactacagacatccgccaccatgcccagctaatttttttttttttttttttttttttttttagtagagacagggtttcactgtgttagccaggatggactcgatctcctgacctcgtgatccacctgtctcggcctcccaaagtgctgggattacaggcgtgagccaccacgcccggccggtaaatctgatttttagaaaaacccaaatgttatgaataatcaaatctagtgaatagactcagggtccaaacaagatttcagttcaaaatgataacagctttccttgtgtggtaagaaaaaaaaaaaatggttctgagggacaactggttctctctcggtgaggagttccagaaacgtttgaagacatggaaaacatgcatagcttcataagatgacagggcttacaagttctgctgtgtttgttttcaaacccaatctcatttctttagagatctgaactgatcatctacctggccagccttggctagcaagatgtgttttatttggccaacgtagtggttttctttaaaaattgagtcaggattgaaaaaccaggagatttccagtacaaatctgaatttcttatctccttggaaaatctgaagatctggcaaaactctttccacagccccatgtgacaattccgtcctggagcagagtatctgctgcctcctgtatgaaagagacagttaggccagcagctctcaactgctatcattgtctgtcctgacctcactatttaaatactgtactcccagtgcactttgctgcttcttattccatgtgacatttatttgtttaattgcctgtgtcatctccctctagaccaaaagctcagtgagggcagagattttttttcctgtgtttgttcaatgctgtatctccattgtctggggtatggctggcacttgatgcctatctgttgaatgaattaatgtctagcccctgtaagcagtaaagtttgcaacctttgctctagagttgcactttgtagaaaagaagactaaatggttacctttctatagatatacaacaatctataccatatatacttttcattttcctttttatattatttattttatgcctctattatgttattgcatttcatctccacagcaattttgtaaaacgtacattatctctgagtgttacctcaaatttttctacctttctttctttcccccacctttatttgtattcactgtattgtattgtattgtattgtattcatttattctttttgaatagataccaaatcctatacatgatccagaatctaaaatgtatggaaaggtctgcaataaacctcatcccttaaccatccaggtcccctcctcataggcagtgttgttagtttctttgtgtctatccacagatactctttggatacccttttatattcttctttctctttgtatatatggatgtcacataccgtgtacactgctatgcactttgcttttctcacttaaccatatttcttaaagattatttcatattattctataaatgttctcttattctttttttacatttatacagcattccagttggtgatttattcccagatggtttatttaactagttcctgttgatggacatttgcgttttacatatctccttttataggcattcgagatatggttgttacaggtgtttaagaagtgagattgtgggtggtttctagatttgtgccatagttagtaagtcttcaccattttaaagctgtggaaagattttcttgtggtttcttctagggcttttatttgttacattttaattttttcatatacttggtatttaaccaggcataaggtatgagttatagattcaactgtgattttttttctagatgtttactgtttatctcatctttaggagttaaataagccagtttttattatattgtaaatttccatatatattgaggtctgtttctgaacttctgtcctgctccattgatctgctaacttttcatgcaccaatactgcactgttttaattactaaggcattatactatgctttcatatctgatgggcttaattctccctgttactttttgttcaaagtgtttcgtatatttaatattcttacaggataacattcatatagtcttacttccctgtgggtttttaagtcatcaagaacaagcagtgactattatcacataccattttagcgtctttcaaggagatcaaatacttttttattcagtggacttattactctgattagcagtttcagcattcctaatgttgacttatccttgctttcctagaaatattccattttttctggtgtattgttcttctaatttttccaagagtcatttgctgatattttatttaagattttttgtctcaattaaaataagtcatctgggcaaatttcttttttatgctgtcttttccaaatttttggtatcagaattatgctgatttacaaaagtaattgaggaagtttattttttccctgtgctttcaaacagtttaaataattttttttatctatgaaataatcacacacaaaaccatctggatttggcattttcagggaagggagaggaggggggttccttgacagtgtttaagtttttcccatgattttcagtctatgcaaatttgtcttttctcctactttatgttttttaagaaaatcaaacaattcatcaagattttgaatgtattttcacagttactgaaagtcatctcttataattattctaatcctcagtatacataaataattccctttctttttcctaattttgtgaatttgttatttctccctttttttctccactaggttaactgctagttcatctatttgttgttttgttcttggtttttccaaagaatcagctttgggatatctttacacatgagacctgttaaaatgttttctagtcctataagctttctgacttttattaatttctctttcagctttcttttatctgtggttctttttctacaaatgcttaactcatttatttttaagtcataaaaatgtataaaactatgacatttaagatatttcctttagtaagtacagcattgagggtctcacataggttttaacatttgttatttagatcataattattctttacatatctagcaataaggcttctatttactctttgacaaagagttgtttaggagataattttcttggcttccaggtaattgcagtttttctttttttatgtgtctgattttctttcttttttttctatttagtttctaagttaagtatattttagggagattgttttgtcacatttctacctatttctactcttggaaagtttctttattgcctttggtcacatgctataattattctatttttgcagtattctgtttttcagatatgggtatctgatcctagattaacattagtgatgttattctggtattctttcttattttatatctacttaatctttgaaggaatgtaaggtaggttaaacaaccactattgtgtttccatgtatttttccttgaattttctacagggtttgacttcatctatttctctttttctttttaagagacaggatctcactctgttgcccaggctggagtacagtggtgcaaccatagctcactgcagcctcaaacgccaaggctcaagggatcctctcaccttagtctctcctgtagctgagactataggtgtacaccactgtgcccagctaatttgattttaaaatttttgtagagatgaggtctcattatattgtccaggctactcttgaactcttggcctcaagcaatcctcctgcctcagcctcccaaagtgctgggattacaggcatgagttaccatgcccggcacttcatacatttcagtactatgttacttggagcataatgtatggttatatctattttctacctgataaataattttaaggcagatggagactgaaacattgcaccaacaggcagtcaatactacctgcgagctatgagaagatctcaaagttggagacttctcaaggggtacagggaattggtgacaggtatacctgagggttaggcaagaacaaatgcatctaatactaagatgttttattagttaagaaaagtgacatgaggatatatgtgcttgatcttttaatttcttctttctggattttgtttcttataactatgaattttgtgtaaaaagaccaacagtcatgtcttatttctgtgcccagcaactaacacagtgctttgccctcacctttggtagatactctggtactaggttggtgcaaaagtaactgcagtttctgccattaaaagtaatggtgaagactatatcactctaagagtttaattcttcatggtgccatgtggaaatactagcaaaaacagcaattacttttgccccggcctaatagttgttgtgaataaatgaatgagtgaagtagcaaaatatgaaataggtgttgcagaccagggtaattagcactgacatttgccccacctctctgtccaaacatgccactccttatagagcagactgttgagttctatattctttcaaaatttttcatagactcactcctggagccagctcataatgtattaagtattcctcctgaatgtgtacagatttcttgtttactttatgaatccaactgagaaggtataacagatataccagagatgggagtctgtggccctagccattgattgtttaagttctgggttagaggtaagcagcccttgccagagtgatccagtcccaaagtagaaggaacaagttttcttgtgatgtggcaaggttatatcgctctaagagtttaattcttcatactgccatgtgaaaatactagagaacaagggttggtttaaaataattatcaccttaaagtattagaagtataagggggaaaagatcagaaagaatatgccaaactatccactgatagtttgttagtggttaactctatggtgggttttaattgtttctcctttatactttctgttttcaaacatttccagggtgatcaggaatcatttttatgcaaaaaaaaataagaatttttaaaagtttgatcctttgaagacttctactctactatcctttggattgggccttatcatttctcacacatgctggctctttgctggaaataataatttctcacacttagcagaaacagatttgcattaagtcaacggtgttgtttctgctactgcacttttacaagtgtagcactgacatgcagcagtcaggatccagagaggaaacaaaatcacactaggtaattcaaacagaaggatttagttcagggaattggttgttacatcggaattggagcactaaagcactaaaagagcaaaaaggaacactgagggaacccaattgcaagaagtagctgtcaccctcagagttgggaaacaaaaagaggagatgaaattagtaggacctaagaactcaaggaagtagtcctgtggagctggtgcttggaccactaagaaaggaagccaaccagctgctgctagaacctctgagggacgcaaagggactggttttggaaatgtagaaagaggcccatactccagacagcagtgactactggaggatgctcctggggcatgaaaaaggagaaaggaagttccttctcctcaccttccagtcttcttccagtgaatagaaagccctctggcaagggactctgggaaatagccacatcccagccccagcatcacagaatagagcaaagaagggtggatctggagctgaggggcaacaggtaacaaactagcacccagcttttgggtcaaaaactcagtagttttataaatggcagctaaccagctttattcattgtactattccaaacctttcctttaaacaactactgatgtcctaaatttccaaatatctcttggcttttcgagaaaagagtattttctttattagaggagtattcatttgtagtccctttagaaatgtctccagcagcatcaatatggggttgagcctgatagctcaatgcgtggggttagggttcaagggcagttcatttgtatatactcctacccagttcgtatactgttagggtccattcttatgaatttgacctcaaagtaataggaataatatcctaatcaaatggagcactgattattaatagaagttctaattttctgagaaaccatgtaacctttactgaactcagaaatgtctcatatccaaaaagaaaggttttcctgccacttaagtaatgtgtctcactgatacagggttggccatgtgaaaaattccagactcatcaagagtaaacttttcaaataattggtttcagcctagccaaatcctgtgctttatatattaaaaatttggttgcttgatattctgagctataaactttatttttgaagtatatatatcccatagatgtgatttttgctcatagaaaaattgtagaaaattcttaggacctttcattcagaaaagattgaagctctaattcttcacaaagaagcttggatttggggtcaggaggcatatttttgggtcctgacttccccatgtaccagtatttatctttagacatttaacatctgagcctcagcttcctcatctgtaaaagagatgataaaatgaggttgtaagcatcaaatgaaaaaatacagtgtaaaaaggcaatataaatgcatgtaatcattattattcttgcaagatgcagtcaagtttagtgatttagagcataaaggatttgctccctgtctctcccactttaaaattcttgcagttttgggcaagggagtcacatctcttaactttagttcccccaactgtaaaatgtggatggtaccacctacgtcataggttgagaatacaagtaataagagtaataaaggaggcagcagaatccttagcaggttccctagaacttatcagaaccctttagaacatagcaagcactcaacaaatgttagctgctattgctattatcgcctttattgttatcatcattactattcttactttttaggaaaccgtgcacacatgtgtaagatgtatggtgattaagatatttattcatcataaagaagtattgttattttcttttttctgtactcaatttcattgaacacaacaaatagaaactctttacatttgttgtagatttctactcaaagccaagagccacgttttgtctagttggcctttgccatggagctaagaagtgactccagaaacacattcaagcatatcatatgggatccgcaatatttctttggcattttagaaagagattaattcctctttctctggtaatctttgttttcaaattacatgaatttttttctgaaaagtgaaatagttcatgtttgtttatagtaggtaaaatcaacaatacaaattgatgaccaagatccactgtctttccttttcatgtacaaaaattagtcattaagtgggccttgtttatgataaactttttcttgactctagagatggtacaactgaggcattccaaattacacctataaaaactatcattttgggatcaaaactatattttttgagggaaagtaaagttgtgaaaatattcttctaaatattctctcactgggaaagcgttagttgaagtcccaacagagacatcaaatggttcctattaattgttgcagaattgctgaaaagagtcagttatgcaaatgctgctgcccccaaagaactgggttatcccgtcattaaatctcttctactcagtatcatgctagagaatagaaatcccactctttcctaatgttaccaactattatataagaaatcatttcacactgagaaatatcaataccatgcccttttcaaaaactgcaaccgtacaaccagtgcatgaagtaaatcaagttctcagtaggcagcagtggcacttagtgagtgttccactgccttctttcttgaaaccccatgaaaggaacacacttcacatgccagctcttctcttggtgtgtaacaaaatgaccaggaccctacggaattaggtctctggtacccaatactcagttatccagaacctaggcttaactatgcataacaataacaactcacatttattgagcacttactatgtgcaaggtactatcctaagcccttttcttgcatgaactcatttaattcctacaacatctccgtaagggacatgctatcttctttggggacacatgtacaaatgatattaaaacaagctgatgtagctattctgtccaagcatccagattgcatggtcagaatgataccaacccaataaactacactttacgtaacccacattatgaaagaccctctgtttgttttgttttgttttgctttgtattgttttgtgacagagtctcgctctgttgcccaggctagagtgcaatgccactatctcagctcactgcaacctctgcctcccaggttcaagtgattctcctgcctcagcctcccaagtagctgggattacaggcacgtgccaccacacccggctaatttttgtatttttagtagagatggggtttcaccatattggccaggctggtctcaaactcctgacctcaagtgatctgcccgcctcggtctcccaaagtgctgggattacaggtgtgagccactgcacctgaccaggccctcagtttatagctggatcttgacagagaaaattggcgtggtccctgtgcggggaggcatggtaatctgtggagtgtccatgttttgtaaagttgggtttttttgttattctttccctttcacacacactaatggccctctgcacttctgacagagtattaaatacagcctcccctaattagaattgtttgtgcacatcccgtcttctctaccagtcaatatctgtcagaaggaaaggggtggggcttagtcatctctgcacccatcatggcacccagctgagtgatgtgcaccttgcaggtgggatgcagaatggcttagcagttaaaagcatttgttgtggttggcagtctaactcttccccttgccagctgggtcacaaagggcaagtttctcagtcctctggccctctgtttcatcaatgagcagaaaacttaccattcattcaaacattctaattattaatggcatagtgactgtgtcctcctcaggagttctccagacacatagcagcagtccccaagagtcttctcatatcatcacgttgctcacatcttagggattcccaaaagagaaggttgaagccaggactctggatagccccctgacctttgttcaaacagaccctttgtgcactgatgggcatatgtcaagattttgagcagagaaacaggcagaagagcagaaagaaagtttcccccttcacagcttaacaaggtatgctgttaagctcccagaagagggagaatggtcttcattgagttgtaaccatgcagcattttcattgcaatgtgctgttattgttccatatatgttattagattaccataacatcagtgagttctcgggaggaagattcacagggctgctagctaagcaacatctcagttcactgccacagacactttgagctctgtttgtgtggagcaattgcccatcagcagatggtactgatgtcaacatgcctggagttttccttggcattataagttcaaaagtgtcaaagttcagtttcatacaaagtagctgcttgttttccaaaactgacctggaggcctagaaaagactgcagaattttgatagatgtggaagttattaaggaaagccatttaatccaaataaattgctcttgaggtaggccttgatcaagaagtttcaattacatttctttaccaataaatagatgtctctggcagcaaatgagagataaggaaggttctctctcactcccaattcaaaactcaagccagagaaaatccacatgcctgacaagaaataataatagcctatttctttttcagctctgtctttaacaccctgtatgatgcttcagttaggtgtgtatttttaacagttttattgagatgtaatttatataacaaagtttacccattgaaaatatatagttcactggattttggtgtatttacagccatttatatactgccgtcaccacagtctcctttcaggataccttcatccaccccaaaaggatcccttgtatccatgagcagtcactccccatccttaaaccaatccctcacccccaccacccagccctagctgaccactcgtccacttcctgtctctatagtgtgcattttttttaacctagacattgcctggcaactcctcataattagaatttaataagtgtttcctcaaaatctgtcatttttgagaaaatttatttccttttgtgtcactgggcctcccttcctccattcagcacctgtccctagcacccccaacaagggtgttctccatttaacgagtatttactaagggcctgctatgaactacacactgtgttagcacttggggtcatcagtgaacagaatgaaaaagatccctgtccccgtaaagctgacttcctagcagagggagaaaaaacagtcaacaacagcagcagcaaagcacagaagtaaaatgtacagcatgttaaaagacactaagtactatggcaaagagagacaggagaggaagataaggggtattgggaagcgccgtgcccagggaaggggcaggtgacagcactgggatgttcaaataggcatcccgagaacttcaggtgttcaacccttaatggaggtgagggagggacccaagcaggtgttggaggcatgagcatttcaggcaaggaaaaatcctgacgcaaaaggccctcttgtagggggcacatatgacacgttcgaggaagaggaaggagttggtgaagctgaaactgggagaggagagacagagaggcagatggggcagatccttgtgggagccacagtgggattttgagcagaggggtgacaggagcggaatcgtatcctaactgttggaatgccattttaaacagagatgagaaggggcaagggcagatgcaggagacccctggatactacttcagaggctactttagggcctctaaacctaagtggctctcaatcttggctgggcatcagaatcacccacgctgctttacaaactgaggcctgagctacagacactaattggcctggagtgcacctgggcactgggatttttttttttttttttttttttcaaaggtgcgcaggtgattttgatgtgaaagccaggttgaccatgagagctttcagagcactaagtagtccccctgatttgactttgcagctaggaaacaaaaccccacagatgacccctcttgctcattggcaaagctgtgctgagaggcagccaaaaatcttgctgctatagcagtggcaggactggtgctgcagacagtgtgcaaactgggatggggctggctggagcccacctggatcatcagaccttgaggtcaatctcattctttggctggatgcaaacacgagcctctgaatgtgagagcaaggctttctctctgcacctaagaaagggcttattgtaatatattagggcagaagagaaggataaggctagaacctcaagaagaaggtatgtgattcactcaacaaacagtgtttaagaataatagtgacagtgtgccaggcattgtgcaaggagcagctgagaaaaaaataaggtttaactgtccttgcccaagccaaatggctcaaagtgagcaccgtctaatatttcaaaatgtgttatttgtgggaaggctttaaataagccagaggggaggggggattcttcagttgcatatctgagctgctggcatttctaattcagagggatgaatagaacattattgtgttgcatcggtacaagtacagcaggaaaaaaaaaatgcttggagccgtgagccgaacatgaatcagcaatctggttctattgttcggaaaataatcaccatgctgggagcatggaatttaagaatcatgcagaaatgcccttccccctcccagcaggaaacagacattggctaaaacatgccatcttgtttttggcttcctgagctgaaaagaatgtaaaaaacttggagaggatttagggaaagctgatttgtaaatatggaaaatacaacccataagaaatgggagataatttagacccagtgttggcaacctctcagaggtggcacgccaagggagtgtttattcactcttgtgagcaggcagtacagctgccctagcttcaagaaataactcatgttttttgagttcctactatgcactgatcagtgtgctaacttgtggggggaggaaggagagtggtccctaccttttgaagaccttctaatttgtggcgatgggcaggggagtgcaccaatactataaagcagtagttctcacactcaagtgtgcatcagaaacataggacccgaaccccaccttcagagtttataactcattaggtctgggatagaggcggtgcatctgcattgccatcttgttcccaagtgatctgattctgctgcctgcatactttgagaaccccgctctaagaaaataagtacaaggggcaggcaaggagggttcaatacagaagtccactagaaaggtgcacttggtttgttggtgcaatagcaggtacccctttttggatctgttctctagcacctagctaatgagtgttaattggcaacgtgctttggatagatcacactggccatgactgccaccatccaaggaagggtgacaagaggcacaagaatagatttctctgtaggcctgaggaagttgagcaggacataatacagtaagacatacacatgtggcctcgcagtggcagagcaaatggctgtagggttaagaggacagtagggtgacctgtctccacgctcaaactcaagcacttctcccatgagcagaaggtctcagtggaatcacctgagtggcttttctaagtacgcattattgggcccaggcctggagacggtgagcaaagctcctcagatgattctgccgtgaaaacccctccttgagaactgagaatgctttttctgcatcctgtgtggttgtgccccatacttacaagtaagcagagtgcaaagccaatcttttggaaaatacaaaatcaaagtgcccaatgggtacactccccttcccattgtgtctcattgccgttttgttgccacaggagttgagcgtcccaaattcaggtgtgcccatttaaaatgcaagtggccctcagtgggcacagtccaccaacacagctggacgtgttggccagagtaagctgccgttcactggaaatattctagagaaggctgaccgtgtgctggtcaggatggaaaggtgggggtgcctgccatgtgttgagtgagtacagcctaccaggatggcaccttagttcctccaacatgttcttaaatggatcaggctggtggttctcaacatgtgggccctggaaagtatatccagatcacctaggaacttgttagaaatgcagactctcaggcaccccaaactaactgaatcagaaactctgggaatggagcccagcaattggttttaacaaacccttcacatgctcaccaaagtttgaaagacactagtttagcttatgctataggtagctccttgctacctgtaagtcagaagcagcacagaattggaatgcaggcaaccggtcatttattcatctactgaggtattcgtacaactcttccaacatggtgaacatcttgtgctcatttgtctgattttcacctaagaatgtgaagtgttcagtatctagccagcttctcagctatggttggcatccgtgtaatttccagtgataatctgacttactgcatcctcttctcagattatataagggctgtgttcttttactttttagattcttcgtcacagcctccccatttgacgcgggctcagtaaactactgaataataaccaagcctgatttattcccaggactgccttaaatcctgctaagacttcactctgtgtctctttctcatatcctccacaccaagtggtaagccaggccgactcacttggctgtatgaaactttttaatggcacctttaggtcaaatgttgtggccatggtctcacaaagagtgaggggtgaaaggagatactgcaaatcacacttctagacttttcactgattttcaaagctgttatagccatggttcccaaaatctgtaccagagcaccttgggtaccacagcaaccccacagaaatacagtgggatgtttttaatttttgagggaaacccagaaacaactgtcagacaccatgcaaatccacctgtcaagctgtttggacctcataacttcataaacagggcatttaagtatttcttttgacctagggtcaccgtaaaaaatattactgaaacactaagagtgacatacactgagaaagttgggaatctctgttacagcatgactgtccccaggtatagtttaactgtacacattctggcaggatcatgcattcaagccatcacattgcaggaaatacacattctaaatttaaatattagcaggggagaagctgaaagaaaattagaactatatgcatctttgagggacttctttcctttataaccttcctacccagacctacccatcctagctccctgagacaacccttaaccaaggctcctgtgatttttcaaaataataaataataatgatagaggccaagacaggagaattgcttaagaccagtagtccgagaccagcctgggcaacatagcaagactccatcaaataataataatgatgatgtaaattctcatttagtgtcccaaatatgatggattaattcttgcaaattggaactaatgattgctctaattgctctggtgcattcctgaaaatcacctttgatacacactgttgaaagacaaattcaggctgtgtgtgctataccatgcacctgacacctcacagaaagccactggaatttctgataaagagccaacagaacctttaccaagcagaattaaacaagaacctaatgtgcgactgaatgcagtggctcacgcctgtaatcccagcactttcagatgccgaggtgggcagatcacttgaggccaagagttcaagaccagactggccaacatggtgaaaccctgggtctacttaaaatacaaaacttagccaggcatggtggcttgtgcctgtaattccaactactcaggaggcagagataggagaattgcttgaacccaggagaaagagattgctgtgagctgagatcatgccactgcactccagcctgggtgacagagcaagactctgtctcaaaaaaaaaaaaaaagaacctaatgcgtgagaatggagacaaagtttccgaagtcaatttctgcaagagctttgcaatgtagccccatgtcccctgccccccatttgacactgaagaagtagtaaacagttatatttattaggataattttattttcatcttcaagggaatttcaggagcacagcagtcttcataacactccatttaggaagattattctttttatcccagggttaaaaatctgaaggagctcactgcagattccagaggcagcagagcactggctcagactgagagacactgtctccctgggacaagattgaattttcttttaaatttcagatgatactatcaaggggtcaagtactagagtcttttcttatgacaccatccagggttgcagaagggagtggattgtttgttattgtcttactcattatcaaactctttttaaaaatcaataataaatcatttgctgcagtcttaatgttttattttcacattcttgtttgttgtttttcatgcatgtgtctcagtgagtcacctaaccacaattatatattctggcatctggtggttctgcatggtaccctcattccttaggaattaatttccctgacatgatgaatgtgtttccaatccgttcatcacacacacacacatacacaccccacacacccccccccccccccacacacacacatacacacacaccctctttagcagggagaagttaccctactctccaccaggtgtcagtagagtcagttttaacagcatgctttggccaaaggggcatctgctgaagttgtttttcctgctgtcagacgtttcctcaaactacctctgggctgtcctcttaagagactatcttccatttcttaggagtgttcggagatgatagtccacctgtagagaaagacagccataaggaaaccgcactataaacagcaggtggccaagctggtcctttcaggttggtctcataaaatttttactggctgttttcttctttacttttctatcactaccttatttggcttaaaagtgctccatgtttcactcaatgtgacaataaattagatgtggttgatgcttttagatttgcagggggctttgtttgtttgttttaaggcccattccacctctgccactgctgacctagtcctcaacacaggaatcggattttactctgcttgtagccccagaacccagcattgaagggtatagaatactaccatggattaagtgtgcacgtcccacttaacccaatgtcacctttgagagctacggccttattcccattttaggaatggttactcctgactcagtatcccatatttaagtggcaaggccaatgctctttgtaacatgccatggtgactttgtctgggagagaggtggaaaaggagaggggaagaggaaggggaagagagagaagaggacaatgatttggcctggatattgactaacataaagagtagggggaactctagaatgagattgttgaactggagttgagagagtgggtggagtggaagtaaaggtgaattattttactaagaataaaaagaaatatcagcaacagcaaattaagctcagtttcaaccatagaccctggttgaattatttcccttcctgaaggcaaaacacttacagagactgcctgaaaatctgaaatgaaaagtatagctttgccattcaacagtcatttgctaaagtctgttatgtggggcatgagtctcctgccatacccagtggagaaattctgactgccttcccctccaagaggtgacccactcagattaatacctgggatacggtacagacagagctttcactagttttccacatttttactaactcagagttttatgttcctctttaggctcatgcccagtctaactacgctagcttttcatattttttctcttactgattttttgatactacattcccaaatagggttagttttactgaatacaaaaggtggatcacagcgtggtatgatttgaaaacaccttgcctctgttctcctatttgagttcttaactgattcctatcatgagaaattcaaccattatttattcacttcattgggtcctagatttaatattaaaatgcaaagggctcggggaaggataactggggctgcactcaggatgctatagacttgggaacaaatttatttctgtgtccaaactttcttactccccacagcaaggttaaatgaacatgcaaagtaaccttgaaagggaaaaattttttttcacaaaaattcagccttgcaagaggaaaatggcagggcaggtgaaggagaagcaatttcacctccttttaatctttgtaatgacagcatctggggaggtgggctctgtattgttcttgagtctttaaatgacctcaggtaagcttaaagttagaccaggcaagagtttcagttcccccatgcctttgggatgattgaggctggccaggagttgagatcatctataataatgatgatgcctataataataaagaagtctcccaataccttacatttgtgtcctccttttaaatttacaggcattttccaattgctttggtcctcagcataatcctgagagggcaggaattgtgatttatctttacaaatgaggcttgaagagttaaaggaacttgtccatgatccccaaactactaaactgagacccaaagccatctggaatgacgcccagtccaggagcctttcctccatacctgggattggacttgttctttaaaatattccccaaataccagagtcaaaggtttgatgtatagctctccctctcctcctatgagggggataaggaaaagaaggggaaactccacttttacccccaagagatccacagcctcactgccctcctagcatgggtgcagcccacctagggggacagccatttgcatttattcagctgtgcttccagatgccacagacagagctgtgggaaggctcaagtggggacagggtggggtgaggggttcagccccatcccatgaactccagtcatacccagcaccccacaataccaaataaacttcataaaaatagttgcttgctacctaaacacaacttcaagacacatccctaagctatgcccccctcttacacggcaacttcctaggaaatctagcatgtccactgattctgcatctagtcacgtttgctcaatgctaggtgagaagatggatatgtccttctctgaaggccttcccagttttaatggtcttgggctagggtatgtaataacgtcacactcatgggtctgaccttttaaaatgaaccaagagaattgctaatgaaggttccccaacccacagcccccaacccagtcagtcatggcttttctgggctgcccatgaagcacctgctgaagtattaatagatgagccctgttaaatcttatcatctgatacatcaggctgcatgacactctgctacccttcctcctgagagagccaaggagaagaaaaactaaggaagacagtttgaaaaggccacaaaaggttgatgatgagctgtgaggggaagcatgttttgattcagtgcacaggttggataaacaatgactcaccaggtctacgtggaaagatttttcatgaggtaatttttacagatgccccttcagtgctgtagtttcgatacagagaaaggaaacacaaggggacaaaggtgtgtggtcagggcaagcgtgctggagttctacaagaaggagtggaggtgttctctctggcactggtctagccttgtgaccttgaatactgagacaggcaagtattaggttggtgcaaaaacaaaagcaattagaagtaatggcaaaaactgcaattgcttttgcatcaacctaatagcaatgatcccactcaaagaggtgccaccaaagggtgagcctcccaagcaggcctcctccacactgcagcagggctgcctttctcacactggatcactgcttaaagaccttccgtggctccccatttttcacaggataaagcccaagttccacagcaactctttcaagactcttcaccatctggcctgaaactacatttgcagtgtcattcatggtcacttcctgccccgctcctgcagtcacataccctgggcttttttggtacttctaagccatgcttttcatccctggcgtggaaaaaaatcccagctcatttttccaaagccaaactcacatatcaccattgggttccctcatacaggtgtaattaattacagtctcttcagtgccttcaaacacatcttgtatccctcttgttcagctcttctgcccctgagttacaggttggttcttcacctaagccttgcaggagtgggctccatgagtaattcatcttgaatgatctaaagcctgagttggtgtctgatgggattaatggggcagccctagacagatccttgggttgatggattcctcttcagcctccaggcttgttttttagaaactcatcttccacccacaaaggaatttactgctggtaggttctcttctctttgctcccaaccaaaaatagctcttgtgtctccttttcattctattcactagatcacatttacatcaacttatatcttttccattagctatctgcattttaagaatgatcaaagtccatagccaaagcttaatatggcagctgtgagtagattttgcatgtgtaaagtatctgtgaaccctctgaaaatatataccaaatggcttacccatttttcaaggggaggggcaagtgatataattaaatggaaatgtaatttttcattacatttcttgaggagagcacactccctaatagttgagatcactcagctaaagaatgaagctttaaaggagaatttgaaggagtgagggacatgcagcaggattttagcttgtccctgaagccatttcatacacacagcgcctgctttattgcagcttaaagacccaggtcatctcaagagaggcttaacatgccctgagagcaaaaagcagtgcaaggtaaggagactgtgttcttctgtgtggccatcccagcctatgagacatgcatcttcttagacgtcaggcagggcagggaaaggcccctcagcagtctccaacagcatctctccacccgttctctgtccactgaacatgcctgcactctgttccacgtgacagcttttcagatatttgaagaccactctctacccctcatgtgactcttcccttttctaggtttccttcaatgtttccttaagatacgttttccatcgtccaggatattgtacatgagacatccttcttaaaatgtagcagcccacatgtggtctgaccaatgtcctacaggctctttctctttctttctttctttctttctttctttctttctttctttctttctttctttctttcttcctttttctttctttctctttctttcttttccttccttccttccctccttctttctttcttcctttctttttttcttttcttatttctttctttccttttttttgagacagggtctcactatgttgaccaggctggtctcaaactcctgggctcaagcagtcttcccaccttggcctcccaagtagctaagagtatcaagtgcatgccactgtgcccagctacaggctatatttctgtccatgcagcccaagatgctgttagagtaattagcagcagccacagttcacagtgtggcatggaacccaaggccttccaaagttcctggacctatttactaagtgttgataataattccatttacttttcagtttcagaggattcaataataactttaccatcatttggatttttaaaatacaaacacactttgtgtgtttgagaggtgaatgcctgcttttctactcttccaatgagtggaatgagctttatttaagggacacagcactgggctgagaacaggtagaactggcagaggaaggctccacctgcatgattctcagcaccaccccttggcacatggcatctgtgacttttatttttagctgttccttcccaaccagcttataaaatggattgtaaattccttgagggcagagagcctccaatcttaacctatctgcatccgcagtgtttatcccagtgttaaatgctcatatcacattcttcacaagtcttgtttctacctcttaaatgtcacttaaacacctagccctctcaccatctccaccacctccactcaagttccagcacctttttctctattctggacctgccgtggcctgaccagtctgctttccacccacgagctgctgtaaagctttaaaaacccacattgggtcttatcacacccctgcttaaaacctgcgtaatgtaaaggcaccacccagtttttctgtatgaagctcattccttgcagagtagtccatgggccttaggagcacaaggatgagaacaaagggttaaatcataacctggggataggtctatttgaaagaagggcctaaaggtctggggtcacctccactcaaaatcctccccaaataagcccaagtagaaatgacctttccttctctcatggccccagtctactctgaagagacaggtaaggtgaaacctgtatatatttttgcatttatttggtgcaattctctccctatgttagtttagaagctgcttgtggacaggccacagtgttgtctttaaacaaaacctagggcattgcctaaacagagtagcctcaaccaaggcctcgcgataaccaaacaaatgaatgacccatgtcaaagggatattctctacttgggtagcagttgcctagaagactaaatggaatggcatttcccttcccctagtgctgaactgttgaagcagttaaaggaccatcgactttgaagggccgtggtacacagaccctcactggatctaactgaaaacccttccctgaccagagagaaacagggcatgttttaatgaatgacacacagatgctaggtgtcaatccttcattagcgtagccacccctttctaactcaacaactccttgacccttcctcctcactgacctacaaagcccttcgctgtttttgtttccttcctggcaaataaagaaactcagcttgctttacttttaagttcttttggactttcttttctcctttgatcccatgatttgctggtgagctccaggcctctgccaaggctgtggaaaggaccatcttgggattcccctcctcagtacagagcattttaccaacacccaccatgtaggacaggagaccaggaaaggaggccccgggacacctgccttccctgggggattgttagaagctttactggaattacattgaaaactctagagctcactgaaggaaaattgtactaaatactactaaatactaaataataccaaaatactacagtaaaagtaacactagtatactattaatagtattagtaatactatatctgttatatagtaacagtaacactaaaatactgaagtactaaattgtactatagttgaaggaaaatagtactaaacagaaaaattggtaccaaattttgtggtgataacactatttttaaagtcttatatagaattaagattttttccattcctagatactttccgccccacacacaataatttcctatagttcatatgcctattcaattggaattttgaaaatgaagatatttttaactgataatatcataaggacataactgggattttatagcttcgccttcaagacaataaaaagcatacaaaactatgctgacacatttgtattaatgttgtattttaatattatcagtcaggattcttttggttgcaagtgacagaaacctaagtcaaaccagcttattgtaaaaagggtaatattttactgagggcatccaaggaagggctgaatagccaaatccctggaggagcagaagaggatacagctgggcctcaggaagagccgagagacaccacagctttctccttccacttcaggctgtctgtgaatgtcagatggatcctctctctcaccttcaaatggactttttccaggtggctgagagatatggtctcagtgttagagttttaacttctgataaattctgtccctagagaggaactagataatatctctttctctctccctcaatccctccctttctttcaccctgaaaaatcatcttactagtccacctcaagtcttaagccagttttgccagaggtggggcacagtccaagccaagttcctccacctctttagaatattcaggagtggtagcatgtgaaaacatggcagcttccatgggttcagagggggtggttaatggcagcacagtttctaagaggagcaacagagtcaggacccgcaatactgtaggtacgacctgtgctctcacctacagcagctcagaacttggtgcctctcactcaaaatgctgctggacaggtgaacaaagatgggacaaagggcttgtggtagagacccttgacgagctaatcagaggcaagaatgcattttcctagcagtgaatactcatcctctccatcaggtgccaatttggcagcttacactatgctatatcaacttcattcatcttattttatttagttgttcaacatatattgttgagtacctgttatgtatctgacattccgctcagtgtagaagatataaacatgagaaaggcagtctctgccataaagagattacagtgtggtgggaaaggcagccgtgtaaacatgtaatttccacagaatgggacaagaagtatgatcaaggtttgaagtcattgctgcagcattagatgtggagacagagcatgaatggctatgtataaatctgtgttgtaaacataatccacacacttcctctgcctcgttctttttcttctccaaccagttatttaacaagattgttcctccctttcatgggcacagtacgttatagattacccagcacttccactcacagcatcttcaaacctcagaaataccagccttgtgaaataagtgggacaagtattagtttcctcatcttacactgaagaaatcgtgtttccagtgctttgaaattacttcctctgatcccacagctagtagtatattacaacgttggacctcaagcccatgcctcaggcttcagtgctattcctaagccaaaatgctaccaccatctaccactggccacagaacacactccagaaaaagaaagctaatcctaatctgtctccggcaatatgctgaaggactgtgacccaggttcatcacccaccagtgtccatctgtgtcatcctgggtgcacccttccttggcattcttccctgggtcagtgcacctctggccactgatgcataccaggcctccatccccagcctgagggccaagtctgactgttgctcttggatctcattaaggtagtggtgaggtggggagttcagctctgactaggacaagtcataaatgggcagatgagaatatggattcagttctctagggcagtgtgtctatgacttgaaagtgcacatgaatcacctgggggtcttgtccaaatgcagattctgactgaggggatgcccaaattttctatttctcacaagctctcaggcaatgtcgagactgctggcccacagaccacaccttgagaagcaagatctagattagagatgctaatacatcttagccactcttgggataaacagcaaatctgtgagctggtagctttcttaaaaatctgagatggaaaaatgtgcgcttgataaaaaatttatttttaaaacatgtttatagaaggaaccctgagatgaaaattaagaggtcttacaaatttacacatatcacatagcccacctatgcttcggtgtccccagttctgagttgagagtaacaaatattgcttcaaggtaattaatgcatatgatattgtttggaacaaaaccattatggaaaatgcagattataatctgtgattttttttgtattttttccttgtaggagatgtcagtgaaaaaagggatccagaatgattactaacctatgactcccaacagtatgacaggtatctttttttttttacattttctttgtgtgcctccatttttgttccacctagagtgaaattatagattcttaaagattaacttgcgagttttagcaaccgttatttccaaaccaataagtgttattaaatcctgtgaatacctccctagaaatgtacttccatcttcttctgatataagatgcatcctcaccagaaaggtgatggagaggaaatgactattcatttttagccatcctttagccattgcacactaagtttactattttcttttcttttttttcctttttttttttttttctttgagacatggtcttgctctgtcacccaggctggagtgcagtggtgcactcacggtttactgcagccccaacctcccagggctcaagtgattctcccacctcagcctcccaaagtgcttggatttacagtaggccactgcacccggtgtatgtttacttcttacagtcattccaattaatataataaatggctctacatactttgtgaccacagaaagtgtatattttcagaagttggctgtttattccattcagcagtagagtcagaatggaatatgattaggtcatgtaaggtataagtcagttataaaactcttagcaagggtcaaaggagagacagaatgaccttggaggaatacaaggttgcaatagcacaaattctttgtgcaatttatagagcgatggttgtacactcagtggtgccagggaataggccgataacaccagtgatgacaaaggttaggtaaaaggaaaaacaagtaaacaaagctggagaactctggttctctctaaaaggaagccatctcccactctaagcaatcactgacaagaaggaatgaagccccatgtgtccagagatttcaaatttgcaagagaagttggaaattcggattttaaatgaaatatcccaaattttagatgttagcaaataacttataaaaattttatagacttatggctcagtcgaaatatgtctgctaactagaatcaacccatgagctgtgagtttatgacctcagctatataccttccagcctagcagcaagtccaccactgtcctttttgttaccatggcaacagggcaggtcctcatagacctctgtgtgtcgaggatgcagcctgacctttgattatctattcatgtcacctccccaccctatgataagctaaacatgtaggacaaattgctccaagaacttattctccagtagacctgagaaactgaagcaactgaaagttgccactcagccttctaaaagttttgaagcctcccaatgaccataaactttaactctcccagcatctttgcccagcctctctacccacccgtactggagctcctgatatagcaaaaagatggggtgcctgggcaaatcacaatgattcacacctgtaggagctgagggcatcggaatcacatatcttcttatttcacatcaacaggcaccaaaacgcacccactcccacatctattccactgccaactaggtcaaattctccgccactaaaattgcactccttctacgtcataaaccaacacattcaaccttagctacagcctcaatgtttctgttgggatgaatggcaatctcagtcaggaggagtgatggcctaagtctttgcaggcacacgcaggtgtgagcacacagataccagacagcaggtagccacgctgcaaaatggagggacagtattcctttctgataaaggaggacagtgtgagagcaagtgctataaggatggctctctactccatgataatttgcccacctgaaaaagtgtccaaagatctggactcaaagaacataccccaagacatatgaaatggcaaaacatggtgtaaaagtaggtaataaaatggtcttcgcttgctgtggggattagttctaggtacagtgcagttcatctagggagagtgaccattcattccagctcctctggatcaggggctggcaatttttattgttgttgtaaagggccagtgaataaatatttctggctttgcagcccatacagtgtctgtcataattactcaattctgccattgtagcatgaaaagccatagactatatgtaaataaatagacttggctgtggtttactacaaatttataaaacaggcagcaggtcagctttggcccatactttgtggacccttgttctagagcccagggtggtccaggcagttctcttctagctacaaaccatctcattactgagcagagcccccaggtctgagtcagcttgagagctgagctaggaatctaggcccactcctagacagctctagggtaagccagcttttcagcccatcttgtggaagctgggatgctttcctcgcagactgagccagaaccccagctgcctcctagtgaaggagggagttttcacttccagcatttgcttcatagtggagaaactaattgtagttctattttcaaaagaaacctactccagacacatacatgtacagtatacgttagtgggctcatatgagaaaatcattactttagatgcccttgtttgtgtatgagataaaacaatgttcttttccctccttcgattgcagtgggctcaggggtacatgttttaagaaacccaaaggaagaccataatgaagttataagctgtcagaactaagtgcttgctctaggagcatacttcaaaggccaaatgtgcatatttttcctttgaaaagcttaatagataatattactgctattcaacacaggaaatcaattaaacccttatgaaaagaaaatcattttttagatgatcagtagttaatatggaatctattttcctcaaacagaacaggtcagcattttcagataaatgaggcatgttttttgtaggctctttcaaccgcaatgcttattaaatttatgtactttgcactaactcgaatgaataattgtttattttttgaggttacttaatataagctacagtagagtcaggtcttgccaaaattttctcactgctttacgccacctaatttgaaattaggactatatgaaatcattcattgaaaaatgcgattccttccaacctcagcagaaacaagaaaaaaaatacaattcttaaagaaggaagtaaaaaagtaccttaatacaatattttatctgtctggaattaagcatcacttcctagataatctgagggaaattctgctgacattgatgacaatataatgagctctatttttaataaaaccgtgatcctcagcatagggaaatttgttccaagatatgagtagctaaaatgttaaataccaaagttagaggcttttggccttgactgaacaggaaaccaagaattcaaactgtgctggaagaggcaaaaacaaagacccattatgtttgcgctgaacctggctgtatgatattaggatatggcataaagctggcaaagtacttgacgttttcattgaaactgggcctccagtaatttaaagtcactctattatgatgcctttaatgtgaataatgtattccccattcagttattaacttggacttctttgtgacttgcttgtttgtttagcttccctactgtgggaaggtattttctttatcaaggcattattcttgagtatccctctgtagcagggaagggatgcgtgccaagatagataggagctttcagatgttaccccaaaatttcccaccatgtgatctttgtactgtttcctgtgagcttgctttgggagggctcatgtgttaagcaaaactgagaacaacccaggtttttaaaaatttcccttatgacaactgaggttgagcattttttacatgtttattcaccactcgcatttctgcatctgtaacttgcttgttcatagtgattgtccatttgcccactgtagtttttgtctttttctcattaattgtagaacctgtttatgtgttatggatatatgagctctattttggataaaaccatgatcaacagcatagggcaatttacgctgagatgcgaatatgctaaatgttgaatatcaaagctagagtctccttttgctaagttaactaagcaagtcacgtcatctccctagatcttgaattccttatctaataatgagaaagtgaaagcagttcatccctagttccccttccacttctcaaatttgaatatttataaatcacatgttcataaagtaaggcatacatacattgatggttgagtataaagaaaaagtgaacactgaggcagtgcattttgtgttttgagactgtcctactgaacaagcttttcagagtcagacaaaacatttaagttgggaaaactcggcattttattgtgaagcccatgccatttttcaaaggtggaccttcaggtgtcccttaggtttttcagctgcttcttaatggccatttcttccttcagaaatagattcacggtggtgcatatgtcctacaacctacgtagaatggctttccatggtttcaaaaggttactgatggcaaaataatgacaccattcaaaaataactaatgttaacactgtacatattgttaacatttcctgctgtcaataaacacgcttcctcaaagggatttgttcatggctacttagtaattcatcatatggtgatatagtccctgattattaggctattaacataatattgttataaataatatacgatgaatacatatttattacatattgacatgatgaatatataatgaactgccttgtacataattttgcatctttccgataatttccctctggataaactctactatgttaaaggaaatgatgggtcaaagggactgaacagctttaaaaactttttctgttttcacattttagccagattattggaccaattgagacatccaacagcagttcagcctccatttaagtatataccctccaaatgtagaaatttttggtatagttagcctatttctttgtttttgaggaggtaatttattaggcaaaattgtatcaagcctttcaaaactttatatttttcttattgattataaatttgactatataccccccccacacacacattgattggtgactcaaacttcaccttttataacttaacctgtttgtttaacttttctattgtggtatttgtctttttcttaatgatttagatattagggaattaattcattttctatcttaaacagtatatatatttttctcaatttagtacatatctcttctttttgtttatggcaatatttaaccttaatttttcttcctttgaaataattttatacttacaggaaagttgtaaaattaatacaaagaatttcaagccatcctttaccctaagtcttaaaatgttaattttatcacatttgctttaatcttctttctctctctttccatctctatctaatttttatttcaaaccatttacaaataaattgtaaatatggttccatagcatttttggtcatacaaaagcttttaatttatatagaatgagttctattgaggtgtcatttatgatttatttctttgttgtcaagcttagtaatatcttctgatgagtactgagggacagacctcaatgggctctttggaatgtgttagcacttttatttcaacatgtagttctttttaattagacgcaggaatgacttgcttaaggttgaagatttttctctctcatacttacctttaacacttgcattgttacctttgtgcaccaaacactcacacaaagtggtgagcctctgaggcaagggaggggcaaacctgattggtggaggtccttctgtcccttctcccaaactcaggacagtcaatccccaggccttaggactgattacaggtgtagatgaagtaataacagaagccaaaggagagcaacgatgcagaatgccaacacgaccctcggctccgcttcccacagtgccatagagctgggaggctttagatagatggacacgctcctggcatagccattctgaagggaaatctggaggtttattgcaatttctcctgaattcctgtctccccagatgtgaccaaaaataaaacttggccttggattccatacagccatctatacacattacgaatgctgccatgaatagtttggcagaaagaaaaatagcccaaatagctagctctactgttggctaagctttgattttatttcttcagtatttaaccacacaatgtgatgggggcctttttgctcctccctctgcatgctgtcacttctaaaagaaataaaaatctcactgcaagtaggctagaaaggaagcatctgtcttcccccaaattccttgagggcagaagggaggctattacacacatcacacagaaagtctttaaattcatgctcagacatctctcccacagatccatgcctcacaggaactgctgaaacctcacatcctcttctccctctctccccagaggctaaaaccctgatgagtcggctgtacacactgcctcccctccccgctgcagtcaggaatctggacccttcgctcccctccctcttctccccactactacctccaccttcaagactgtgagcctcttctctccacttcctcgatatgtatttccttttaaaaccccactcagcaaaataaacagatcttccttgggacctcacttaccttggaaagcaaaggaagggaaaaccataaatatttgtcatcttacttttttttcctgtcacacacaaattggtagaagaggatgaaaatcactccatggcttccatccagactagggaagagaggagaccagcacctcagttcacgagtttctctagtttctgccataataaggggcaaatcaagagaccaccaggaagaatttctgtgcagctaatacatcacctttttctttaaaacaagagcaaatgctccttttttcctcatgaaacaaagaacggtaactcttcatgtggtatgactgggtaaaagatgccctataggctacatgaagaaggactggtcctcttgtgctctgactgtctctgtcctcctttcatccctcctgtttaacttcctgagcttctcttggaagagaaacttactacagaaaagtagggagctttctgaaagagaccagattaacaaaatctcaccaaatccagacagactagcgaaaaccttccctcaaatctcccagcaactcttagacaattacttctagaacaacttcagtttccaaatttgagcagctaggtaatcaggaagttgaaatgtcaaaaggacaagactttatagagagtagaaggtgggagcagaagagtgaaaaaaaaattctttctcagcaacccctgtattcttcctagaagtcaccctttacagaaggcaccctttacaaagctggcttcttctcataccccaaccacaatcatcatcacaccaacctccactatgatcattgcctcccacatcatcatccccattatccccaccatcaccactctgctaaactcatctcagtctcctgcaagccctgctgtaaccaagagctgtccagcacatctctacctaacttttttcctaacagtcacaaataacagctataacttaacaaggttctgttatgtggggatgtatcttcctctctagtctcctaaatgccactaaagtccacagcagttgcacatatataggtgcaaatcccttcaaaagaaaacaattttcccaaccagaatttggtttctaatgactatatggtgttattttgtttgcaatgagccaagagttatttttatacggcaccaccacctgccaccattgccatctgaaaagtcccaggcgcttgttttatccatctttgcttttctttcaagtcttggctatgatgacattctcgctctggaatctggctgtgttgtaaaaaggaaactagtgtggaatgccagttccccaagcctgcagagtgcagatgctttcttgtcttggttctgtaactgaactgagtcattttctctaagccatggttcacacattagcaggctgaagccaatgtggtgaagtgtcttgcccagggccgccacagcagactgttcagtatttggaccatcagttcccaaagactgggaaactgtgggttaaatggcttcaaatggtgattatgtttctttcttttttttttttttcttttgtttaaccttgactgaagttctttgtctttttcgtgctgcatttccaaggaagatgtattaagcattctttcttctcctttttagtaagctgagaccaaattaataaaatctcagcaaatttagtcagattagcaaaaacctccctcaaaactcctagagattcggacaattgcttctagaacaacttcagtttccaaaatgacagccaggtgaccagaaatttgatccctctctttgaaagaggacctaagtttgtcctgctcaaacttggctgcatattagaatccctctgggagctttctttttgagacagggtctcactctgtggcccaggctggagtgcggtggaatgatctcagctcactgcaacctccaccttccaggctcgtgtgattcccccatctcagcctcccgagtagctgggactacaggaactcaccaccacacctagctaatttttgtattttttgtagagatggggtcttgccatgttgcccaggctggtctcaaactcctgggctcagctgatccatcccccttagcctcccaaagtgctgggattacaggcatgagccaccacacctggccactctaggagctttttaaagtcctgatgtccatgccatcctagaccagtttaatagtaatctccaggtgggggcccaagactcagcattcttttaaaactgtccaggtaattctaaagtacaacccagtgggacacagtggttctcaaccctgctgcctattacacatcagctggagatctgttaaaaaataccagtgtctgggccccacccctagagattccaattaattggtgtaaggtgaaacctctggtagctttgtttttttaactcctcaagtgattccgctacgcatctggtgttaaggaaagagctgttgttctcaaacttggtggtgggatcagaatcactgggaaatttagcttaaaaagaaaaaagttctatccaaccatcttacctaatgacaagtgccttggcttttcttgtgcctaattagctctccaggtgattctgatgcacacagaagtttgagaatcactgatgtagagggttttgttttttccacagaaaatgttagtttggccatctgagtacctacaaaaaaatctaaaatattaccctttaatctaggcctaacctgacctagggtgggcaaattgaaatgtaattagtgatgctctactcctgaggactgtgtaggtgtctgttgttacttttgcccacaaatgacaaactcatggttcctgaaaccatgcatttgaccagtgaacatcagcatcttcacttacccaaatggctcatcagaacagcaaactctccagctcaaatgatcacaaagtccttcaggcctgcactccaaggccagcatttttcattgaagtaatggaacagtcatgaggaaacttgtttctctgtcccacaaatgatttgataggcatcgagtttaaaatcctatttttttgtttttgttttttgagacagggtctcacactctgtcacccaggcagtggtgtgatcacagcttactgccatggagacagtgacctcctcctcccaaggagacctcccagactcagttaatcctcccatcttagccttgtgagtagctggaaccactggcacacaccaccacactcagctaaatgtttttattattattattttttgcagagacagggtctcaccatgttgaccaggctggtcttaaactcctgggctcaagcaatccgcccacctcggcttctcaaagtgctggaattacaggcatgagccaccacgcccgagcttagaatgctattctatgctgctttaatgtattgtctttagatgtgtggtacttttggttatgggaagaggtatttatatacttattatttttaatttttttaaataaatgaaaggacttccattttggggtctgaagagaatatagcactctggtgagcagtccccatagggttattgttctcagcctgatctacatgtttaactcacttggggaaatcttaaaaatcccaatgctgaaaatgctgaacttttctcaaaggattgtggtgaggatgtaagatttatataaatcacttaacatagagtctggagcactggggcacaacatacaacagccattatgagggagtacctggcacatagtagatactcactaacttaatttactgtggagaaaacagccaacagaattacgatcctacaatggaaaaaaaaaacaaatgtaaatgagtgtttgtacttttttaagaagtttgttttgcagctaaccttaaatgtctatagctttgcttagcccattcccataattcatgtcttctcactagtgtcacatacaaatttagcaccctagctagaattttctaaaagaattttccgtacagctaaggacttttcttttttaaaaaaaaaaaaaaaaaaagagagagagagagagagacaaaaaatttatttgttattctttatggaaatttttttttgttttttgtttttttttgagacagagtcttactctgtcgcccaggctggagtgcagtggcgcaatctcggctcactgcaagctccgtctcctgggttcaagccattctcctgcctcaacctcccgagtagctgggattacaggtgcctgccaccatgcccagctagtttttttgtattttttagtagagacgaggtttcacggtattagccaggatggtctcgatctcctgacctcgtgatccacctgcctcagcctcccaaagtgctgggactacaggcgtgagccacagcacccggccaggaaagatatttttaatgaagcagtaatctaaacataagatttgaagcaaacaattcgggcaaaaggaagtagatagtttttcatacaatctcttcctttctgcaatccctgataaaataagcatctttaaacatttgttgctatgattattattgttgcttaattttttaacaggcatcagttcctaggccagacaaggcaagggaccacaccacacagtattttcctgaatgcctagcgtcctgcaggatggaggacttagcatgatacaatcacatcatgtaggaagtcatagcagaaaatgggaggggaaacataccttcccactactgccaataaaatgtgtttaaaagcactggcttcccttaattcaatttcattttacttgcttggtgtcaaattgtgattttcaacattttttttttttgccaagatcctcttattttctcccaacacacacgtcccttgaaccccgtgctttcaaacattttacctgccaagccacttttatgaagtaatagcattcattgactggtttttaatcatcaaagacatatttggttactaatctgatgttttcaatgagcaggatgaaatgatcaatgttcccacgctatacagatgtatagaaaaatttctatatctttttcaaaaatctgaaggcatttttcatggaagtgtcacagactgcctcatattattgtacaacttcccttgggccttttcaaactttttaaatggctcatagtttcctctgacgctgcttttatagacctcaggttagaaacatttgaaaaagaaaattctgaatattcttgtaccccaattttctcaactctaagtaggattacattcttatattaattaaatattatattaatatcttataattcttataatatttattattttaatattataagagtgtaattcctacttagggttgagaaaactggggtacaaggactatggaaccataaatgaagccatcagaataccaattactgctggcattacctttcatcaaaaaagtctttcagtattattataaaatcattcttcaaagatttctatgtaaatgaatataaaatagcccatcgaactcagcaatgcataatgaaaatattcatgagaagtttaatcatttaacaccatgctctaaattagattaagaaattattgggataaatcagaacattcgtaaattctttaagtttctcaacagaaaattctaatacaatttaacatttttgagcatctcagatattacatactaaacatataaacatgactgagcaagagttcttgcctttgagaagctcatagtcaagagatcacagtttctaaacacagcaattcatatatttttttttttgaggcggagtctcgctctgtcaccaaggctggagtacagtggcacaatctcggctcactgcaagctccgcctcccaggttcaggccattctcctgcctcagcctccccagtagctgggactacaggtgccctccaccacgcccggctaattttttgtatttttttgagtagagacagggtttcaccatgttagccaggatggtctcgatctcctgacctcgtgatctgcctgccttggcctcccaaagtgctgggattactggccactgcgcccagccagcaattcatatttttaacatctgactcatggaagttcagcattggaaggaatcttagagaccatctagttcaatgccatgaaattacaggtggagaaacaaagcccattaacttgaagtaataaatgtgtggccctgcagcagtgcatcacccagacgattcagttgtttgccttcacacttctcacaccttaagcatccattgactctgactggatttttaaaatattgaatgatataaaagatagccaagctatttggaattgtaaagcgtctattagcaaaataatgctctccactgcaataaatgaaccccaaaatctcagtgacttagtacaacagaattttatttctaactcatgctaagtctagtaccacatgttcttggttggcaggtgacacttgtcaaggtcatttatggacccaggttctttccttcttacatccccatctacctctaggacttcagaattttctccactaaacagaggcaagagaaagacaatgaaacaaaacacataagaggtgtttcacaggccagacctggaaatagtgcccaatgctttcattcattctattggctagacctcagtcacatggccgtgtctcactgcaaggttgctgggaaatgcagtctagctgtgtgcccaggaagttaggagtatgcagattttgatgatgagtctgtgtcataaagggctatacaaatgcctaataacgttatggagatcagttcaggaagggcttgatctttacagtgaagtcatctttttgtttaaaaagtgtctgtttcagtcctctgaccctattccaggttttaccaacatctctagacaggggtaggatggtctgttttacccacctttcctggttgctgttggagttggcatggagtaatggaaagaaaacagactttggcgtcatgtgtccttgggttcaaatccccagttttccactaagtaaccttgtgacttggagcaagttgcgtaagcctcaattttctccttgtaaaatgggggcagatagcatcctagagttgtggtgtgaattaattaaatcatttagtaaacacttactgagagcctactacatgtcaagtcctatggtacactctggggaaatagcagagattttttttaaaggcacagagcctagattaataaatgatatatatacagttattgtcatgagaaagcactcagtaaatgttagtgctcttgcttttttgccctctatagctaagctgtgaagatatgttcatccctagaaattctagatagaataaactagtgaatgatggatctgtaagatggataggtcaagtggaaaacgtttcaaatgttaccattgttcctgttgtttgaaattgatttgatggggtgataatatttatgtctatgaaggatgtttaatttgcaagggcataaaacataatgatttgagctgcaaacaaatacttgttcagtcccaacaagagtaaacagaaacatcaaattggagagccctcttcaagactggtggcctttccattgctaagcctcctttacaaatgagatgaggagggtcttcagagatggtgaggaccatctctggttgcaggccaggttgcaggcttcctgaggaccagaagggcagtaaatttgcagcagcccctcctactcactgacagatcagaaggggcaagcaaggtccccaagagaaggaggataacaccaagtcggcatctcagccactgatgcagccttggtctttgggattcagagactggtgagggtttttgcctgaggaaaccggcaccttcggtgctctttgactccttcttgtctctcagcttttattgtttcctatgatttccaaatagagcagaggacctttatatttgttttgtttgatagcctgcctattttttcctctcttgcttcatgctttccaggaagctgttttatttctctttacttctcttttatctttttaccttaaatgcagaatagtctgggggagaaaaggggcacataatgaggatgatgggtcttcagaccaaagtacataccatcttgactccagctagccctgcaccagccattttatatgccctaaaccacagctgcattgctgacccctaatgccacagaagagctaaaggcacaggctttgtcacatccacctcaagtccattgtggctttacctcttcagctgtgaccttgggcaagtcgctttccctttcttaatactcagtttctttacctgtgaaacggagatgatcattacttatgtcagtattcatgtgagggtcaaaagaaataacagaatgtgcatagcatcatgtctagaaggtaggtagtgagcctctaataataaatgacaggtgccatcatcatgatcccccacagtgaccatatctgcaggccaaatgcaccaaccttgccagaaaagctgtgatgggaacaaatgcagctgtcttgttatcttgcttcaaacttagaggacacatttcacattccccattaaccaaatgccatccagttttcctgaacaacccattccacagctaaacactaaagagtcacaggtttggctcagaaatgagtcttctagtcgcactttccaggcctgatccttgagaattacccattaattttttaaatccctttagaatgtttgtgcagaagacaccactgaaagtctatgactaaagctcctggatcctttgctagggcctccctccacaatacatctgattgtattgtcgtctcctttccagataaggatttttccgaagatccttctatatgtggttcttctctaccctcttgtcttaggagaactggaaatattgaccagggctgggattagccttctctctgtttcaggcagggacagttctatccatgataagtttcctctccttccaaagtacacagtccatggcatgtttaattaatagagtcctgggtaagattccaactttccaagattaagaatgtgctttgcttcctgaccctgtcaagccccatcccttctcaagaattttccatgtgccacaaatcaactaaataaaggcttttgatctccacatgcactggccaagaggacaaaacctaaactggctacagtatgaggctcctggacctgggacagcttggcccagtccagtgataatttcaccaaacacacttcctaatcagttttctctgttcttctcttctctctctcagaaactcttgccatttaagggtctggtctacttggcacccttacagttttttgctgctgttctccactcccattgttcatgtcataccgtatcgccagagttgctcactccgcttaaagaatggcattgtttgccactccccaggggcacactggtttagaacgtctgccagttatcttggcagaaggaatcatctgaatgttttggctcaatattatttaatcctaaatagtcagctgctgccttaatcttgaggacaaattagatacagaagacagaggaatccagtaactgaaatgaggaggtcgcttcatctagatgagggctatttaccttcacccagctttctcccaggctgtctcagcactccctgtactatctggaaagcagctgatggacggttgtgttctgtgtcagcataatagcgggggatcaaggcttggttttgcctgtaactctccaagtggcctggatcaaaccatatcaccttcatgggtctcaattctcttttctttctttttttttttttttttttttttgagacggagtcgttctttgtcacccaggctggagtgcaatggtgcgatctcagctcactgcaacctccacctcccaagttcaagtgattttcctcagcctccggagtagctgggattacaggtgcccgccaccatgcctggctaattttcgtttcgttttttgttttattttgttgttttgagacggagtctagctctgtcacccaggctggagtgcaagggagcgatctcggctccctacaacctccgcctcccaggttcaagcgattcttctgcctcagcctcccaagtagctaggattgcaggcacctgccaccaagcctagctaattttttgtatttttagtagagatggggtttcattatgttgaccaggctggtctcgaactcctgacttcgtgatccacccacctcggcctcccaaagtgctgggattacaggcataagccaccatgcctggccaatttttgtatttttagtagagacagggtttcaccatgttggccaggctggtctctaactcctgacctcaggtgatccgcctgcctcagcctcccaaagtgctgggattacaggcgtgaaccaccgtgcccagcctcaatttccttttctataaataaagttgaactggtgtggtaataaggtcctttttagcctgcaaatattgtctgaattttattactcagagcccattgaactaggaccaattgatctggttaatttgcctctgaaactgggcatgaaatattgctgcacatcatcttagcatacatgtccctagatgagggtcggaaaaacaaagagtctgaagaacaagataaagacttcatgaagtcactccagtgtggcttagccaaggtaggatcactttggtttggcaccatcataagctggcaaaaagaatacaatcttcagtttctaagccttctcattttagaagacatctctgcagtgcatccccactgctcattattttttcaagctgtgtctgcttcacttgcttaagataaaagcctacacagtgtgccatccaaatataggtccacggcagtccagagagaagacagcctgaggtttacggtgacaggacattttgaatacctaacaaatgggctgtatcatatcaaagcccaccagtcaatattagcaatgaagggaaatgaaagtaaggtttgttgagggaacaggaagtttcctgtactgtttctccccttgctggaaagcaattgtgatcaataccaggtgcaaatcattgcttgtaagaaaaaagcattcatgattatatatcacaagcaccacatcacaaatatacttatgtgtattatgacttttaaaagggaatagtgctttataaatcccaccatcttttttttttttttttgagatggagtcttgctgttgcccaggctggagtgcagtggcgcgatcttagcttactgcaccctctgcctcccaggttcaagtgattctccggcctcagcctcccaagtagccaggactacaggcaacctaccgccacacctggctaatttttgtatttttagtagagacagggtttcactatattggccaggctggtctcgaactcctgacctcaggtattccacccgcttcagcctcccaaagtgctagcattacaggcatgagccaccgcacttggccccaccatcttttatatcttccaaaaacaaatgtccacattactatggaaccctcccaaaaactccattgattgaagctgactttccactcaattagtgaccatttaaaataggtttctgctagcactacacctgtcagtcattcataccttacttactgtcaaccagacattccctccgggaatcagtcatgctgactggtagaaaggagataacaggtgtaaattaggaactccagtgccaggtagcccagcgtcagaggatgaacgctttgaatcagaagcattggaaactcactaacctcacagtttctcagtctcagcactgttgacatttggggacagataattctttgtggtgggggctgtcgtgtgcagtctaagatgttgagcaacatccctggcgtgtacccactagatgccagtaacacacacactccaagttgtgaccaccaaaaaatgtctccagatattgccagctatgccccacagaagcaaaaaaaaaaaacaaacaaataaaccaacctgggtgagatccaccagccggggatctccccagccagggatccaattatttggatcgaacaaataatcttcacatgaagggaacatgcaggtatggaatttttcttccagagcagtttcctcactttggcagtttcctcccaccctccccatcttttcaactttctaggtaaatgtgtcctgagaattgaggcagttgtagatagggcctcccaggaagcaaattgccaattctccttggtgtagtaagcatggaccattttgcagcaccgtcccctgaacttgccacattgtcctaagtgaatataacaatgaaaatatacaagagaaacatgccacatttaggttggagagcattttgacatcaccgttttgttaattctgttctctccacagaagctgtcatctgtagacacgtatcagaacaaacagaataattgttaacagcacaatattttttcttattttggttactatttggtcagaaaatatctcaggccagactttcattactagaaatgtttgtatcttaagctgtgattttttttccaaaaattatgtcatttttttttaatattttaagttctagggtacatgtgcacaatgtgcagtttgttaattatgtatacatgtgccatcttggtgtgctgcacccattaacacgtcatttacattaggtatatctcctaatgctatccctccccgctccgcccaccctatgacaggccctggtgtgtgatgttcctcttcctgtgtccgagtgtactcattgttcaattcccacctttgagtgagaacatggggtgtttggttttttgtctttgtgatagtttgctgagaatatggtttccagcttcatccatgtccctacaaaggacatgaacttatccttttttatggctgcatagtgtaccatggtgtatatgtgccacattttcttaatccagtctatcattgatggacatttgggttggttccaagtctttgctattgtgaatagtgccacaatgaacatacgtgtgcatgtgtctttatagcagcatgatttataatcctttgggtatatacccagtaatgggatggctgggtcaaatagttctagatccttgaggaatcgccacactgtcttccacaatggttgaactagtttacagtcccaccaacactgtaaaagtgttcctatttctccacatccgctctagcatctgttgtttcctgaccttttaatgatcgccattctaactggtgtgagatggcatctcattgtggttttgatttgcatttctctgatggccagtgattatgagcattttttcatgtgcctgttggctgcaaaaatgtcttcttttgagaagagtctgttcatatccttcaaccactttttgatggggttgtttttttcttgtaagtttgagttctttgtagattctggatattagccctttgtcagatgcgtagattgcaaaaattttctaccattccataggttgcctgttcactctgatggtagtttctttgctgtgcagaagctctttagtttaattagaacccatttgtcaattttggatttgttgcttttggtgttttagacatgaagtccttgcccatgcctatgtcccgaatggcattgcctaggttttcttctagggtttttatggttttaggtctaacatttacgtctttaatccatcttgaattaatttttgtataaggtgtaaggaagggatccagtttcagctttctacatatggctacccagttttcccagcaccatttattaaatagggaatcctttccccattgcttgtttttgtcaggtttgtcaaagatcggatggttgtagatgtgtggtattatttctgagggctctgttctgttccattgatctatatctctgttttggtaccagtaccatgctgttttggttactgtagccttgtagtatagtttgaagccaggtagcgtgatgcctccagctttgttcttttggcttaggattgtcttggcaatgcgggctcttttttcgttccatatgaactttaaagtagtcttttccaattctgtgaagaaagtcattggtagcttgatggggatggcattgaatctataaattaccttaggcagtatggccattttcacaatattgattcttcctacccatgagcatggaatgttcttccatttgtttgtgtcctctttttttttttgttgagcaatggtttgtagttctccctgaagaggtccttcacatcccttgtaagttggattcctaggtattttattttcattgaagcaattgtgaattaaggttcactcatgatttggctctctgtttgtctgttattggtgtataggaatgcttgtgatttttgcacattgattttgtgtcctgaggctttgctgaagttgcttatcagcttaaggagattttgggctgagacgatggggttttctaaatatacaatcatgtcatctgcaaacagggacaatttgacttcctcttttcctaattgaataccatatatttctttctcctgcctgattgccctggccagaacttccaacactatgttgaataggagtggtgagagagggcatcgctgtcttgtgccagttttcaaagggaatgcttccagtttttgcccattcagtatgatattcgctgtgggtttgtcatagatagctggcagagtgcagctgtttctgacagtaagagtaggctcttttgctggctttggggtttctgcactatatgattgaggtataggaaggaaaaatggggaggaatggggctgtgcagctgggtaatgtgatgggtttcttggagctcagtctgaaggagacaagatgatgatgtctctcgcccccacctggatgtctgagctcttattattttgagatatgtcccatcagtacctaatttattgagagtttttagcatgaagggctgttgaattttgtcaaaggccttttctgcatctattgagataatcatgtggtttttgtcattggttctgtttatatgctggattatgtttattgatttgcgtaagttgaaccagccttgcatcccagggatgaagcccacttgatcatggtgggtaagctttttgatgcgctgctggattcagtttgcccgtattttattgaggatttttgcatcaatgttcatcagggatattggtctaaaattctctttttttgttgtgtctcggccaggctttggtatcaggatgatgctggcttcataaaataagttagggaggattccctctttttctattgattggaatagtttcagaaggaatggtaccagctcttccttgcacctctggtagaattcggctgtgaatccgtctggtcctggactttttttggttggtaggctattaattattgcctcaatttcagagcctgttattggtctattcagggattcaacttcctggtttagttcttgggagggtgtatgtgtccaggaatttatccatttcttctagattttctagtttatttgtgtagaggtttttatannnnnnnnnnnnnnnnnnnnnnnnnnnnnnnnnnnnnnnnnnnnnnnnnnnnnnnnnnnnnnnnnnnnnnnnnnnnnnnnnnnnnnnnnnnnnnnnnnnnnnnnnnnnnnnnnnnnnnnnnnnnnnnnnnnnnnnnnnnnnnnnnnnnnnnnnnnnnnnnnnnnnnnnnnnnnnnnnnnnnnnnnnnnnnnnnnnnnnnnnnnnnnnnnnnnnnnnnnnnnnnnnnnnnnnnnnnnnnnnnnnnnnnnnnnnnnnnnnnnnnnnnnnnnnnnnnnnnnnnnnnnnnnnnnnnnnnnnnnnnnnnnnnnnnnnnnnnnnnnnnnnnnnnnnnnnnnnnnnnnnnnnnnnnnnnnnnnnnnnnnnnnnnnnnnnnnnnnnnnnnnnnnnnnnnnnnnnnnnnnnnnnnnnnnnnnnnnnnnnnnnnnnnnnnnnnnnnnnnnnnnnnnnnnnnnnnnnnnnnnnnnnnnnnnnnnnnnnnnnnnnnnnnnnnnnnnnnnnnnnnnnnnnnnnnnnnnnnnnnnnnnnnnnnnnnnnnnnnnnnnnnnnnnnnnnnnnnnnnnnnnnnnnnnnnnnnnnnnnnnnnnnnnnnnnnnnnnnnnnnnnnnnnnnnnnnnnnnnnnnnnnnnnnnnnnnnnnnnnnnnnnnnnnnnnnnnnnnnnnnnnnnnnnnnnnnnnnnnnnnnnnnnnnnnnnnnnnnnnnnnnnnnnnnnnnnnnnnnnnnnnnnnnnnnnnnnnnnnnnnnnnnnnnnnnnnnnnnnnnnnnnnnnnnnnnnnnnnnnnnnnnnnnnnnnnnnnnnnnnnnnnnnnnnnnnnnnnnnnnnnnnnnnnnnnnnnnnnnnnnnnnnnnnnnnnnnnnnnnnnnnnnnnnnnnnnnnnnnnnnnnnnnnnnnnnnnnnnnnnnnnnnnnnnnnnnnnnnnnnnnnnnnnnnnnnnnnnnnnnnnnnnnnnnnnnnnnnnnnnnnnnnnnnnnnnnnnnnnnnnnnnnnnnnnnnnnnnnnnnnnnnnnnnnnnnnnnnnnnnnnnnnnnnnnnnnnnnnnnnnnnnnnnnnnnnnnnnnnnnnnnnnnnnnnnnnnnnnnnnnnnnnnnnnnnnnnnnnnnnnnnnnnnnnnnnnnnnnnnnnnnnnnnnnnnnnnnnnnnnnnnnnnnnnnnnnnnnnnnnnnnnnnnnnnnnnnnnnnnnnnnnnnnnnnntgctaggttggggaagttctcctggataatatgctgcagagtgttttccagcttggttccattctccccatcactttcaggtacaccaatcagatgtagatttggtcttttcatatagtcccatatttcctggaggctttgttcgtttctttttactcttttttctctaaacttctcttcttgcttcatttcattcatttgatcttcaatcactgataccctttcttccagttgatcgaatcggctactgaagcttgtgaattcgtcacgtagttcttgcgccatggttttccgctccatcgggtcatttaaggacttctctacactggtaattgtagttagccattcgtctaatcttttttcaaggtttttagcttctttgtgatgggttcaaatttcctcctttagctcagagaagtttgattgtctgaagccttcttctctcaacttgtcagagtcattctccaaccagctttgttccattgctggtgaggagctgtgttcctttggagggggagaggagctctgatatttagaattttcagcttttctgctctgttttttccccatctttgtggttttatctacctttggtctttgatgatggtgacgtacagatgggcttttggtgtggatgtcctttctgtttgttagttttccttctaccagtcaggaccctcagctgaaggtctgttggagtttgctagaggtccactctagaccctgtttgcctgggtatcagcagtgaaggctgcagaacagcaaatattgctgaacagcaaatgttgctgcctgatcattcctctggaagctttgtcttagagggttacccagccatgtgaggtgtcagtctgcccctactggggggtgcctcgcagtaaggctactcaggggtcggggacccacttgaggaggcagtctgtctgttttcagatatcaaactccatgcttggagaaccactactctcttcaaagctgtcagggacatttaagtctgcagaggtttctgctgccttttgttcagctatgccctgcccccagaggtagagtctacagaggcaggcaggcctccttgagcttgtggtgggctccgcccagttcgagcttcccggctgctttgtttacctactcaagcctcagcaatggcgggtgcccctcccccagccttgctgccaccttgcagtttgatctcagactgctgtgctagcaatgagcaaggctccgtgggcgtgggaccctccaagccaggcgtgggatataatctcctggtgtgccgtttgctaaggccattggaaaagtgcagtattagggtgggagtgatctgattttccaggtgccgtctgtcacagcttcccttggctaagaaacggaattccctgaccccctgtgcttcccgggtgaggtgatgccttgccctgcttcggctcacactcagtgggctgcacccactctcctgcacccactgtccgaaaagccccagtgagatgaacctggtacctcagttggaaatgcagaaatcacccatcttctgcgtcgctcatgctgggagctgtagactggagctgttcctattcagccatctgagaaccgccccaaaacttatgtctctcaacttcccaaacatcagtgttcagacactattgctccatgggtgaaatgagacaaccctattcatttagacataatgtcctttatatgcttttttaaaattttgagacaaggtcccactgtgtcacccaagctggagtgcagtgactcactgcaacctccacctcccaggctcaagcaatcctcccacctcagcctcctaagtggctgggaccacaggtgtgtgccaccacacccagctaattttttgtatttttggtagagatggggttttgccatgttgcccaggttggttttggactcctgagctcaagagagccacccactgcagcctcccaaagtgctgggattccaggcatgagccactgcgcccggctgggcttctaaagaaaaatgccctttcctccattcattttccaggagagattttgcttcttgaagtggtttttgctaaggaaatagatgaacctctctcaaagcaatagtcctgccgaaatggcccatagtaattacaagagttcccatttgccatcaggccagttgacccatcctgaggaagattccaagtgcagcacttccccttaaattacttttgtgactgtgacaaatgctttatctctgtgggctccaattgcctcacctgtagaagatagcaaaggtgttatgaaagtagctacctatttactatctgtaagtttgggtaacatcttttgctctctcagccaaggttttctcatctgtaaaatggggctaatcacagcatctcctccacaatgttgttgtagtgagtaaatgaaacagtaaatgaaatggcacatagtaggccctctataggcattgacgctcagtatcataaactcaaaattatccttttgtcagttctaaatgatttggcagctttttaaccttctagatggcagctaagaaacaaattgattcttcatgaccttggttgctttgtttttgccatctttttaagtttggccgtttggaggcagagccggtcataaatactaacctttttaaaaatcatcatcagcaaccagtatgggaaacagaatgcttccttgcacagctgtctcttgtttggttaatttactagatgaaaaaaaggagtcttaattacaaaaacagctcttagtatttgaggtgtagggttcaaatatcagaatttgaaacagcattgagattgagcaatgaatttttgttgtataccaaaaacgtatgttttcaattaaaagattatgggatgaagaatcacaagactcatcccagctcttcctccatctcagtcactttgagcaagaatgtgacctctctgagccatatttcagcccatggaatttagtttttgtttttgtttgcctgagatgatcatctaagccctccagtgttgacttcccataaagggtgtcgcatgctcagctaatcctacttgggcctggattctgattttgtcatttatccactgtgtgatcttgggcaagttgtttaacctctctgtgctccaggttcctcatacaaaaaatgagaataacagtctacttcatagagttatcatgaaaattaaatgaaaactgatcaaaatgagtgcctaacatatagtaagcataaataaaatgttagctattgcttttattattttgttggctgtctttagaggagaaaccgacaaaaaaaaatggaagtataatctgaaatcttggtgtttggatttttccattttatgaaccaaatttaccaaactaaccacttaggaaataaagacatcaaatacactgtcttttaatttctgcatgtataatttccctaacctacaattcatcaactactactttcccctctgatttctgaataggaaaatcatggctcttatcactatgtggtatatgttaaatcccaccaacatttcacttgggtaaccacatgtttaacaaattctgtctactttatatggagactgtgcccctagaacagaatgtctcaaacattaatgtgcatgtgagtcacatggggatcttgttaaaatgcagattgtgattcacctgttctggaggcagaaatcccacatttctaacaaattcccaggagatgctgatgctgcaggtccttagactgcactttgagtaacagggccgtagatattcacaagccatttgagcatggaggaggcagggggcacacctgacccaagtagagatcaagcagtagagatcaagcaggcctacaggaactcactgccagaccccctctccagccccaacctcgccaactctaatttaagaaattgaaatgtttcaggggaaaaataacaggaagatatggaaaagacagtcaaaaccctacctgcttctcttcattttcctaaacttaaaaaaaaaaaatcatagaatagattacaccaagcaatttgacccatctgcagttctaaattatcttccacaagacaggcacgtagaagacaatttaattctcccctctttactgttgggactgtatcagtgagatacaggtgctaaaatagaccctcctaggggagcattacataccctgcaggtacttaagtcataccactaaggcccatttcataaaatatgtttttggtgtatttaaaagtattctgtggacctgaaaatatcccaaaagcgcctgctctcaaggagatctcaccagtgtaaaaacctcacctgctattataaccaagaagatagctgtgcatgctgtggcagtgcttctattcctgaaccaaagaaaaaaccaaacttttccagattgaaatgtctcttccctaaaaactatctgccatgatcttgatcctatttatttttttacacataaaaattgaaaattagtctcacctgggtaccaaacaaagtgggaaattgtagtgagattctatgaaaacccagaggaggacctatatgttactctgctaacactagcatatatttgtgtggattttgttaatccctgagagtaatctgttgaaagaatatgggtgttttgctgccaagtactgagatttttacagggtgatgtataccattgatctaattacccaagtcatattttgtcttttatttgagaaattataaatcttaagttttgatttttgtccacaaatcataccctagtcctagtttccaaagtcagaaaagattcacgtgtattttctaccctgaaaaggggtatttcatgtttgggagcataaaatggggcgagtctcataaagatatcttgggtttttttgaaaaatgtgggttcagactggcatcaagaataaacattatgctctgaacttttgcacaggataaacctaatcctagcagtaaacatctgttcccttttatgtgcatttgtggctcgttaatatgaatgtttctgcaaccactgtagcttttctaatatcctaaatggaatctctgtggcctttagagtaattacctcaaagtttgagtcatccaacctaaggactctctgattaaatccggtatgaattatggaaaatcaaatgaccattcctgggggaggattccattgtgtcctccggaaagtattttcccagtgctcagggcctctggtcagtgttcagcagtcagcttgttcctatgtggttaaataattgtaagatgttgcctatgaacctggtcaccgccatgttttcatgcagccaaatgacatttacaccatggtctttgaacacacgttgttttgttttgctttttagttttgtttcaggctgcacttcagattaataagcatcctctataaatgttataaacacaaactttaaaattgttttaatggttttcatttatcaaaagattatcaatcattgtactttttagtttcagagtaattatttcaggtttctgcagtcatgatgattgtttttcattaggatagtgattgcctaatggaatatacaggaaaaccagagaagtgggagcagccagataaggaaaagatttgtttatctcctaacagctcccaaatctcacccacttaatggactgataatccccaccaatgaaataggagaagcactctgtgatagcaaacttaaattcacttgcacacggggacagaaaagcccagtctcaacaagagagaaaattaataggcaggtgctcagtaaaagaaagacaaaaccatttagcaatgaaaggcagcgtacttgaacaaagaggctaattttgcaagactttgcctaaaagaagatattctgaaggcatagtttatgtaaccggacaaaagttgaacatgggcctcagcagaccgtattgatcaagtctcaggagtgaagcagcagagttcttcttgagatgagtgcaccctgattagggatatcaaaacacattatctgagttagataaaataatgtatgaaaagtactttcggatgctatctggcatgtagtaggtgttcagttggtagtaattttaatttatggagcctagtctatgtagcctgacttaaataaatgctccataaatctgagctatcactaacattattatgattatgcccttcagctaccttgtacaaaataatgaatatggttccctccctttctcatccactctatcctcaattcccttaggagccagtggccaggaagacacaccctccccagctatgacccatgcctccatgagtctaacaatgaccagaatatttcactccattttgcaggcttaaattgttgagaataccaaagtaggatctgttcacagtctcaagagctatctaagtcttcattttgggaacactaacatacaccaacaagagctcagaaatgatcatgattgcatgagcttagaataaataagaaatgtattttaaaggaaaaagaactcaccacagactggaatagtaagggaaagctgtgtggataggactgaaactgagctgggagagtccagaatgttcgtgtaaattgagagaaaggggaagcatgagaatagatcctacaggctccttcccaccagttgagaattgtggatttggtctctgtaattactagtagttaaaaaaaaaagggggggggggcggggggagacactttgaacacttactgtatttctgcacaaggctagaccttgtccatgtgttggctcatgtattcttcacatcaacattgtgaagtactttcacaccaacactgtgaggtcctataacctataacgcttccatagcaattcttgaatgtagtaatagcagatttcctttagaaacagccaacaatttaacttttcactattttggagatgtctctcctcccttgtccgaatattccaaatttacaagtctcatggcatcagctggggcagagttcctgcagagacctacataaatggaagcgagcaggcactgcagcttcaggctactgttaaaagttcccaggccaggcaaagccacctgggtagattcaaaggcactgggaaacacaagccaggagcctgccctctggtgaccagctcaccccatcccagatgttagtggactaaccgattaagtcagtgtttcagaggtcttagaaagatggccttgagataccagctccggcatccgatacaaatgccaaagtaaaaacacggttggtttacacagcctgaggacaaggaagaataaagccatctagctgccctttctgtcttccctgctcacagagcttgtctaaggctatgctacagtatctgttgatggctgagctgccttttgttgcagaactttgatgctaaccagttatggctgactctgccttgcatagagcacattattgctcagtaaatagaaattcctaaatgaataaaaacctgtatgtgctctgttcagtttcggggtattttgatctgttcttattatgttcaattatttccaaataatatttattgaggtcccatcatgttatagcattgtgcttagacctgtggagattaagagatggatacattgattagagtccaataagagggaaaagggcgcatgtaccatttacatgatacaaggaggacatggtaagttcttgccttatagaagagacatagacaaatattatggataattcaggagagagattcaaagaggtagagcaatttgccccaaaccacagctaatatatggcagagtcagaatttgaaccttggcaagcagagcccatattcttacccactatcttttcctgcctctgaaaagcaaaataggtttcattttcaccagcacttctgggagaacaatcctattggtagtccatattgaattgcttgtaatgatgagtcctcctagcagaccagtggcttttggataagaaactgggcatgaattatgtccctaggaaatagttttgtgtttgcaaagttactggattatgtgcctaggaaatagttttctctttgcaaagttatgagaggacaataaatattacttcagatgttgtgctagccactatgagtgttaagaaaattatatacatgtatgtaaatggatatatcacaaggtagaaggtagcacatggaggagagagatacatggaaagtgggatggaagtttggagggtggatggattgcttcaagaaagcttaaatgatgaactagaccttgaaggttgagtaaggatcaaatgtgtgtcttcattgttatgttatttgagctaccaagctaatcaagccagataaaatgatggtcaggcaaacctaacaggaaatgctcacttcaccaaaattcttctcccatttgccttgcacagaatctaggaatccaattttagagatacattccttgggccatggcccaatgctttccaggcatcctctttaaaacacaacttctgctgtgaggtgactcatcccaggttcttagccattaatatagtggtatggagtcatttatgaaattcttttttttggggtggggggaatgctctttaaaaatcatgtttagaggagaagagtttggagagtaaggcaagggaagagaggtcatgtggatgcataagtgaagaacttacaattagtgcatgcttacaatgtgcaggacactgttctaagacctttttatatataaacctatttggtcatcaaaacaatagtatattcccattttacagaaaacccacatctctaaagttccagaagcaactttttttatttttatttttatttttttggcctctctaatgaccacctctcacgaggctaccaagaaatataagggatgagccattccttcaaatggcttctggactaggtcaaagtttacagtccttggcaaccagaagcaactttaactgaactatagaaggtcaggtcaggttttagagtcagaagacctgggtttgagtccagttccatcatgtacatccacatcactttctaaattcagtttccacacatgtaaaacagggatgataattctgtccacattccccacccccatacaaattttgccaagcacctgttattcataaggctcttttgcaagtgctagagacacagtaatgaccacaacagtgctcatccctatttctgtcatgcttacatttccagtgaggacagacaaaacagttcccattggtgacaagtatgatgaagaacctaaagtaagatgatagagagaaaatggttggagagctggtcaggaaaggcctccctcaaacctcaatgacagggagctggtgatataaggatttggacaggggcactgcagcataggaaagagcttctgcaagatgctgctgtgggaatgggcttcctatgttagaggcagcccatgtggctggaggatagagagaagggggcagagccatgggtgaggagctcagccagagggaggctcagtggggccttgaggccactgtaaggcctgaagattttattctaatattggtgggaagtcatcagattattttaagaaccagagaaatacactcttatttatacttttaaatgctcactctggctgctctgtggaaaatagattataagtggctgagagcaaaagcaaggagacttgttatgaatataaatgagtaacaggaaaattaaatgaggtagtaagtacaatttctaaagaactttcaaagcacaaataaaacaatagctattaataggtcaattactactcatcaaactaagggcgataaggagaacatatcggttaatagcacaaaaggcaaagaggagcaggtgaagtgcttctcttaattttaggttccttgtcagttaagcagtatatattccctggatgtttgtgaagataaagtgtctagctcagttcctggctcatagtaaatgctcaaccaaacattattctcctgtcctgcacgattctaaaaaaaaatcagttgaggcgtacatagtctgagaattcagcaaggctaaaacttatgggttgaagtaaaaaaattaaaatggaaatttgaggcttcatacctaatagtctgatgctacacaatgataattctacacactctctgggtttacaaagcacgttttatacacacacccctaatgcagaatatggtttgcagtcagtctcagtacctaatattaatggccttttaatgcaagctaaactcttgcaatgagtgccatgaaatcccagcctacgcagcttaccccttctgaccactttgtcataatcctatttcctttgctttagctcttttctaaggtatcagctcgctcttgtgtcctgaaatacttgaatattttaatctaattctcccttctttgatggacagatttattttctatcatctttaatgaaatatccagagataggatgtaagtagttatgttaatgcgatttatgtttgtttctcttttgcaaaagaacactttggatcagtgttgtgtcaatcaaagccatcagaatgatggtcatcgaatgcaaacctaatcattcaagcctaaactcccttgagacacacaagccaatgcagttcacatgtccctatctagttattattttattttgttctacttatttttaattcaccataactaattaaattgattaattgtgttgatgtctagaatgtgaagtattgaaagccagatgttagctgggattcattaaagagtaaacggttcataatttatatgaataacaagatatgatcgtttctagaatgctcgttttttaaaaaaaatattacttctactactgtgtgcattgtgtcccagataatgctcagaacaacaggcttttatttttaattttttatttatttcaataggtttttggggaacatgtggtgtttggtttcatgaataagttcttcagtggtgatttctgagattttggtgcacccaccacctgagcagtgtacactgtacccaatgtgtagtcttttatccctcatcaccctgaccctttctgaagtccccaaagtccaatgtatcattcttatgcctttgcatcctcatagcccagctcccacacatgagtgaaaacgtatgatgtttggttttccattcctgagttacttcacttagaataatagtctccacttgcatccaggttgctatgaatgtcattatttcattcttttttatgtctgagtagtattccatggtgtatacatatatatcacattttctttatccatgagttgattgatgggcatttgggctggttccatatttttgcaattgcaatttgtgctgttataaacatgtgtgtgcaaatgtctttttcatataatgacttcttttcctctgggtagatacctagtagtaggattggtggatcaaacggtagacccacttttagttctttaaggaatctccacactgttttccaagtgacaacaggctttttgagtaaatacttatttacatccatacctgcaatctgagtaaatacttatttacatccatacctgcaatctacaagataatatctaattaacacctgacttttaaggcgtcactcagtagacctcaaaacaatggatgactttttgaatgataatgaaaatttactctgaggttgtgtaaaatattggagtctgaagaaactacacgcttattcaaaatctgtcactaatttattttcttaccttaaatttatcttaaccctgtggatctcaaactctgttgggtatcagaatcacctggagaacttgatagatctatgcatgcccacaccctatccaaatttcaaaaagcctggtcttcagtgttgtttaatagtgcctcaggtgatactgatacacatcaaactttgagaatcactgacttaaccttttgggatgttaatctccctaaaaagaaatatcccatttgtgtgagctttgaaggaacaaaaggatatgggcattagacataggaaattactgaagaccattattgccaaccacaggtatgtggaggtaacttgcagttctcaccaacaacagtatatccagtaggtagaattcaaggaccccagtgtcatgggagtctcatccttccttgggaatggcataggaattgcatgttgcccctctgttcttgcgaggatcagaatcaagaatcctccttaaataaattcctgttgagttttctcatgacccaaccgggacttctcagtctccaggtttcccagcagtgccccaaccaataaacctgccagttaagcaactgaatatcattattacgaatgtaattacagacagtaattatgagcttgtaattgcctcccatgaatgaagcccttttcccaaaccatctcagctgcttttctttggaaaatgaaagcaatcctatcccttaccacaccccaagtgtagccttccttgcttagaaaaaaaccccttcttgctggcccaagggacatggtaagcaagctttaataggctgcactttaaggggcaatgtcctcttggagtggagcccctgttagcatctctcagccaagcattgtttccctagggagtaatgactacccagtttggctgtttttcttaatttctgtggggtcaagggaattaataccaaattttaggaattttctgcagaaaaatcacatcttaaaggcttttcaaaatagtttgagaactttaaccttatttaaattaagctttgcgagatgcaatttgctgaggatttagagtatctgaaaataaagcagacaccataaaaacatgtgtgctgagaagaattttcatgtctgtagaaataaaatcaatctcattaggcccagaattaacccctgcccccagtaactttatatttagctcatgaaaaacctcaagcccttatggataaaggtacttgaatgagttacacatggatatgtttagctcgaaatgcaatacgatctttcaagatctcaatctgttgttgccttttaatggctactgagaataagtgcctgtaattgcaccagtagctagcacagtcgaaagtggtagaagtccacacctttttgatttaccatgcaatgaataatgccatataaactctgaaaaggaagaatctatgtttatataatgtgcctaatacaatgcttagcacagccctttgcatacagtgaattttcagagctcttctctgaataagatcaaatgttacacccaaaagctagcacagtgtacaatttttaaaaggagacttattgcttactggccaaagtaagctatttcaagccacagcatttccatttactatgacaaaggaatcgtgtgttgattgttactttgttactattgttcatggttttctcctggagtagaaatacaatgtgcatgggcattggcattttctcatagtaatatgaaaacccggaagggtaaatgcaactttcaaaagtgactgagtaatttacacttttagagaaaccatcctaaccaacattagctgaagacatctggtagctttcgagagggtgcttatgaaaacctaaagcatttttaaccctcatgttaaataatttaaaattcactttaaatgtttgaaagtcagcttaaaattcagtgtgctgtgcacaggtcaggatagacatgtctctctaagccccagggatatgggtatccatggtcttctcgtaatttcactgttaaaaaaaattcacatataaatttgtgaattatgatcactttaaaaagaccatataaactctgaaaaggaggactcacatatttatattatattttttctaattttgacaaacagtagcttaagaatttctgaaaatatggatgaccagatggattgtttttttaatgtgtacaacatgcatacaaatatgtatatatatatatattagcttgctcatttttgctctctatatccatgtgcagtaaagatatttaaggaagtaaaatttgccaccagggaaggttagtgtcagaaatttttcatcatattattacattttttcccattttctgtaggccagaccctcaagtccctataaattgaatagaaaaaatatatataatatacataaataattaaccagctgtactccaaagaatttaagttcatcattctatcattagggctcttaatttgtcccacacctaaagcactatctgctttccttcatcggttcttattgccaacttgggactgtactgaagccctttacaaaacttctatttgtaagattcccttctttttttttttttctttttgtaggccatcagaggtagaaggtggtaaaaacagagttgccactctcggtgtggccacgtgagcacgtcccacttaagtaacagggtgtccctcaggtcagcttgtgataaaacccaagtcaaacaaggctgaatcctgggtgttttatgtcctaaggatctgaaaagtgttcacggccagccctgaccctcaagacctcaaatggtcatctaagcagtaacgtaaattggtgtgtaaacttgctcctgggccattgctgtggaagtgggactggcgaaagtacagccttgccatgcaggaactaatgtctttctaggcatttaaaataagggggaatgtgttgattactccgacaggcaacccaactgcagtggctaaatgcccaaggctgacaaattctgcatcttatcactcccgtcaagtggcatgtgaatactgtcagcccaaaagaattgagaaacaacttgccttccaaaactctgcatctcagcaaaatcttgacaatgccaacagctcgtcatctcgtgtttttcaaccctttagaaaatggccttacagcctgggacaaaccgaagcactgtccagaccgagaacacgactggaagctagtaggaatgtctgaagcctgcctacataggaagagccattcagagaggcgcagcacgttgaaaaatgaacagtcgtcgccacatctcatccagaccacttggactagctcaatattccatctggaccatgatgatgtgaacgaccagagtgtctcaagtgcccagaccttccaaacggaggagaagaaatgtaaaggtaaccagatttttattagcccattatcatgtgtttcaacaagaaaaaaaatatccctgttgtagctgtgtacttcatctacatttctcttccaatgtatggtgtcccatgttttctccaactgttcttttactaggcgtccttttcttcaaatattcttttaaacataaataaataagtggaatccaaagaaaggcagcttgtttcggtttcacgttgtgctgggacacttggggtgaagacatttttacttctctaattagtagaggggttgtaagttttggctttaattccatttttgggtctgagtagaaacaggcatcgctgtatttttatgaagtcttgctttaaagtgtgtctgtgcatgtgtacatttcttttcccaagtgtgccagtagctaatgggatctcaatgcctacctttaacctagacaattcatgctcaaatgagaggttttaagttgttgtcttctactcattaaatccttgtgtcatcatcctgaaaggagagattatggtgttaggaggttgtcacctcataaggcaaaaaaaacattaaactggcctaagttcctgattgcattagatttaactgttctttacctcaggtcgcctccaccctgacagatgtctttgtgctgatcgctttattgtcttagggctccccaaaatctttgcttcttaaatcaatttgtgtctttcaatgtccaagagatcaatttgcatctttaaatgtctaagttcatttaatttcccattctttttcagtttagtggtttttcttttttaaaagaaaagggggggtctatttagtttttctttgaggattgtgactcatggtaaagttttaaattgtgttttgaaaatctcacaatcatataccaaaacataataaagtttgcaaagactcccatttacaaggcatgaaggacttacacagctgctctactttgaacatatacacatgattatatttatccttcatataaaagaactggtcttttaggttttctgaaaatgctttgaaagctcctgggaattaccagtttacctgggaaattgagtgtttcagttggaaatagagttattcaaaagtaatagtgaaatagtgttctgagctctgatttgagtgcagtcaaaactatacatgtccctttggaaaggtttgtatttggactctctttctctcatatatatatatatatatatatatatttgaggagatctgagaaattgaaagggctatatagaaaaaaaagcaaaataaagtttttcaaaggagtcaggatgtaggacgtatgtgtgtgtgtgtgcacgtgtgtgcgtgcgcaaaatacatttgtttgcaatacaattgagatttacttttagcgtatgtggccagattgtatctcaacattgtatgggctggcactaaaaccatgtcagtttacggtgaaacgccaacagaaaactctagcatccttgtgatctaataatgtcataaacccaatttgattcactcacaattgataccaatattcattcatttattcattcatagagtccatctatgtctctatcaatcatttaaaataaatctatgcatcttaaaagcaaaaggaaacagtctctgtttgaatacaagatgcttagtagagtggttaagaccacaaatatttgagactgatctatttgagctagaatcctagcctttctactttctgtccttgagcaaacttataagattgttaatacaattaaataagatgatgtatttaagcatttagcaaagtacctgacttatagtgctctctgaatagcaactgtcattattattgtgatccttattattaggtatgcattattaagtcatataaatactttgaactatgctgtgagcctggtaagaaatgaagcaagaggagaatttcagatagatgtggggtaggacatgaggcttcagggacgttagagttgataatttattttgcattcattcaactctttttcactgaaagtcagagatgtaatgagaaaatataattaaattattaaagtccttcctcaagatcctaatattaacaggaaaacagctaaaataactctcccatgttttccagagtaaccaccagggtccaccttgacataggcatgaggcaatgccttggttcagcataaaaatgccaccaggaaacctatgtcatcttggtccaagaaacttataaataccattcattcaaaatgggcacatgtgttgagtgaggcagcagtgagtccaggacagcaacaagattatacagtctttccttatagagttggttctccatctgctctgcttgtcagctctatatagttactatgaagagagttatattttgatgttcatccatgttgggcatttatttcctagatggctgtgtatcccacaagaatgcttgacatctcagtcttgggctagtaatctatgcattcactcatcggtgtttattgagtgcctactgtatacaggatattgcccttgatgtccaagcataagaaaatggcagcagggccaaaaggacatccaactagccctattccaaggaccccatgtagaaatgatacgaacaaaatagtcctgaggatacaaaagttaattctgcacaacaggatccaaagaacaaattgacttccttgaagctgtgcagtgagcccatctgccagatcagtcatctagccaggctagaccagtgcacttctaagcgtggtttggggactggcactcttctgcaaagtggttattaccatttctattgatgcaaatacagaaactgagagtaagctttaggaacttttatagcagtttgacattgccactggcatccaaatgcatgatcagtgaattcatttcactgaacaggatatagacagttagttggggattgtcaaacttgcctggtcagtcacatgtggtttgaactatgtaaaagtcctgtgcagtagaaccatgtattgctccataatggaccagatttttaaaatagtctttcacttcaaatagttgatagtactctaaatattgtttctttagggttttgggtagctatctaaggttttgtttttcattttgttctgaatactgctttttttttttttttttttttttgaaatggagtcttgctctgttgcccaggatggagtgcagtggcgcaatctcggctcactgcaacctctacctcccaggttcaagcaattctcctgcctcagcctcctgagtagctgggattacaagcatgcaccacatgcccagctaatttttgtatttttagtagagacaggatttcgccatgttggccaggcaggtctcaaactcctgagctcaggtgatccacccacctcagcctcccaaagtggtgagattacaggcatgagccactgcacccggccttactgcttttattttaacctgcatatacctatgcttctgtctgctgtaagcatcctaagtgaattaattggtaacacatttaattagaatgagagctatggaagagcccttacattctgttgcagatctcacaacagatctctgttgaatctgctggagtatcagaggctattttaaccaggagcaagtgacccattcccttctgcaactcaccccacccacccacacccgctctttccatgccacacttccttggcactttaatcacaatttgaaccaattgctcagccataaggaccacatcctactccttgtcctcctcctcccttcccagtctgagacgatatatccagtgctactgaaagtgtggtagtaccaatcagtggcactaggagaacctggagcttggtagaaataagattctcaggccccacccagactactgaatctctagagaggggcccagccttctatgttcttgccagcccagtgcagattcttaatacctgggtatcatgacgagcttgaaaatactcttcaactcgttgcacaggaaagggtctgccacctggtgggcacttaggaaatgtgcatttttcttcccttccctgactgcacgtggggagccacttgagtccctccattcttggttgggcctgtctttgggcctagcttatctcaattgccagctggaaggtctgcttagtcactgcctaataacagatcaccctgggacttgagcccttctgagaaccccacactgtttgactggggccctgatcctcccctgaagtcttacaaggcttcacccctctaccctctcatgccctactgtacttctctctgggaaccacagggtctccccagtcccacaaggatgggctctagacggatgcatggatccctggagctggacctaaccagccctgctgaacccaggcagtcaggcctttacacttttatgtcaatcagggaccttcctgaaacagtgaaacccaaggggagaaacaaggcagggactcacccacctccctggtggactcagaaaaaggagagcagccatcagtgatctcacagaaatgtctctgtgcttaatatttttaaaactgattctcagatacccaggaaggcaagagggaatcagttaaaataattttaagaacaagttacttcctctcattataaaagcctatatatgttcatggtagaaaaaaaatttctacaaatttttaaaattgcaaataatgttttaaaatcagttgaagttctattccccaagggtaagcactgcacattcttattacatttcagtcttttctctgtgcatgtgtattttttataaacctgggatcatactaggcataccattttaaccagcttttaatgcctagcaatatatcatgaacattttcccatgtcattaaatattctgagtcctgactttcattggctatagattattcttgtttatagatgtatcataatttattaaaccagtcctcaagatttagacaagttaaagtaattttttaaacaatatcttatgtcagcaaaggggaaaactattaattcatgctcttcataaagacaaaaaaaatgaatcaaatcagtgatgacaatttcaaatgatgtgccattctcatttaccaaaataacaaagtgtcttaaaagttggagacataaatgcaagtcattgtgtgcattataatccttcatgttagacattcacattttcagcagatgattgctatctttgtccttaagtaaaatacaagggcatctccaggtgaatgagtattttaaaaggtggaggattaaaaagcttgtgcccttccgccagtactaccatctgctccatccatctctgctctctactctgccccactcatcatacatcaggatctgcagtcccaactgagagtgccagtgattcttatacctcaagggcactctgggaaccttagcaatcaacatgagaacgatggctctctccccactgtgggcatatgtcagatagctgtgtgatttgatacttcaaaggcagggacgagtaccccatacgtatactggggcagacagaaatagaaagccaagggggagaaaagctactcacgagattggagggaagaaaaaacaaaaaactggaaacagcaatgtcaaagggaggtagatatcagaaattcaaggccctggttcatctaacttcagttttcgttgagatgcacacagagcagaggatggaccaccccacgctttccaaggccaactgaacagtgtctgtcacgccaaaggatgcagacgtacccaaccatacctctcatcatactctgtcccagggaaatacttacacagggcacaagtctgttcaaacatgttctttgcatctttgttttttgttactgataaactggaagcgatctaaatgtctgtccactggggaatgttccaataaattgtggtacatccaaagcattcaccagaaaaattaaaaacaggcttttttaaaagaagtgattttaggaatacttattgaaagtaagcatgcattaagaatagtgtaatcccatttataacgttaaaagtctatataattgtgtgtttacaaatgtgcacagaaaaaagttcccagatatacatcaaacttgtttcagtagataccttagaaaagggcggaataagaaggattaactccatatgcaaccacattcaaaaatctttacaagaacgtattaataaatattaatgaatgtattaatgaataatgatgtgcataaatttgtttaatgttattatcatatgctttacagttaggcttcagtttatttcttgctctttaaatcatcagctcagggaaaattttttaacctctgtaaccctcagtccatttagttttaaacagaggaataatatctagctttcagatttgttgtaaagatgaaagatatttcaatgaaggatttaatttaaaaaaaaaaaaaaaaaagatgaaaggccaggcgccgtcgctcacacctgtaatcccaacactttgggaggccgaggcaggtggatcacttgaggtcaggagtttcaagaccagcctggccaacatgatgaaaccctgtctctacaaaaaatacaaaaaaaaattagctggggatggtggcgtgtgcctgtaatcccagctactcaggaggccgaggcaggagaagcgcttggaacccaggaggcagaggttgcagtgagccaagatagcgccattgcactccagcctgggcgacagagtgagactctgtctcaaaaaaaaaaaaaaaagaaaagaaaaaagaaaaagaagaaaagaaaaaagatgaaagataatatgtataaagcccccaacatagtgcctgacacttaggagagactaaacaatgataactgttcttagaatataaacacacctcttagccttgtgcccacctcctccagtttttgccaccctttctgaccttgaaatacattgaactatataaaaataaatgaagggacgccaaacaaaacatcatgtgcacagctctagtagaggcataaacagttgaaaaaaaagtccatagcaacaaccaaagtattttttttctcagactcttttaaaatttaaaactttaaataagaaatcaaggggaaaatgaagtagctgaactggaattctaactcaggcaatctggccccagggtcagagctctctacagttataatcccctatgactttaaagggtaagaacattccagacccaaaggaaagaatttgaaactgcagaggaaatactgctctactgtcaggtaaagatgcagggtggtcagacttgctgtgatgggagcagtagaggtcagcacgtatctacttatacagtccgaggtcatattctggtgctgccatttaccagccattgaaacttgggcaagtcactttgtttgagcctcagttttctcgtctgtaaaatgtggaccctctttcacagaattgtggaaagaaacaagctcttaaatgatctcatgggacacagtgagtgctcaatagatgggagttatttttcttacaatgagccagaaagactatgagaaccacattggacattaggaatgcagaatgcccacgtcagaataatcactatattgtggctggcaggattgaagtttctaaagccaggaatattacggacgcaggcagaacagatgtaatagccaaatcccttgactcttccatcaggtagttttcagacaaaatcagatacaagtggattgctaatgtacctagcactgaagttggaaaggtattattgggagggtcagccttacaaagacatcgtaggtgatcactggaattcagtctttcccttccccaggacatctcctacaagttgccctgaatgcttataattctatcattgcccttccattgtggtctttcttttttttgtttgtttttttgttttgttttgtttttgaaacggagtctcactctgtcgcccaggctggagtgcagtggcgcaatctcggctcactgcaagctccacctcccgggttcacgccattctcctgcctcagcctcccgagtatctgggactacaggcgcccgccaccacgcccggctaactttttgtatttttagtagagatggggtttcactgtgttagccaggatggtctcgatctcctgaactcgtgatccgcccaccttggcctcccaaagtgctgggattacaggcacgagccaccgcacctggccccactgtggtctttcaaaacgcaaacttactggctgaatatcttatcaagtcattagcttctccaaatggatgaattggataagattccttttactcttgacagggtccaataaagacaatggaaagaatgggactagaaggaggccatgaacagggtaaggatagcaagggataagagagaaggaaaagaataataataaggaacaggactgccaagtaacaagtaatactgtgcagcttgtcaggttgtgagcagcactcacttcattgtcaaggctctaaagacaaatgtcacctatctcattgtttgtcaagggctgaccctgagcgtaggtttaaactacaaagagtttccagccaaatctagacaaatgtgtgaatgacgtaatgatcataggctatcaagatatccccaaaggcctcaccttacacagctggcctgctgcatcgtatcttagggattttgcccagcacttagtaaacacataggagaatgtttagaacagatgaccattggttcttggctttgacgcttaccagctatttaaccttggctaaatcaataattctctccaacaaagaatgtagtcagagattaactgaccacaaagaaatcaaatagatgaatctacactccatttttaaagtggccctccaatatgataatcatattttcccttgtggggaagacaaggaaaaatatattaaatcattaccagccccctaaaacaagctatgatcatcatgaaaacataagaccagttccaggataagttgggaaatcagttgccttaaaccatctctttcagtgtccttacttcccttgaggatatctttttcccaggaaaataggagtcttcaggctatccaaacccattttcagtctctacgaagtctaggcttcttccctcttcacattctgaaaacattctcattttccataaaaaaaacttattcccctgaaggtgttggtgaccagtactgacttacatccttacctctccagggcagggaggctttgagttttgagtactcctggagatgcagcgacctcatgccaaaggtagcctctgatagtggcattgcagtctaggaagcacatacatgggggaaccgtatcacctgtgcttacaacctgccctggcatagggctggtttatctctccagttattctattctgtggctaattctgtgagttgtatttacagattggtctttcaggtcttggccagttcagccttcttgattgaactggaataaatatgagcctctatccacactgcccgggtcccagaaattcagaaacagctgagcttttcaagtaagattagagtcagaaattctccaaggtccagagctattctccatggcactgacctgacataggattattatatattgtgaacctctgtccccatgacatttgtcagtatgggcttatataagggacttgactttattcaactttactgccttttaaaatacagagctgtgctgcatatgtgactgtttaactcaattgtctatatgataaagacacttggcatttgagtcagaatatcatgtgtgggttgatggtttattagtctagactgcaatattctatgacttgcagattgtaccccaaccacccatagttgcctcagacatctagtacagctataaaggccatactattttagttaagcctcaggactaatgaaaagatatgtattcagctctttgtttgcctagttctggaaataacttcttataataagactaagatataaaactaaaggtcaaaactgtgtaagtaaaagaagctactgccctttaagggaaaaataatacatgttaatttttgcagcaatttcaattgaatgggtttccagggaaacaggtatctgcaatgggttcatcccacttaatatttaagacaaaacatagggaatttctttcttgttatcttttccttgttatcttacacacgacatgctcattcttaaatttcctttgaagcgatcattctatgcttgagtcttatttgttctcccaaaaaaagaaatgaatgcccgttctatgatttttttaagactttttgatatcaggaatataagcctggtgatcactactaaaaaataaaattatgcaaatcaatctgacccccttttttaatgaatcaaaagctatttgttattacttgttttattgaaaatctgcttactttctgagttggattctgtttctaagagttgaagtggaaaaataaaattggtggcaaaggaccactaagtcttcaaggttgagtaaattgtacgttttcttggaagagctcctcaggcagacctataaattcctttttatattttgttctaaattaatctcaggtttaccaaaaagttgtaatagtgcaaataattcccatacccctcacctggattcaccaattgttaacattttaccatatttcttttctcattctctgtatgtgtttgtttgcatatatacatattattattatgtcatttgcaaaccatatgagagtaagttataaacatcatgcccttttaactctaaatacctgctaaaactaaggaaattatcttaggacacatcagaattgggaagtttaacattgatgcctactattttctaatctacagactttatttacattttacaaattatccttcctgccacccccttggagggggagttgagatgaggaccagagctggagagaggacttgtctctaagaggttttcacaggcttcattcctctagatagggctgggagaggccaccaccaattgtcctctataccaatcttattttccggtctgggatccaggccaggatcattcattttatttatttattttttatctctttagtctgcttcttcctcccaccacctgtgcagctttattagagtataatggacaaataaaaattgtatgtatttatcatgtacatgttatgttttgccacattatacagctttaaattattaaatcaagctaattaacatatctatcacctatatccttatcattttttgtggtgagaacattttagcaatatctaactgaaattatgtaccctttgacgaacatctatctgttctacctaccctccccgctgcagaccttagttatcaccattctactctagtctgcttcgatttcagctttttccattccacatatagtggagatcatggagtgtttttctttctgtgcctggcctatttcacttagcataatgtcctccaggttcatgttagtctggaaccgtttcacagtttttctttgtcgttcacaccattgaagaaatatttcttgacaaaatacaggctgattattattttggaatgtcccttaatttaagtttgatggatgtttcctcatgattttttttagacaaggtctcactttgttgcccaagctggagtgcagtggtgagctaatagctcactgcagccctgaactcctggcctaaagtgatttacccaccttggcctcctttgctctgggttacaggcatgagccaccgcacccagcctttcctcatgattagaatcagattatacattttggacagagatactaaaaaattgtatgatacggtgtttgttcctataaaattttgaatttaattatatgatgcagaaatagttttcaatcttccaaaccacttatatcttagtgtgagcaggcctagatctttactggtgagctggctcattatcttactgggttagaagaaagtatattttctaaagtcctctaataagcagctattcaatgctctaaaggtgaatgtcagaagaaaaagttacttgtttctctgtcccctgtgacatttttaaggttggactcataggatgatacttacctagggaacacctttctccataataggggcaaagagcacattgtccacggtctgaagacttttctgaagattaaaaaaaagacacagccactttattctcgtctcatattttaactaaacattcttttctttccacaatccaatcatattacattacaaaacaactaagatcagagtatgtcttgataaccttgatatttattgtgtaactttctagaacattttgacatttgaaataaaatgaagaatttcaatttgccatttctggatttggatctcaagggcaccaacatgaagtagatcctatttttgcaaacttttacaaatcctttttctctactcatccttcaaggcccaattcagacatcgcttcctctgtgcgcccccatgccccatcagaatgaatttggatttttgtttttaatgctgtgatgaaattttgtacaagtattcattgtgttctgccttatttaattgtggcttctgaacatgcctgtttgattcactgcagatggtgaattcgtcataatttatactgacaatgttttaaattgagtgtgttctgtgtgtccaatactgtactatatgctgagaataaaaagttaaatgcacaccccttttttcataggatttttcaaacagaaaatgttggcagagcttcgagtctaggcttgcaatgagcagtaactctgttgacaaccaagcgatgatgaaaattctattggctggctggcatttgtcttaggaaagaataatgaagaatgtaacctacgttgtttcaaaaataatgattccattttactccatgttcacttaacacttgaagtattcagtgtgtgggatactgttttctgcttgctgataggtatttttagtttgattgcaaatttcagagtcagggccaggtcttccttctatagtgtatctccattagatctgggagaataacatacatggtattgatacataaatgatgtaaactttattttattttgagaatcagtcttaattaactcaagctgtttgtagccctgcatctatttttgtaaagcttcactgagatataatttacatgccatcaaattcccctgttttaagtgtatagttcaatgattgttagtatatttacagaggcatgcaaccatcatcaggatcttattttggaacatttccatcatcccaaaagaaactttgagtcgtttacagttactccccattcctgtgcccagcctctggcaaccatttttctttcagtccctgtagatttgccttttctgaagcttaacaaaagtggaatgctacaatacgtggtcttgtatgactggcatctttctcttagtatactgtttttgagattcacccacaatgtagcatgtatcagtactttgaactttttaccttttattatttttataacattttcaagtataatgtaggactggagcctttactgacaaagaataaatcttttgaaactacatcagttgtggcatagtctaaattttgcactagttgttcttaagggtgaaaaagcaaagtaaatgcaggtgattcaattgttcattcattattcctattattagggaaatttgttttaaaattaatctctgacatgctattctgggataaagaaagtatactgtagctgttaaatgtcaaaattattccacttaaacaaccactcaacttttcacatcaagtcgatcattgtgaattacagtgaaataattatcttaacacattaaggggaaacatatctactttatctaatgattaaattaaaaaatacattaaatgagttgctatgtgaaattcaagcaaaacataaatgatatttataaaaacaaaatatcgaagagcatttttttctagagatataaggaaacatattgactataataaatatacaatgtgacattaaattaagcacatctttggaaaaacagataaatcattgaagtgatcttagaatttgtgttgaaacacattattagtcacccagaaattcaaaaacaataaaataattttccacttagaaaagcatagcgtggaagtgggaaaagtgatttctagaatagtaacttgagggcctaaatttcaatactaaccttttccctttgtaattatgtacagtaagaaaagcacccctcagttttccactgtgcaaaatgaatggaaataccttcccaagcaatcttattgtttataaagacaccatgcaatagacctcatcattattatgtagccaattgtctaattaaaggtacaccaaaactgaaatatttttgcatttttttatgccatgatattcaagccacatcagactatattagattcattaaggttggttttgaatcaaatgttcatttataaaaaagagcagacattccactgttggcttagcaaatagaagacttcaatgatgataacagtggtctgaagtatatttcaaatttttcacttttctttcaatctccagccttacgaatactattctgttcacttttgtatatgtgcatttttcttttggtgtggatcctgagctctttttgaatagtatctcattctctcaaagcacaagaagactttatgatttgcctttggtcttcttgggaaatatcagtcagaataaaacccttgatcgttatcccagagttcttatgtgaaagacactatgctaggactccagtctttaatcagcactgttccatccactggaaatactatgcaagaaagggcttggaatagtaaaaacgtgtctgggaattttggaccctacaacccattacttgaaaacttaaatggaacaaatcttgaatttaggctgaaatcagactatatattgtttctcaatatgcagaagaggatttcatggactaaacatccagcaaagattgtttagtaattttctgagtgtataaattcccttgtctgacatgattaagtttctggactcatcaaagaggacagatgacaaaccacgaagaatcactgcatgtcagtcactatagccctacagtttcccagactccagcgtaagctgctaaatggcataagggcagcaaaacagagacataccattttggacataaatatggtatttgcatgcattgagaataccacttatcagtcttatgactgtgggcaagttatggaacctctctgagtctcagtttccttatctctaaaacaggaacagtcatatctacaagcaggattgctgtgaggcttaaatgatataatctataggaaagtggttagcacagtgcatgggccactgtacgcaggaaactgtgtgtgaccaagccagagagatgctgttcaacaaaactgcaaatggccagcattcaggtcatatgagaaagtggcaagagataagagtagaaagtagtcaggagctacattgcaaaagacttctaagtctttaagctttatcttaaaaactaaagattattgcaagctaggattggggttgtgggaggggtaacaggtgacatgctttagattctcctttaaaatcaattcccctagctgcaacgtggtggatgaatggaaagatcagagtaagatgagaggtatagaaacctcttgggttagccaagttttctcttaaaaatgaaatgattagtttaattaaaatagtaacagcatagaatagttggccctttgtgactagaggctgtggcaaagctacagagagataagcaagctgtaacgaaaagtccaagtatgtaatttctacttgaacagatctggatttgaatcctcactcttcaaattaccattgtgccacttcagacaaatagattttttttcatctattaaaaaaatgtggctacattaggacaaatacctaatgcatgcccggcttaacacgtagatgacaggttgataggtgcagcaaaccaccatggcacatgtatacctatgtaacctgcacgttctgcacatgtatcccagaacatgaagtaaaataaaaattttttttaaaatgtggccagtcatagctgctgtaggactattgtgatgtttaaataagatgatgcatataaacacccaacacagaatctgacacactgagtttacaattggtatgtgaggtaccttggcatccacagaaaggggtttggtaggtggctggaatgcaggtctggaaggcacaagagagattaagcaccatctgcacacgggcaatagctgaagctgtagacactgatggcttcacctggaagaatatgtatggttagaagagggctgagaatagaaccaaagttatggccaattgtaaaagacagatgaggagatcatcccttgaagatgactgaaaagaactgtccagggatagaggagacatgtgggaaaaggctgtatgacatggaggtttctggtataccatcaataggtttggctgtggagttgggtggaagcagagagcttgtgctgttgtgatagtattatgtccaaagacccaaaaatgtcagatatcactgctcctgttgacagtctggagtgacagtgataaagtttgttgtgtattatggtactggtagtgcatggtcaccaaaactcaaagtagaggccaggaaaattgagctgcattggccacatggagcacgccgttcttcctagcctaattaggcctaaaacattttagatcaaggacaaagtcaatacacctgccaggaccaggagaaaaccaacagaagaagacagaagttttgagaatccagggctcaaggtaacagccagtgatgctagaaaagttgacacagactagctagagcaacttcagcctttactaagacagtggttctcaaacttcggctagtatcagaatcccctggagggcttgctgtccccaccccccagagtttacgatccagttggtctggggtgggctgcagaatttgcatttctaagaagttccaggatatgctaatgctgctggttcagaaaccaccatttgagaatcactgacctaagaattttggactcttttataatctttgtggaaccacaaaaggctgttctttttaacttgctcatcctagaaattgacatatttcatctagtaaaaggctgctgtagctaagtttgtggtatcttttgcattaatgtgctgaggcaattattccacctttgtgaaataaaacatgcaactccaaaatttagacccacaaagagggtgtccaggttgaggaagccaccaggactgccttgatgagagtctcttgccctttggaaatctctcagttcaattattgggcctgcttccatcagcttggtccctgagactgtcttgttcctgcttcaatgttctaatcagagccaatttttttccactgcaccagatcagaatccattcccttttcactagtaaaacactgtcactttttcaagcacatttttgtaaaagcatattctgcttggtgatcgattgtgaacaaaagtctccccttagtgcccttttgtagagctgtaatgggctagaactatcaaaagcttttatgaaatgccaagggaaaaaattagaaacaaattcagttaacaatatgttttaaaagagaagagctttgagtttctattcctactgaaacacacttaattcaagagcccaagaggccctggtcttgtcctgtgcccacctggggatttgcatttccatgtgtccagcctgcctcttctggccggcagctttcctcgttggtaaagaccctaaaaaggacactccccttcagcagatttcttctctctgttcttggtgtgtaatctgagaaatgcactgttatgtatccgtgccttaagctccagcatatatatccaacagagcagatgactaggtttttcaaagtatgtttcatggaacacttgtaacaaatgttacaagatacacacagggttctatgatcagaaatgtttaggaaatgctgttatacaaagtcattcaaagttgtgtgtgtgtgaatctccaagagaggagcattaatgtgtcatttcccaaactcatttgattataaagtttatttttattgttttctctttagatcatctcttgggactgtattatgggaccacttagggaacaccatctgaatattaacccagtagccatggtgttcatttattaagaattacaccattacagtagtggtaggggaggaggagccatgctaattaacactcccaggactgaggaagtaaaagtttctaaaatggttagagttttgcatgatctagtgactcaaggctttatattatttggcagaaatgctgaggagggacagtcaatccccaggcctaagacaagttcctttactccctttcctccacagcacctttttaaccctagaacactaggcccaggtgggaaaataaaggccccacctacaataggagaaatgatacagtcaaagcaggagtgggtcacggcctcaacggctaccacctaccatgtgacaagtcacttcatccccttgggattcagttttctcataatcagataaaatacatgtggaatgcatagctcagaagttcctgctgtaatatcctaggatcctaagaaaacataaaacaggtctcagcctccataagtgttccatatgtgttagcgtctggagggagggctgctttaaagttgggtgctccggaagtcccaggagcttgccctgctcacatctctggagttgaactgatttgaagtccttttcaaaagcaatgagtccgaagattccagacctcaacaatccaagaaagcatggtcaaaaagtttttgtgcacctctttggtttccgccaaaatgtattagatgtgctttcagcacttcagtggtaagatcgagactcatgcttctttacatttttaaaggaaactttcctcaatttgagtagttacttcaaagggcagcaaatgtctcaatcctttttatcatctcttttggggcagagatgattggcactgatgatggttacttgtaattccataacctcaactgaggtaagtttaataaacagctctatctctgttctcttgtgacgaagatataaaagaacaaactggatcgattttagacagacagatatctcccagaaactttcaagcctaagataatccacttattgaaatatgtaacattttatcttttttttttttaaatgcacatggattttggtgcagagagtcctccatcttttttctgagagagcaagtgttgttatgtatatgaagagtgtcagggctttcaggcctctgatggtatcaagaggttcctgacacacaaaatgtcacttaggctccatccaaacaaatgagaagggctctgtcctgtgaagagctaaagggaggaatatatcagacagacagaagaacatgtgcagcgtccttgaattgaggcaggcaaaaacttggagtgctcaaggaataataaggatgctattttggtttatgtcaaggaagcaggagggttgataagtagtggggaaggaccaccttttggtagaggtttggattttgttctaaatacagtacaaagccactgaaggttttaaacaaggaagaaacattatctgatttgcagcctgtaaaacatcactctttggtggctgtgtcaagaaaatattaaagtgggccaaagctaatgagaaagccagaagggagtccagttaggagatgatgatggattggactgcgagatggcagcggagagaaggaagtagttggattaaacatatattttggaggaagaaccaatgaacttgctaatggattggatttaggtagtgaagggaagaaaagagttgtcttgaaggttatttgcttaagctcccaggtggatggtggtgccaagatgggactactgtgagaggaacaggttttagaaagaattaagttggagatgccctggttgggcaaatggagatgtcaagttgatggttggatataggatcctggtttcagaggtgacatctgcgatggagatatccacatggatgttgcatataattagtatttaaagctgtgagacaggatgagatcagctagagcagggcttggcaaactttttctccaaaataccaggtggtaaatattttcagcaggctataaggtctctcttgcaactactcaactctgccatggtagcacaaaagcagccacaggcaatatgtaacaaataaaagctgtattccagtaaactttatttacgaaacaggtggtgggtcatgtttggcccacaggctgaagattgctgacctctgacctagagtatagactgagaagtagcccaagacaagacctaagagatatatattataatatatatatataatatatattattataattattatgtatatataattatgtcacttactaggccagtcatcattctaagtgctttacttatataaactcacttaatcttcacaataaccaatgaagtgactaccgttatctgttttacaaataagaaaactgtgacctaaataagtttatttctgtctcgagaaaaaaagaagtccagaagttggcagtccagtgctagtatggcaattctgtgtatttcagcaacctagaattttccagatcattcttccgtaatccctagagtatagtcctcactctcatggaccaaaatgatggctggggctccagtcattgcagggagcagaaagtcaaaacaaagtagaggcaaatggaatgcaccagttgtcttttaatgtgtcttttaagtttcctagaaattgccttgcaacacttcttctattacatctcgttggccagaagttagtcacacagacacatattgacaaaggggaaactgggacgtatagtttttttctcaggggccatgagcccaactaaaatttagcggttcaattactaaaacagaaagtgagaacaatcattagagtggaagttaaaaggctctgaccagttgctttaaagcttatcaattatctttctttatgtgtatttttgcaagtacagttagttgatagcacccttcctaagacatttctgctcagccatttcatatcttaggcctccactgatgatgtcctacatactcttccagctcactggtcacctcttctgtgaagccatccctggcactctaggcagattactcctgtgtccccatgccaagtttattacacttctccttgtatttcgttctttcctagcgtgcctccttttgtgctgcctcctctgcttgactggttaactcaaaggcaggtgaagcctggttgaagtgtggagggtaaattgctaagaactaagggaaatatgtagtgaagctgcaaatgaagaaaaaggagttagtacacaggatttcctgctccttggtgaagggactggggtcagacacctagtagaacaagtggttctcaaatgttgctacttatgtaaataacctcaggaacttcttttaaaaatcttgatgctaaagtttcacccataattattaaagcggactttctataagtcacacctaggcgcatatatatatatatatatattattgattgaaacacttctaatcggaattattaaagtcctcctgagtttatttaaggcagttggatgcactataagtgaaataactcttaagctgctctttaaataattagagcaggcaatcaagaaaataagacaacaacgtcactgaagcttaccccatttgtgacacataatatgtttagattgctttactgactttacaaagaagcatgcaagactgaatcacaggtgacagatgtgattgcttctatcaggatgtgaggggccatatttcaaattcaatgtaagtgttgagctccattttcaactaatagtaatgaaagttttgtgcattcgttacaagtaaagagtattcccacttggtatgaggagtgtttcagaatgttttgttctcttttctccaaacaataaacattcgtgaggaagtgagctctcttaaatatgttttgaaactttttttaatttaaagatttctgagggaattcaggattttttaaattcaataaaaatactgttgacctttctgacgtttagtaaaaagagagagaaagtttttcagcagctattctttcctttttcactgcagtatttatatccagttccaggggagaataactctccaatttttcaagcatatttagagatttctgaaaattatttttaagtattcctttggaataaaagttgagtctctgattttcgttgatattgttactgatgaaaagcaagaaattgcttggatttctgcctttaatgagaaagagagggagccaggaaatgcactgggcaaaactgcaaaatcgaatggattcaacacgcagctcttaaccagaaaaagagactttggaacatgtgcatttgccaaaaaagaaaactgctttattgaaaggttaattttcagattaggcttgggaaatttgagataaataaatgacatcagacaaaaaaacataaggcctggatcctttttcctggggttttcagaaaatagttattgcttccaatgaaatgttttgacatttccagtagggagaaaatgttaattgtaatattgtgtatgtgttcttagtaacactgaataaatctttcatttgttttaatggtaatcagaaagtaaaaacacgattaaaatgttagctgtgttctttattccttatggtaacttttcatgctttctaggatattgtgattcattttccaggttcaaatatataccaactgacgaacatgcttttgcttgttttatatcagttgcagtttttaaaggagtcttattactatcctccacataggtctgcctgggtctcttttctaattttgtcacatctttagctcattctacaattccccaccttttcccttgagtctatggctcctttactacatttataaaaagtcagcaattaaagacagcacaatggtggtccacttgactgtatatttaatatacatgctattaagctacttattgacagagacggtgattttttttttctgaacagccatctctgtagccaccaactccttgctttgtacttaacagacaccccataatttgttgaatgactgtaataccctccttacttctgccatatgtccctgtcccagaattccacgttgcaattgatgactggagctacatgtccaaagcaaaggtctcactgttgaaaattacagtattacattgttgatggtcctttagagacaaataccaacaaggtcacatgctcatggaccagcaggaagccaaatgtaaacgtaaccacctgaggccgagccctgaaaacaagctgcctaagaaacggaaggaatccctagtgtagaagagcagcatccgcccttcctgatgtcatgatctacaactatgcatatatgtgacatgcacacactggccaccatccacagggagaaaataccattagtaatcatcctagcaagcattcacaatctaatttggtatttgttaactccttagttaaaagatatgatgattcttacagaaaatgctgttccctttttgatcactatctttaagtaagtacatgaataccacttaaatcacattaaatcttgaaaataatctcaaaagcagatttgaatgggaataaagtggtaagtgtttacagttttccacgcactactgatcagagtactgttaagcaccaacagaaaaggaaagctgctatataataggggtattcctcatataggggcattggcatacagtctctcatgcctttataaagaaaacataaattacagaattgaacagttaatgtaagctttaggtctcatgtagattagtgcttatgaagtagaaaataatcatgcgcaaggaacagaataaaactcacttgcagacatcagcagcattttcaaccgtgtacttccttggcatgttttaaaaaccagcgggacctatgtgtcatgggaagatggttggatcctagtatgaaaacccagtcagtaacattcaacaacagattcaaccaccaatatttgcacagctagattaatgttttggagtcagtcagtcatcaggctcattactactggattttctctggttcatgctaataaactagattattgattttaggattttctttgtatccaaggatattctctaagatgtctttataatgtttcatgcttaagctgtcaaccaaaatgacataacaatgagtaatcgttttataatcatgttgaaaggggttaaaaacagcatataaaatgcatcttagcagcttcagagtaacattctcgctgtcacttccctatctgggtggaggtcattcctacctgcctgccatcttccccaggaattaactagctgcatgcacagcttaagacctttgatagtcataaatctgctttccaatatgtttggatggcagaagagctcaaaagacacctcggtctaaataggattttagcacatcaggtgctattacaaagtaaagcaggctgggttgctgtgttggtggtggtgtttattcatcttcccttcgcgtttcatgtgtatgtatgtatgcttctctgcgtatatgcccagctctcagggtgtatggggctggagaatgcatgcgtagactgtgtgtatatgtaaactagaaactgaaccagggaaacaaaatgaactactgtatgcaagaaatatatgaagtgcacccagctgccggcagcaattgctacatgcagtccactgattattacgcgtattttgaagatagtccgggttacagcggttgcgatgctcaggctgtgcccagtaacaacatatatatggaacaggcctgggcagtgaatcagccttatacctgtagttaccctggaaacatgtttaaaagcaaggactctgacttggacatggccctgaatcaatacagccaacctgaatatttcactgaagaaaagcctactttttctcaagtgcagtcgccatcgtattctcaaaaaaaaggtagggaccattttgcttaaatttgttcaaagtttcactgtttgttttcgtttcattttaaagttacagtttacatcagcttcgtcaaatctttgaatttgaacgctaaatatttgaaattaaaaacggcagtaagaggggttgctaggtgattgaaggactctgtgaacatcaagatttccaagcactttttttcttcatctttgaaagctggagtgagttgcctttctgtattttgcatgtgtgtgtatatattgcccaaagtgactattgttggcttctttgcgaaagaaaatatgtgaaaggtttccttctggcgggtaggtgttgtggtgtttgaagtgagataattctctctagttcaggttcagattaaaaactcatttgacttttccttggcacttcattttgaaagtttattttagttgactagttaactagtaaaatatttagtgatttagtgatttctttaacagtactatactaatgttgatttgctaggatctgtaaatgttcattttaatgtatttatttatccatgtaaacagtaaagaatctatttgtaaccatgtcaaactgtaagatgtaaaactcaaaaactgagaaactttactttgctattttgtccctaaagttgaacatgtctgtaatcatatcaagtgaattctctttatgaaagcaagtgaaacacacttcaaaatagccaatattaaaaccagtacgatatccatttatcttaatagacactgtggctttataatgctatttaaatttctgtcaatagaacatttcttgtattactgaaaaataagatactgaaaaataaaataagggaggcaaacaggtagaacattaagtagcaactgccagataggaatgcttttgaagatagtgtaaatgctagtgcagatatgccagaatctcatgcttttgtatataatctataggatattgcatagagaaccaaatttacgagtttctataatttacaaaaacatgatgccctttgatcctcaaaggtaaatttctctgttaaattaatcttaaaacataatgtggtttatttagttgtggtttctataaaatttatcatttgcttttcttaatgtgactttataattgaaagtagtctgttatgaaaacaaatgaacaaaattttataaaaacaaaaactagaatctgtaatttttactatatataatgttattctataacttccaatcatgaaatattaaggggattacagcatgaaatatatttagagtttctcatcttgatttttatttataaatatagagttttgcatccttttgaaggtcatcagaatctcatttattacaagggatacacagggtaagtcccctaatggaaacatttgaggtacattgaacatgtgctatttcatttaatagtataagtaatttaactttgaaaagaagaaattaacattgcctcattaaacatacttggatatgccttttgtagtgttgtaagaaaatattggtacctgtcaatctatgtgctcattctgctgttcttaaaaattcctgcagaacgtttcaggctcttttctcttttatcttttcactgtattttcttcaaccaacactggggaatatttgcttataaaatgttaaaccaggggttctttattaattaatttgatgcatgaactaaaggaaaagacacattgtatgcatatattgatgtaatttcaaagccatatgtcattgaaaggccaccgccacctgccaaactcactaaatcaaaacaggcaaatattcttaaatgcaccattatttacttttacaagtcttcgagtaaatcccagtaaaactaaacccagctgttaactgtctcttaggacaaaaggttgtacccaacatgtttatccatattgatccactattgatttttgttgtgttgaatgacatcagtagtgtctcgttaaggcaaaattaagaccataaacaggtgttcagtggggtaggcctcattttccaattggatttttatctattcacaatagataaaagttcataattgcttcatctgtgttcatggctgtcattacagctttataaactccaatactgcagctgtgttaactttttctttatttttttaaggatggcttatttcctagcctttattttctaatatacagagaatcttgtaaaaaaaaattacaatcttataaaaaaattataggtacaaactggtgaaataaaggaaggctacactacccaatgttaagaatggttatcttaattggtagactttagaataacttttagtttcccttggattgtttttctacaaagtttttttttttcttttgcattcatagccgacagaataagttatcaagttctggaagcattaagaacacgaactaaggaagagtcagatgtcagttcattgaatcacatttaaaataaagcttcaagaattgaggaggggaaaaccgatgtaattttcacattgaggaggcctaaaatgcagaatgtaatgtctgtcttatttttcatatggattatgaaaaaacaaatttttaattttcaaaagttagggacaaatgaaaagaaccctatcattcactcagaagatatgatatttactgtaattctagtgacatagctgtgaaatgctatgctaagtcctcacggggccagtgctggctgcacacttctggcccctgcaaattcaggagaagaaggcagtaagtttggaatcagatggaggagaattggcagacaggttatttgttgtgctttctgctctgtggctgaggttgcagcaaagtaaaaagttgacttttttttctcttttctttctttaaaaaaaaaaaaaaatccttttgtgggtggaagtgctagctgtttccatcacaaatactaatcacattccgaagttcccgaacagcctgcatctgcatctggctgctctgaaggcagctttgcaggtcaacctctcgatttagtctggaccagccgggtctgttgaaacagaaaccttcctaggagtctgccctgggcgactctcctccacgggattctttgcttgaccttctacatgccatcttacttgataggaattgcatgtttgaaaagttgtcagagatgcttatcatgtcccaagagaataagaatttgcctggttttaagccaggatcgaggagatgggggtggnnnnnnnnnnnnnnnnnnnngggtgggggagggttgtcctattcagttttggttctgattgtatatgttgttgctctacaaccacatttttaattgtgcaggaataaaaattaataactgaagcagaaactccacacaggactgtgctttctgaatctgctttcattgttcctctgacttggagatagaattctgtctgtgtgtgtgtgtgtgtgtgtgtgtgtgtgtgtgtgtgtgttctgtagctctgttgactccaggtgaacaattacataggcatttgaaatgaaaattaagtagcaaattggggaatgtttctttctcaagctttcctttcctttccttcttcctctccctctgtctctctctcctactttccctccatctctttcttcctctatcttctctttctctccctctctctcccatccttattcttcccctatacttgaattttttaatttaaacacagatgtgatcagtccacccagtgaactgttgagtactaaataaataatctcttttaaatgtaatagttaagtggttaatgcaatcatagatttttcaacaatgcgtatgtaacttaaggacgctgatggaaagttaggattttaaattaggtactgccacacacatgctgttcagagaaaacaccactccagaaaacaataccacaacttttaaaaatacagaacatattcactgtacaaaaggttaaatgaaagtgcctcttggcacccagaaatgaaagcaaagtaaggagcaataatcgtttccaaaccaagtccaagtgcagacaaaagcgtgagctctttccttttctttcctgagaattaactgtctcgtcaaagacatgtccttcagagatttcactgaatgccctaacctcatccagagcatgcactgcccttactcacaatgaaagctaacagtaggagtccaaagcattatgagcaaatggattcagacgcctggcaggcttacagaggaatggtgagactgctgactttctgcatatggagttcatatccaccacctcacatgcctccatggatactttttcatagtcaagcacaacacttttttctcagcactcaagtgcattcagcctgaagtcaagccgcttcccgccctaccacccactctggtccagcttttatgatcccatcatcttatgggtccttggcttcaccggtgcccacttggttatctgtattcttcctgtttccagagcattgggaatgctgaccttcccgtgcgctgtccttggtacttccctctcatcagctccctcggtaccagctgttgtagagaatttcctcagctctcttggagactcccagaatgtgcttttgagcagtcaccccacacacctgctttccttatccgcagatacctcccgccatgttttcctgcctttcttccctccaggttcaccctctcttgcttaaagccttctgcttccagccactcaggggcagttcttccccatcctctgcaccaccacagggctccgtctcaaggtttggggcccttttccattaccacaaattccaccaactcttccctgccctcaagagttcaattttgattctggctttgtgcttttacccacaccctctgttccagaaaccttggccagtctccccatgggttcctctctctgtcaccctagtctccatccctgaaccagtatgctttcttccagctgtcacccactgccagccacaccctggtgggccaccttgccactgtcagcctgcatcactttatgtcaccaactcagctcacagcccaccagcctcttctattacccagcaacacattctctcatcacccccgctcccaaccagccctgccttcaaaggcagatatcctttgttttatacaatagctctgaatcatttgtgtaaaccacctttgaaaagtaatatattatatataaagtatattagactagggtttcttaaccttggcactattgacattggggccatataattctttgttgtgatggttgtcctgtgcattgtaggacgtttagcatcattcctggtccctcttcccactggacaccagtagcaaacacacacacacacacacacacacacacacacagcagttgtggcaaccaaaaatgtctccagacttcgccaaatgtcccctgggaggcaaaatcatccccactcgaggaccactgcattaatggtgaagaacttactacttggagaatatctgaagtaaaggatctttcataaaggatttcttataatgttaaaatccctcctccatttccaaatatcatatttaagtgttcatatattgacgtctgtcaaaatggagtacacctgaacctacataaccatatatacgtgcaacataacacatacatatgtgtcatagctcatttccattgttgggatttgggttcccctcatcatgtttgcttatttatatcaaatctatctagatcataagcactacgaaagcatcaatctcttttattttgcactccctaaagcgcacatccatgtgactgcaggatacacctgcagggagagcagtatagctcataacgacagtgacggtgttctgatgacaaatgcaacagctccttcccttttatgtatgtttatgtaacataaggctgaagggctgctagcccacatttttagagctataaccttgaatcccattctgaatggattttcaggtaaagaaatgacacttgtttttctcaaggattcaggatatgacataactgtgggtgcctctgcatgagcccaaagctataaattgcttctcacagcaaaatcagaggcaactatcacccttctctagtgactgtttctgctccctcccctaatcttctgatgactttgccttcctgctttctaattcatgccgtcttttaaaacaggaaatgatctcatcaataccagggttctacaactccaatgcccccaagtatgcgagagagagagagagagagagagagagagaggaagagctgtcttacaatggctgcttaatttaaatttttcaacaaagacacataatgcttacataatatatgataagaatacttctcacttccatgaagaaatatgttctcaggccgggagcagtggctcacgcctataatcccagcaccttgggaggccgaggcaggtagactacctgagatcaggatttcgagaccagcctggccaacatgacaaaaccccgtctctactaaaaataacaaataatagctgggcgtggtggcaggcacctgtaatcccagtgactcaggaggctgaggcaggagaatcacttgaacccaggaggtggaagctgcagcgagccgagatcgtgccattgcactccagcctggtcaacaagagtgaaactcgtcccccacccccccccaaaaaaaaaaaaagttatcatttttctcaaactacttttgtttttccactcttgataaagataaagaattatgtgaaatatttctttatttatgaaaaggcataatgcaagaacaaaaataaatagcaactgatgcacacaatcaggagaggttctgactgtggagcctaaaaaggatgtccgtttcttgggaggtagggctacctttctagttcagttgatcgttacactgtgagaatttgggttcagtattgccagttcctcctgtttttcacatgaagcaagaattctgtatgttttatgaaatttcctagttttaaaaatttgctacgatttttaaaaacactctgcaagccaaatgttgtagactgccagaatgtgtgcccttttgattaacattccaactcaaacgcattatatcaacgtattccctttcttagtggtttgcatcttcaagtgttttccctctaattgtagattgaaaggttatgtcagctattaaggatctgaatgtacagggacggcaaaaggaacatttcactaggtacttcttatacattaaactatactatgcccaaacctggccctaaaaattaaaaaataggctgagcactgtggctcatgcctgtagtcccaacactctgggaggccaagacgggaggctggtttgaaccaggagctcaagaccagcctgggaaacatagcaagaccccatctctacgaaacaacttcaaaattagccaggtgtggtgaccatgcacctgtagtcccagctactcaggaagctgagctgggaggactgcttgggcccaggagttcaaggctccagtgagccatggtcatgccactgcactccagtccgggtgacagaagtgagtccctgtctcaaaaaataaaagttaaaaaaaattgtaatttaaaaatatgtcttagtttcaggaattcttgaatcagaagaaatgatccaaaactcatgttgtccctttttctgcactaaagcctccgatgagaatccagggtcctttggcctcatatcctcatccccttttctagattgacacctctacttggtcctcctgctcgcccctcctccgcccaccagtgcttcagtgttcaaagcctggcgagccattgtctgctgtcccccaacaccagggcccagccagccagagggcaaagtgtaaagaaagagactccaagactccaagcaggggtaggcagggtgggaaaacagtggatgttctgaggaaagattgtgaattgtgtgaagtgggagcccctggggcagctctgctaataatttgcagagggcaatggatgaaggcctccaaagttaatgctgtttcaagtttgtaccaagtgtcttccacacagtacacccatacatgctgttaaataaacaaatggatgaatgcatggtttaatttaatatagtgtctatcacagggttaaagattaacatgatataaagcttggtacctaatgccaagaattaaatataaaaggaatcaggattcgtatgttggggaaaggctaaaggataaccctttcaaggtttttaagtttgtcaagaaatgacatagggaaggtgctggtggggaaaacaagcttaaatcatcaggtctgagctgcaggatgaactgaggaggttcagtataaaatcagaagagtgactaagcatgctagtgacttagcttcctgaagggtgacaaaatacagtctcatcctctatcccgtcccaagatcagatacctactggctctgagttgatagctctacaagatgaatcagcaacatggaacttcttcacttctctgagctacccaaagtatttcccactaccgcaaaccacagcccctcccttaagatgccaggactggttctgctaggcaagtggtcttatacagatgataagatttgccagtttggaaaagatctctgaactcagctcttctcacatgctgctacttctgctctcctaggcagcaccttatattttagatctactttcaagattaatctgctttatattctattccctaagggccatgtatctgccaaggtgacaagaggaaccagtgtttctcctcctaggacctgagatgctgttataattcactcaaaagaattaaactagccagccttctgatcttgcccatagggaagaaagcattgaatctgttttcaaccaagaaggcaagcttactacctgttgcatcctttgtagtgcaaatgtacaaaactttccccttctacatgacaagtcgctcagagaatattttttaaatagcattaactgtaagatattcaagataatacttagcaattaaccagacattgccaaatgtcaactgaaaaaatctcaagtcctttgttgaacagatggagtttgcttttataaaaatatgcttgataaagtggcagcataatgtattaatctgaaaaataatacatctgagcagacaagagctgagggaaatatatcatttttgaactatcatatattgtcatggaccttaattttttctggagggttattgaccaggcttctttagcagtcacctgggacaactagcagatgcagttcctgacatgaacagtcgtagcttccaggattgtgtctgtagtatttgtttctaggcagaatccaacgctgacattatgacactcatcagtgtccactcttggcaacaaaactaatgatacatgtgcattttccttagtttggcatactgaccattgtgtaactcatttggtgagtatgacaaaggaaaatgatggagacactaaaatacaacaggaaatacaacagcaagaaatggttaagttctctaggagaattggttagtatgtaatgttgtcaatcatgttcagtaaccttaagagaatcctcacctacctagtcactatgtgtgggacattattccctgatggaagttatttaatgaagaataatggacttaggcataatgattgatgtatcattgcctgtggtgactgttttggataaataagatggttcagagttaatatgttacagaaaagaaagcaaggggtggggtgcactagtatgatcatgtaagtagctgccaccaacttaagtagatgtttctgtagaagttttgatgatttaactaaagtcatttaatcacctccacccatgaagaagatagtctaggagaaataagagagtaaagcacaccacctctcagcctagcagtcagtaaatgaaaggagtccattccagtcactgattgaattattgttggattccacaagaaccttaaacaccatctacataaattgttgaactacaggtaggaataaatcttcagtgtctggctgccaatgccaaaagataaagccagcaggtctcatgagacaggctggggtagtatgaggtgagagggaactacctgcatcttcccaactctggttaatgttcttggacaccttgttttgacccctcccaagtcatgtcccacaagtacagcagtgttcaagtgtatcacaattggttctcatacctgagattagacagaaatgacttgtacctctttttcccttatctctgcattccatacttgatactaagaacttgaaagtcttcattctgttggattaattgtgtataacctcgaggtataagaggttcagatgtagcttttttgacagtatgggtctgtatattccatctgcctttaccaggaaggtgcctgttttcctaattgagttactttgtggtttaaaagttactttgtgttttataagtaggtctttatatgcacacaaaagcacatgagcacacctccttaccaacacttgtgactgtgtcatttttgttaaaaccatactagtgagtgtaaagtggtatctcattgtggttttgatttgcatttccctgcaatgatgttgagcatcttttcatgttcttcccttcattttcacctctctttttctcattgaagaatgaccaaggctacagaaacagaactcagcttatgagtttacaaaggaagaaaccatgtcttactcatttttgtattttcagcacctagaacaatgctaagcacatgtagatgctaaataaatgttttctgaattcatagataaatgactgaatgaacgcgcaaagcattctagttcccttttttctctgcccagatccttcccagaattccctttttaaaaatgactgacaagagttttgaaacccttgcagtgaactcaacagatgaatcatggtttgcatgatgcaaaagtaaactaagaaaagctgtgatatttaaaaatataatcctgtacattactaaacctcactttcaagtcaattatctgcctcccaagaaggaacatttttctaaattaaagttggagcaacataatttctaagaaattatgaaaaggatttatttcattctgtttccttaatggctttttttctgaaaagcaagacttcagtgacctagtttaataaaaggtctatgaaatgtcacggtaagatacacagtaaggcatcagtcatttcaacctagctaatctttattggaacaaagaagactttgctgaactgagtcaaaaaacttcataaggaccatgatagggagaaaggattgtttctcagcctcttccttcttcacatcccaaccaatcctgcctcattttgattgtttggtcttatgtgaagctgtgtgattctatatatcacataatttatcaatggtaaaccattgatagaggggagaatgaacctgccctcctgaatcagcatcttgtgtctgggcatcctctccacaggaagctgaaggagcaaagacaggagggaaacaggaggcttctgcttttgtgctttttagcttcctgagtcaaggaatttaaactaataaactcattgtccactaaaaaagagagttatcatagttggattttccttttttcttaataaacaaaacctctgtcatttcacactatccagtgttgttggattgcatatcataatatcacaagtttacctaacttttttaggtggcaaaattcattctacttaaagtcaactctccatttttagaaaaagaccagcatattacactggagggctagaaattaagagactggggttttagtcctgcctgtaatttccagtgagaccctgaggaaggccaaacctctgcaggcctgtttcttcaccttacaaggacttcgtcatctcccgggacctttccagctataaagttttctgaattcattgcatggtactgtgattccaaagtggatcaaatcttgtgaaaacaggttttgaaataagccttgttaaatagattgtgttatctagaactcacagtgctcaaatcctggcctctctgcttgagtcactggctctacagccttcctgccattcccacctgcacagcaagtgatcacagctatctttctttctttctttctttctttcttttttttttttggcagaatttcgctcttgtcgcccaggctggagtgcagtggcacaatctcagctcactgcaacctctgcctcctgggttcaagtgattatcttgcctcagcctcctgagtagctgggattacaggtgcctgtcaccatgcccggctaattatttgtatttttagtagagagagggttttgccatgttggccaggctggtcttgaactcctgaccccaggtgatccacctgcctgggcctcccaaagtgctgggattataggtgtgagctatttctaaggcattctgaaatcctgggcctatgttaactctatgagtataaaattcttaccgtttggtttcactaagtctttactgttgttacctcttcctggcaagccaattttgtctctggcctagcaaccttagctatagtgtctctttgacgttaacatattattttttaatattccttcttttatttccttcacagggtacatccccagttacttagacaaggacgagctctgtgtagtgtgtggtgacaaagccaccgggtatcactaccgctgtatcacgtgtgaaggctgcaaggtaattgccctgggtccacaagcacagagcttagcccagctccagtcccctcccagtcctcttccagaatgcaatgttaagtttaaattcaaattaaaatcaaattctaacatccatggtctgtgatcatccaggtgtctggttgtgctcttcatttttgacatgttcaagaactgaatttttttcccaaatcataaataactaaatgagtgtaatgtctggtttctttacttctgcaagtgtttttaaaacaggaagagaatcaataaaataaaaagaaattaataaaactcttactttgggtttaaaaagcataggtcctttttaacatgttgtcatcccgagaaatgactgtttctcttcttgttttatctacagtgttggaggagacagagtttactctaccacaggctgttttctgctgttagtctgagtgaatatgctcattttcaagggttccaatagggaatatctttgaggctacttagattcagttatgttctgaaattatccaagttggcttttcgcacagcctgcagtgactaagtagattctggtcatccatcggctaattttgtgctgtacagtcctatctgcaggaaatacttgacaagaatataccagtgatcagtccattcacttcctgaaactgaacctaaattggcctacttacaagacttcatcaacaaaattcagataaggtttctggaaaatatcttttggtccaacaatctagccttgaaaatgaaatctaccataaaggaaaaagcttgacccagtgctgtatttcgtgtctgttcagctaatgtttcataaataaagaagtatttaaagtcagggaaggacttttaaaattgtttacttgttaaataccttgtcttttttacctcttatatttaaaactaaattatcaagatgtaaaccctaaagcaaaaattgtattaaatgtataaaacatttcaccttccctcctctctcatccaccttacctctttttctcttcttccgcttctccaactgccccgctttgttcatacccttgctcgtaaagcccccaaatcaacatgttagctcagtttcaaattaaggtgttttccttttccctagtggaagattttccatgcaaattccctatgtttttgtacgtgacattaggaaacatttaggagaaggctgctaaaaatgttgagataatacatccattggaaaggggtaatttctaaggttgcaagacttgctttttggaatgtggtgtaacatgttcttatttatccagacccctttgatctggaattcgtagtcctttaacaaagactgggctaaaggttgccattacatctatgaaaataatgtcttagggaatttaatgaatctaattacaagtaagttctggctatttattaattagagacttgcagacagtctcttgaaagtagttttattggcttgatttgaaagtaataaaactacataactttaggtacctactctcattccaaaagttcgataattcaaactagacttttctctaaattagtcccaattcataaggctttccctaccttagttgcagcactgagattcttctaaatcggcacataatgggaaatttcgaattctgggagagagatcctgattccatttaatatggaattcaatttaatacttaattccccaaaatgactctaaagagtgaatgtgccttacagaggacaatacattattagtgactgacttaaacaaagagagaattgagcctattaacctatatccctgcctcacatatgtcttcaggatgatcaagaaatcaactagcctgttttccctagatcacaggatgtttggagcctggatcagctgaggttttcttaaaagaagaaatcgtgtagcaaaatctagattttttttcagattctgtgcctttgtctcaggtcagaatcctgtttctagggttgccttcattgtaaaatcagagaagagccttcccagggtacttgtgcggatcacttaatataatgacaaagcatcttggaaaaagacaaacgagtttttcaagtgaaacacggtttttaagagtggtgaaagatgaaagggttaattgtttcctatatcgtttattcaaacctgtaatttaaaaatatttctaccccatacttgcaatgtgtatggagagaatcctttttgccagttttcaccctgagaagagtgaaatcttttggagatgtcatgtctgttgtgatatccaagtttttacacatcttttgtagaaaggatattgatactgtcccacagcaaactatttttagagaaagaatcaaagcttttcaacagctgcctgaatagtgaactagaagagtgagttatctccttttcacattgatcagtgaatcatctcaaagtactaaaaaatggatacagttcttctcagaatacaaagaaacatgtctgatattgatttataaaagcaagacctcttcttaccaacaaatcatcaatgaaatatatgtccttatttattgcccagggcatctcttttgtcagctcatctctaaaaggatttttttaaaataagtagactgttttaaatgtcttcaagtccacttccaagagttaatttctgttactttttaaaatgaagtggttccttatcatacatcaaaatatgctttaattatagcttatgaaaggccaacattttaagaagaaaatcaagaaaaaacaaaaaaaagaaaggccaacatctttaaaaggatttggtccatgaagtgcccaagacaagtcatcagagataggccacagaaaagatggcatagtgtatagtagagctagctatctcaactcttttgtggaaataagcaaagtataaattatttcattcatcccaataaaaagtgaacagagtgactttttggagtgtctggtgtgtcacacctcattctctgcttagcgtggtcttactggtcaatgtactccttgccctaaacccacccctgaacatgagtcagcatcagagtatgagggagacaagggtctccccaacttcagatagactaacaatcttcctatcctagtaagccgtcagcattcttactggatgtcttggactttggtatttctacctctaggaaattattgtttcctccagaaggaggcgtgctaccctacccctcccctccctgtctgtgacatacatcttcttgccaggaatctctgggtttctttagttctcctttgccctccttggtcagagggtagcagagagaaaagctaggtttgcagggaaacttgtttttcactctcatggcatgctctgacattcatgctttggcaagatttgcccaccctgcacacccaggaaatcattgccaacatctccaacaactgccctgcgtgtgaatgagtgaatcttgtaacagtgtatgaacatcactgaaattaatggactcaagtgcttaggaacacagaacccaaatataatattgacagttttctgttagaacttgaacaatggaaatgataagggatttgcatatatgccccaaaatcaagtctgttagtctcagttattcctgatgtttttctattttattctgctttgcccaatataaaatcctacctcgggcattttcataataagaaagagcttttgtgtctgaaggaggaatatgcaatagggtatacgtatataatcaaagccaaagaacattaaccgggatcataaaaatttgggctgaatctagatcaactgatatttcccaccatttatctagcaaagttagaggacccctttaggccttagcagaagacatccatcaaaacttgttttgccaccaggaacagtggctcatgcctgtaatcccagcactttgggaggcggaggcagacggatcacttgaggccaggtgttggagaccagcctggccaatatggcaaaaacgcatctctactaaaaatacaaaaattagccaggcgtggtggctcacgcctataatcccagcactttgggaggccaaggaggacggatcactgaaggccaggagttcgagaccagcctggccaacatggcaaaaccccgtctctactaaaaatacaaaaattagccaggtgtggtagcacacgcctgtaatcccagctactctggatgctaagatatgagaatcacttgcaccctggaggtggaggttgtagtgagccaagatcgcaccactgcaccccagcctaggtgacagagcgagactctgtctcaaaaaaaattttttttaatttcttacattttaaaacactcattttgccttgttatcctaccaacagttaaaatgaactttttaagtggctggggcaggactgtttataatctgttgatctaaaacattcaagtaatacagtaaaatttacttcattatacatcatataagcagttaagcaagtaagatgtggagtgccgctcctgggttgcaagggaggtgggggtcattgctgggtggtttccatcctacctgaagttcccacatgtacttaccatgtgatttgggcaagcgatttaacctgtctgaggtttacttttttaatccctaccatggaaatatttagagcacctcctttacatgattgtagggaagatagaaggatattgaatgtttctacagcacttagcaatgtgccctcacaataagtgctcactgctgttattaacttctacaatacagatgacagttgcctcaacttgaggatcacgtccagaaaaattctagtattgcacattcttgagaatattacctaagtcacccaaacctagaactaaacagtgtccccagatgctacagaggtgctctctcatgccttaagaaaggaagaatcattgaacctgtaggtgtatgtctacagataccaaagaaagagtgttataaaaggaaaacctcaatgcaatgagctatggggaaaaacttggtagaaaacctggagcgttctactccctgagtcctattgtttgaaaggctaagtgagctgatcatggctgtctcaagattcaaaaacaagtattaaactaaatccaggaagccagctagtacatctgtttaattactaaattattagatttttaattaataaagtattgcaagtatccatgtcttttcatttttttcactttcttcttggtcttggagctctcttatcactcagtataaagtagcaaaactcctcatagcttaatttagcaacacaattatgtcagtatatgaaatagaacagtataatttacttatatattcaatatttagaaaaaataaaaacaagcgctagatgttcctactagcctcttttccttgaataaagaccaaaaaaaaaggtgttgactctgtagtcctatggcatcatcagctcagatttagaactctctagatccttctgggccaactgtcttatatttgaatatgtggagctagaggcctagaaacaggttaaggtccaaaacgattcatctcatagttatatggacacaaaattccagaatcactgatttcaagaaaatatgaaactgttgtcttgggtctttgtttttcatatagggtttctttagaagaaccattcagaaaaatctccatccatcctattcctgtaaatatgaaggaaaatgtgtcatagacaaagtcacgcgaaatcagtgccaggaatgtcgctttaagaaatgcatctatgttggcatggcaacagattgtaagtagatcttcacttgcttcatattcaaggaatgttgattaggaaacagtttggttcaaggagatcgactgggcagaaaagaaggcaggaacccaagaagacagagaagggaataccttactttcgcatacacccctcactccccacatccaggcttgccctgaaagggaggtgggagccattgctgggtgggttccatcctaccctgtcataccacctcctaactgtcaaagtatggatgatggaggaggaaatgcagttaaattatccctatcacatttgcaggcctagttgttagcaacactctgtttgagacagagattacaaatgagaggtctggtccatttaccttgataaggtatcattctatacacagtgttcacatggggtagagcctcagggactagtcctaatattttttcaagagcaaagacaggaatttattttatggacatttttggagatggggcgctggcagaaaacatcgtgttcagaaatttctgaagaatgcaaagttgagtgctattgcatgagtcatcctgcagttggttgtttgttatatttttagcaataaagacattccgagctgaagtcgtcctacccagttttcaaagtgctacagcatatggtggcgagattagcccttggggtctcttctccccacactgtgcgagggatttacaccagtcactttaattaatctaatcataaaaataagaatcatgtcattcagaatgtgtggcctcccttttgccaggcatcagtattaatgattctactggcataaattttttgcacatcagtgagagattccaactattagttaaaaattaaaaagaaaaagaaagataaaaaatgaagaaagaaaaaagaaaatacagtgaggatttttcctgatgaaagaagtaatcatgactcacattttatgtgagaaatagagttctttcactgagaaaaaaaaatctgtgaaatgttctggtttgcccattaaagaagaaggaatggagaatctttaaaaaggaagagggttatgttagagtgttaggctggaaatcctgggttaatccccacctctggccgagtattttctttatctttatctcttaaaggcctttagcccttgccaacaatatgcctgatagggatatgtgaatatgattgacttacagccaaatacttagatatgccactatgacaaacttattattgattatctatttcagtgttctattgagaagtttaagatactagtgtctatgaggtttaaaaactcagtgttaatctagactgtatggaaataaattttgagtgccctttacttgcttgtgagggattctaagagctcaggctttctaatcagaaaaacttctgttcgagtcccagatctgtcacttactagctgtgtgacctttggaattaagctgagattttccttctgtgaaatcattgcctaccttgtagagttgttttcaagattaaattagataatgttcatcaaatacaacagtccctggcacaccggaagcatttgggaaggggttgagggtattattaccattcctcctttccctttagtaactgaaccaaaatgacttaacagggctcattcatattttcctcatttgtaagcgctcacatgactttgacaatccaatcaaatctaaatggtctggaatttaatattctctttaaattagaatatttaaatgggagactagctaggcaccttggttctccttctcttgctatgtctgctttttttcttttcctaccaggtcacaccttcatcaagaaatggccctaggacagtgatgtcgtagaactggagtcaggagtcctgggtcttgccttggctctgccattaacttgctctgtgactttaggcaagtcacgacctctctggatcaatttcttcttctttctgtgaaaagacagagtaggactagatgacgtctaagttcccttccagttctaaaatactatgactctgcaatgtaaaacctgagcctttccattccattgatagttaccaagtctagtgaaacggttttggttttggaaattgaccacagaaatataggtttcttgttacctgcccttctgattttcctttcacccaaatgatagaagtcaggactgcatttactgagcacttataatgcattatcacattgaatactctgtgaagtgggtattattgagcccattttgtataggaagaaatgaaagctcagagaacctaaggaacttgccagaggtcacacagctagaatgtaataatatcagaattcaaacccaagtctttctagattccaaagcctggactctttaaccacccttgagggtggaccaggtagagaataatgtacagtgagtaccttgaggcccaggtgaggcccagccacattccaattagcccttaagggagccatgaagagttggggtcctttttcctcttaaaaaaagggatcacgagcctcccacttactgctccataacgtttctttttttaattccataacgtttctttaacctgaagttctctttactaagagccgttttaggggaagcggggaggacagaaacccagagagtgaattcggatgactggctggacagatttctctgtgatcttgtgggtagtatggattttacctctctgcttcactctgttttagaaccaccttctgtggagttggagtgcgcagtgtctaggttctctggggactttgttttgaaaagctggccggtcatggggagtttggctctagagaccatgttggacaagactagtcaatggcagtttgctggtgaggagagaaactgtcccagtgtgacccaccccgaaggacccagtaagccatctgtgcatcagtggtcccactcctgaggctccaggaagtgcagcttgctgtgtatcttgggagcatctgtgtgccttgtctcatctttctccccctcccagtggtgctggatgacagcaagaggctggccaagaggaagctgatagaggagaaccgggagaaaagacggcgggaagagctgcagaagtccatcgggcacaagccagagcccacagacgaggaatgggagctcatcaaaactgtcaccgaagcccatgtggcgaccaacgcccaaggcagccactggaagcaaaaacggaaattcctggtaaggcttccttgcacagatcagtttcacttatatgccagtgttttctacctcaatttattcagtcctcatcaccttgggatactggtgttattgcctcattttactgatagggaaaccgtagctctgagaggctgagtaacttgcaaagctaggatttgagtctaggtctgtgtgagaataaaggccactcctaccatctactttgtgatttgctgaattctaaaacagtttcttaggccacattatatcagtttgcttttactgttagaaagaccactcccagaccaactaattagtaaaatgttttgtctgccatcttttactttctatacccatttctttccttagatgcccagtatatacatatttagtccctgaactcaatcccaaatattccctttataatagcctctaggcctcaagtatatttttatgtcaacagaagtcaaaattttttagcttaaattaaatgagcttgactcaagaagggcaatgggaatgagggagtagggatagggttggtgggcacgagtgtgtagagaaaaaagaccttccagacccttgcaatattgatgtttaatattcttataaaaattaccagttgtgaaaattcttcccattcattttttattcagacttcatagtgttttgaggtaagctggaattactatccccattttacagacatgcaaaccaagcccaaggccttaagccgcttgcccaggatcgcactgctaaaagccaggcaccaaaaccaactcggtcttctggttccaagtccaggctctccacccacctcattagaaagactacgtgccctactagtgctggaccatctcagagactgactctgctcttagtttatgatataaaacccttttcaagtacctacctgacaacagatattctgtggtttcatttgtatccctaggacacattagagtacttccccatctgaacaagaagatatagtggtataattatccttgtacctcaacattaacattacaatgagatagtggatctttttcttaaaacaacataacaacaaccttaaaggaagttttggaaagaaaaggcttatacataattcacctgtactgacacaattactttcgttgtaatgaaacaatagtgccagcactttgttgatggctttcactaacagcaatgtcagcaaatacctagatggcctttaccatatgccaggtactattctaagtgcttttcattcattaacttcctataccaatcctgtaggtagatgtggttaatatctccattttacagaagagagaagtaagacacagaagttgaggaaacttgcctgagctcccacaactggtaaacagtggtgatggatgcagccagctccgggatttatgtctctatccactaccctatgcaatcttggcacctgcacaaacccaaaaagcctctgaaagatcccagctctttggaggagcagcctctcagtgccttgatcttgcatcttcaccccaccctggtatatctgccagaaaattcaaaagcactaattctggattgatagacaaattctaacacagtacacttggggcatagcaagacagagtcctacctaattgcaaacttaaatccatcctttccccaaatgtgtcacccataaatggacattgtagaaaccacttccaggcctggcactgtctcctgatttcaagtcgtgaccaagctgaattccaagtaaggtagaagatttgaagttcatcctggacttctcccgggaattttatacttttattgtctttactccccatagagaagggatactagtccaactaaacttgtttaagtagtcataaggtgcttctttccagactttaaagatttgttcttttatttaagaaacatttattgagtggatactatgtgccagaaagtaaataagtcaggcacattcctctagtgggaggcagataataagagataaacaaacaaaataaatgcaggtagtggtaagtgcaatgaaggcaataaacagtgtgatgggatgaagagtttgtgaactggaagtggggagagacttcatttctgtgaacatggtggtcagaagaagcatctctgaggagatgacgttgtgctatgtctggaagcagagaaaccacctctataaagcaaaatataatcaaatatcttcgtgctgtgtggtcacaatatctagtcattagaaccagtcttgaggtctgcactgttcacttaaaggctcctaacagttcaccagcctgaccatctatggaaagaatctatggcacagaatgatttgccattaggcttctgtcagaaccatgagattacccatgcacaagagagttttattctccttgtagggctgacatgaaatgtatcttttgtagatctttaatctgctcaagaaattgtccatcttgattcaaatgtaaataactgcttctccgagccatttttccctagagggttattgggaaggatcaggactcttccactgtcctgtctgtctctacaatgaacttcatttctgtcagccaatccccttctgtgcctgggataacccctgcatctcttcacaggagaacaatgttccattcagcctccacacttgagtatctatgctatgtgtgatggaaacttgtggcagcttttctccaagatggctgccatcaaattatttctcatccctgtatacacagcccgttctctctctgggagaggtagagtctgttcccctctccccttgaatctaggctggtatctgatgcctttaaacagtgcattttggcagaagtgatatttaagttacttctaaggttgggtcataagaagccttgcagcttccacttgggtaccttgggggagggaagccacctggtctctcatagcagttgactatatattaaaaaataagaataataaaaaataataataaaggtccaactactctgagaccaccaggcagtgaggaatcccaagctagccatgtaaaaaggccacacagaaagagagattcccaagcagcccagggaccagaaatatgagtaaaaaagcctttacatgacaccagcctctactgccatttgatggcagctgtatgagggccccctagctgtgccaatcaatccccagaactcagaaagaaaattaaaaattgttgttttaaaccacaaagtttggggttagtttgttatacagcaataaataaccagaacagaactcgataaatatttgttgaactgaacatacagttccactcacccatccttggagatagtacagttaagccctgtgtcttagccagtttacatatttacatatactccttgcagaaacgtgactccaactgagtatttatgctcaggatgaaaatttcactcttttgagtagtgaattagtcctgcaaggacattaagaatctttacttaaagacagctttgctaagtggtattcatgtactgaaaggtatcatgtaccaaacaggcttttttgcacattagaatttgcctctcctgtgtgctaacaccccttttcctgtgcttgcaacactgccacgtgttatttattttttatgtgttgatgtcccattttgttccaaaaaagaatttgaggaggcctatcatgttaacaatagtataaaaatatgtcatatgggattacatgttgtcattaaagctgaaagtattcatttatctggaatgggtaagtgcattattccctaaaaggagctactgacatagttttcagtctaagaccaggacccattttcactttaagaccagcactcaagtcagaaatagagacagggctgggcacagtggctcatgcctgcagtttcagcactttgggaggccaaggtgggtggattgcttgagcccagaagtgtgagaccagcctggtaaacatagcgagactccatctctacaaaaaataaacaaatttagccaggcttggtgatactcacctgtggttccccactactcaggaggctgaggtagatggatcacttaagcccaggaggtcaaggctacagtgagctgtgattatgccactccactccagactggacaacagagtaaaaccatgtctcaaaaaaaaaaaaagaaagaaaagaaaaagaaagaaagaaagaaaaagaaacagagacagtgatttgatctggattttaaatctatatttgggtctgagaaaattagagtctttggcaaatgaggaacttttgcaaaagccattaagattttcataataaatctaaagccactctttaaagcttctcccaaaagcatttaaatcatataattttctagttttctccaatctactcaaatctctgaggctacagaaatgcctaatttcaccaccaacaattcatgtgtgatgacagtaaggatgaaaagcagaagcaggctgagaagagaacaagcagcatctgatgccaaacaagggaaagcaggtcactccaccaagggtagctcgcttctagacctccagtagcagcccctgacagcaacaatcttgtctattgacatcatttattattgtctgctgacattgtgtcattattctgctcccttaattttcatgcaaagttgtagctttgggtgaatgtctacccaagtataaaatgtgacctttaggatcagaggagacctttcctactttttccctggcagagatactgtctgatttcacacactcaattggggcagcttcagacaaggggcataagcagaagggtcagacagggtgagtgatgaggccatatttggtctgtgtgcatagctcatagtacaagtgcaatcacgtcaggaaggcatctatcaccccaagttattagaataacatcagaagaaggcaggataatctagtagttacatgaatggagattggaaccagacagccaaggttccatgcttgcctttgttgcttttttaagtgtgacttctttgggcaagttatttcaggctcagttgccttatgcccttgctgaatggcataaagcaatagatacaagtgggttaacactgcctggcatattgttagcaaccacgtaagtggttactacatgcactatccttaccacccccacaccccgcactgccaccatcttattcctgctcatcccaggaaaagggtgaggctgtagtcatatcccatggcccaaggaccttgaattattatctgcccaggtcttcctgtctagcctggcaaaggtacaagaagacatcctatgaacaagtgaagaagtgagagtcccatctggccccactccattctgcatgtgtcagagagttaccttttcaagccaagaagtccttggctctgagccaaggactcagcagaggtcagctggcagcgtttcctactcaccttgaacaatactaatgaaatagtcaaagcagaaagccagttggccacgatttgcataagaccagcctcacccgtgctgagcaggggctgaggtcacccctgaacacacacctgaatctctccttttgcaccctccacccccactaccccaagaagtcattctggattccttaccccacagccagtccatttttggcccttgttttcagctgccaatatacaactgtaattctctaggcctctccatctctactgccatccccatagtgcacttcagcctgcccaaaccacagctgtttcctgcctgttttttcctttgactccccgcatatcttctccatgcagtaaccatcgtgtcatgtctatgccctgtttacagcccttcagtagatgccccattgcatttagaataagcccatctcctttctatggtctacaatgcctagcatcacggatccccctgcctacctctgcttcctcatttcatgccatcactgggctctaaccacacgggcctcctttctggctttgggactttgcactggctttcctctctgccttgagtgttcttcctctggccctaaggaaagctacttccttgacattcctcaagtcaaagtccacacattgcttctcaaaggggccttggctgaccttcctttctcctgcctccccatgtattatcatgtcacctccagacttatcacaaattcttccacgaatacatgtttcttatttattgtctatctcccctcactacaatgcaaggtccttgaggatacactgttcattgctgtaacctcagcatctaaaactaggcctggcccacagtacctgctcaataaatattggtataagtatacattcattcactcactcaaccaataagcattctgtcctccacaacttggcccaatgccttgtacacagtaggcaaagacaagtaagacttattctctacccccttaagttcatatctttggtgtgtacttacataactataataaaaagtgatagtaataaatgcctaaataccatatgactcatagtcatgggccaccatgtgtgtttgaatgaggtaaatgtcatttcaaactgaggtcacctgggaaaacatctaggagaagatagaacttgagttgggtcttgaagagaaaataggatttggaaaagacagagatgagagacagaagtgggggctttggagaaagcaaaagtctggagagaaggcagcagtgaaatgggaagatgtaaggcaagctgtaggggagacatagagcagacagctgggctagctcaggaagtccatttagggcaaagagaggatatcagaatgagagttgaaaataccaccatgagctagctcaggcagttggatccacagaggcaaaaagcaggctttccccacaggtctacagtggtgaatctacaagcaagctagagacttatcatcagtattggagcttgatcttgggcacataaatacatatgtgtatatgagcaaatgtatttcatatagtagtttacgaggctattagctataataagatatctaatgggttcaactaatgtgaaatatttatactctatttttaacatcttccaaatattttagaaaattatgtatttttgttataggtgaaaaatcttcagggaagtaacaaacagggtttcactgctcaaccttgattaacctgataataactcgggtcaattcatggatatagacaaacagatagatagattcttttttgttgttctggtatctaagatccattatggaaaaaaatcttaatgataaaatcaaagggttttactttgttcatagttttacttctagcaattttgtagtccattaaatagccagaggcttaaaagtgaattttttattctaccttgatatatatttccatcagaaaacttgtgagcttgttacatttgggggtttagttttacttaaaattgccatatttccttgcatactttctctccttttttcaaatctttacacatgtcacaagtggaattcaaataatctacacacccacaaattgaatgaaaaaattaacatcagtattaacccaccaacatttcaaaggacactcagtgccatttaaatatatcagatcagctctatcagtattcattgagagatgtttagattcagccaggccaaaacaatgttattacacttcttaattttatttttattttaaaaagttcatcctacatatatataattatatagatatgtaattaatatatatttatgtataatttatatatatatatatatatatatatatgactctctgcctttttgaatgtgtgcccacattccttttatcagttgatcttcataaaagacttgtcaagtagacaaggtcagtgagatgagcctcagtttcaggaatgagaagaaattataaagaagagcagggatatctgaaggctgcagggagcagcattaccaaaggaggaacacaggtaccttttactttagcacaatctaggtgagaaagagggaagtagaaggaggctgtacatgtgattatttcatcaattctgcctgctcccagagagccagccgaacagtggccttccctgggcttgctatgccaacagttgccccaaaacattgtcaatcattgtgaaacacgacagaaaccaggtttcatccactcactgccagcaacacacacaaaaaaataaagtaaaaaataaacagaagacaatgctggatggtcaaaaaaagttaaatgctgccagcatttgttatgtattaataatatgtttttaaaaccttcccctgaggctgtaagcatgactcctgggctgctcctgttgaccctggtgctctggcaccaagaagagtaaaagaatcatcttttgctttttcttctgctaaaaatgtgatgtgagcagtaacaggagatatgcgggaggaggcaagggaactggattactctaagctggacttggttactgctaactcagtggttctcaaagagtgggcccagagcagcttcatcagcacaccctgggaacttgttagaaatgcagattcccaagctccatccctgacctgctgaatcaaatacactggggatggggcccagaaatcaagtgatactgacgcacagtgaagtttgggggccactatgttaggctagtctcaccactggcagtgtcctcactgctctgcaagtgaggaattctattttgctcatctcactcacagtgtcagttcctcattcccatccccctttcctacccccatctccaagcccctgggtgcggaaaagagaactggtcttgttcttgtctattcactgtggctctaggcaaaggtggccaccactgggtagggcttgagtctgtgatctccttggtcacattcacatctttctgggagacagctggagaggctggctaggagggtgttcagaggagtagagatactgttcattagtgtcaaaaggtccacagggagtaaaagccttgaagtaggggtgaggaggtgtggagctccggggagactgctgtgtggagtcagggccacccagatcgcaggcctggcctcagcagcttgctcttaacctttctgatccctagtttgctcacctgcgaatcaggatttgaatgaggactacttgagacagggtagtgtgcaaagtagctggctcacttgtaggccacaaataaatggtggttatgatcatcacaaagacaaggaggagaagtggagcagactcttcctgaaggaagcactgggtgacagcaggagacacatggacacagatcacatcagggaggtcactgaatgagaaactcaggagtcagatggctactgtggacgttgggaagcatataagtcacctggaggtcttgctaaaatgctgattctgtaccacctggtctggagaggggcctgagaagaagtcccctggtgacacccaggctgctgcactacgctttgagcaacaaggccatggattgttcttgagcaagtaaacagcagagaactgccctagggacattaaatactagtaaattcaccactctgccctaaagtttgccaagtttcctgtagacagcctagcaatcttccccctcaaccctcagctgagaccacctcaaactggagtctgtagggcagaggggagcttcaagccccagctgggtcagaagcaagaatccacagggcgctgtttgctagggcccacccatcgctctgctctatcactgcccacggtgtgcccacctcccacacacagacacacaccagcatgtgcagtgctctgaaaatgccatcccagagcccctggaatttatgtcaccttacctaagtatacaccctttgtgcattcagaagcaggacccaaattcctgtcctttctctgatctctctctctctctctctctctctctctctctttctgcagcaacagtcctgtaaacattgtcactgagggcctattaaagcaatggccaaaacatatatctttactcaaagatgtgtaaactgtacagtttgttaacaaatgatgtgaaaactggaaactgtacaggatatcagttcagaagagattttctgccacataagaactatgataaataaagctcccttcaacttcttcatttaaatctttcttttttctcctccttagccagaagacattggacaagcaccaatagtcaatgccccagaaggtggaaaggttgacttggaagccttcagccattttacaaaaatcatcacaccagcaattaccagagtggtggattttgccaaaaagttgcctatgttttgtgaggtgaggatgttgtttttccttctgcattattcttaattatagtttcatcagtttccaggaatactgggtattatttacaatttaatgttaattagtagggacttaatcatatgaaagcaacgtcagtacaaaacgaaaatgcattctatttcatttggatttcccactttctgtatttagtcatcattcattagcttgtccgtgtaaggcccatcaagatcctattcatccccctgattccaggcattgagaaataatgatagcaatagattccatttattctgcacctatgctgtcctagttaccacactcaggtgctcgggtttgcccacattcaatctaatccttctaaccgatttgcagggttgcttgtattaaccccattttcagacggggacaatcaagatcaaagagattaagttatccaaatgtgacatcatggttagagcctaggtctgtattcttctcagtgcatatcccagtgagatgactgtgtggtcgtttcttaatcctcaagaataagttaaatgcccctcatagaaccaggctcttaatatccccacaaatctttcgtcttttcctataagctcactcttgcttgtcccatcttcagggcaccctgtagagctgtcccaccggagttcttcaactttccctttgggacacttgaactttatcaggcctgccctgtggtggctgatgccacagtctctacagtcagctacatgggcaagaatcctaaacaagttacccaatgtcttcaaacttcacttatctcatctttaaaatggggattacaataatgtctacctcttagagctgttgaaaggttttttaagtgggataatatatttgtaaagtgattagacagtgcctgggttataataagtattccatagtttaactgctaatactgcttttattttatctgttacatttccatcctgcctctaaccttcttcttttttaatcaaatggggttatgttttctggaaaactttaaaaaaatttcgtaagattcttgtctcttgctctgtataccttcaagaggacccagaaagacaccaaatagagagggtcacggacagctgtgagcctcttaggtaagcaggctgagtgataagtgatcctggtctcacctaaaaagaagctaagtttcctcacctggaatgactcctgctgccttggcttccagctctcttctgtctttgagtttgcaataatgggagcctagctggaatcagagggacacagagacctcagacattatggggacacttctcattgccaatttctgagcctccacagaagccatacccagaaggacaggaaagtgggcttcgggaaacagatatcttgcccctagacctacctgagagagcacgtttgcctccctcttagccccagcttcactgtggtgggggccaggtgtcttagttcaggccactgcaacagaataccatagactgagtggcttaaaaacaatagaagtttatgtcttacagttctggaggctgggacgttcacgatcaagttaccagcagattcactgtctggtgagggcctgcttcctgattcatagacagctgtcttctcattgtgtcccttcatgatggacaggacaagggagatctttgggatgtcttttacaagggcacaaatcccattcattagggccccactctcatgacctcatcacctcccaaaggccccgccttcaataccatcacactggggattaggttgcaacatatggattttgaagggatacagacattcagtctatagcaccagggtacctgatatgctagtacccacagccttgcagtagcaatgactcataccccacccctaaagaagtcagtagatactgaggaagggactttgacttatatctctgtgttggccatggagcttcccatgcctttgacgccttttttagaagtagacatctattaacattttagaggatattacaaaaattatacgtattcattgaaggtttatttatacaacataataaaggtaaggatttatggtaacactaccacaagattttggcacctattttagtcttttttcaaatatttgtgtgtgtgcacacacacatatacacatacatacatatatatgaagtataaaacatatttaatataatgcataccacaatgtactgtgtatgaaattatttttaactttttattaaagaatgtggatatgtcataagagtgcagctcaataaatttttacaaactgaacccacccacatgatcggcaccaaaagaagcagatcgttaccagcacctgtcactgtaccaactttttaccttcaatgggaggacatagcgtttacatattttttcacaaaatgatttccaatgaccacatagtattccaaagaatacatctaccataaattctgttatctgtttttactggatctatagttcatttccaatttttcactaataaaaatatgctcctgtgaatgttctggcaactatatcctgcccgcatcactgactatgtctgaagggtaaagcctggacatggaatttaaggaccgagatatacaggcttttgatatgtgttgccagagtgccctcgagaaagtatgtgcactctcacatctgcaccgaagggcttgtttcccctcactcttgccagttctggctgtcatcgttctcttttgtctgaggggatggttttgttttcctggacctctcttggtcctctctctggctgtgtccctttgcccccagttcttgggtctgaggaggaactctactgagtctgtcacccctacaactctagccagcctgccagtcatatggtaccctttgaatgccaccgcccccccagcccctgagatggtttttttccagtgtaaaactcatgtaaaccactgaagagatatttcagttgaaggaagaaaacagaagcagcagccatctccgccaccaggagcaaacacactgcgcactttcatccacggcaagggcgaggggtcaacgtggaacttttcaagcatgggttgtggcaagcttatctatccaagtttccctaaaagtccaagctgtttcatttttgattccatctctccttctaccctgatatcgtgtggtctgccaattacaaaagacaatggtggcgggatggtgggagcacctttacagcaaagcacctttgcatgtactttctgtctttgaggcctcctgatgacctttagccttttatattctctctcaaacccaaaagaggtgaattaactgtataggttcgtgagctacccatggagtgggctggagatctcaggtggtcttgagagccaggggtctcttgccagaggcagtttatcacatctgctattcaaactgtgttcatgataattgttctaagatccacgccaacccaccaaacaagactggcatgacaccaggggcttcacaagatctaaaatcatcgccggcagagctgccaaaacaacatgcaaaaccactcctagagtgcagggccctgtcgtctttgccagtcaacctgagtgatgctctcctaaggaagcaggaagaacctgtgggagtatccctgcatctctgcctgtcaggcccttgttgagtgttctcacaatgaaagcattttggcaggtgtctaagagattatttgcccacgtgttgaaacaaatctcaccaggatcctacaaatccctcttaaaggaaaaggcatctggcctagtttttaaaccattggtgatcctttgcaaatacttattcagcttttatttaaatttgaactaatcttcaacagttggtatttaaactagaaatttggaaaagaaaatttctacttcatctataatcagaattggtttcaaaagtggggcctgccccagtttgcatactttgtgacacattttaaaaataaatggtttgatctgattagtaacttcttgttgctgttctatgctagtggttctcaagagtgggatctgtgaaccagcaacataagcattacctgggaacttgggggaaatgcagaaactcagaggttggggtcagcaatctgtgtttaacaatcagaacctagacaaaagcaaatcacagtgctttttaaaaaatgagcggaaggagagaattcatatgtatggattccagaatcaaatatgcaatgacttttattctgaagaaaaagccaagcagtttgaaattaaatggtaaagtgactaggctgagctagtaaaaaacataaaatgcccagtattttagatgtaattcagttgtattacttttatataataacctaaattggactggttgagtattgccaagagcgtttcccaaaaggaatttgtaactgctctaatgaagagacagatattaggtgtaactcacatatttgttgtttatggaaacttagtcatatccatggtaaaaaaaaaaaaaaaaaaaaaaaaaaaaaaaaaaaaggggttatgtttccttcttctcttggcattggattctgacagatccagtttcaaatcctagcctcacccatgaaacattcatttgaccacccccgcccccacccagcttgttaccctctcagtgcctggatttccacatctgtaagtaatatggaattagaatatttacttcattgtactgctgtgaagattaaatgaggtgatgcatggaaatctgggcatgatgcccaattcatcaaacacacccatttactaatagctttccaaactcctttgataatggcatttaattaaatagtctccccttccagaaaataaaattcttattttgcctataagcaaaggtattttttattattaacgttgccacattctcacaaatcttaactaacagggtaaccaaatgagcttaaaaggagattgcaacactggcagaaagacccagtgtgttgagtaatcctgtgtctaaggtgctgagaagaacacaaccttgggagtcaggaggtctgaattctgctctcccctctgccttcaagtccctgggtgactttagatgaagcttatatctctgggcctcatgggcaacatgtatctctgccaacaaccctctagctttgtgccaagaggctccaagagcaaacgtgcttcaaaaaccaaaaggaagcccagttgccagctaaacagtagggtaagctgttacctattcaagctacaagacaaaaaaccaaacaaacaaaaatggagagtttaacataaaccctgctctcaagcagttatcagttgaagttataatacaaacccccaaactgaggggttattagcacagtttcacacacgactgtaatagcagttggagaactgtatctgtcataaaagcaatgcaaactcctgaggttaaagttggtgaagattacagtcaactttgagtatgaaaaatggttgtcgaaagtctgcagccaagtagggaagggaaaaccatgggctcaaagaatgcaggacaaatgttaatcacagaaggttattcctattgcttttaagatactgtatgttgttcctgactggcatttttgcatttgttctttgctgacatgaactggttcttttcagctgccatgtgaagaccagatcatcctcctcaaaggctgctgcatggagatcatgtcccttcgcgctgctgtgcgctatgacccagaaagtgagactttaaccttgaatggggaaatggcagtgacacggggccagctgaaaaatgggggtcttggggtggtgtcagacgccatctttgacctgggcatgtctctgtcttctttcaacctggatgacactgaagtagccctccttcaggccgtcctgctgatgtcttcaggtgagtacacctagactcgttagtgggcatccaaagagcttttgcttgtctagcgctaattccaatcacttgagttttcagtccccctttagcttcagaaacatagctcactcttcttcagtaagaaattgcaggtttgccagtggactgggaacttaaagggggggcgtcagatgtctgatgctttttgcagtgtcccaggatagaaagaagccaaaggagccatcttaaagactctacgaagtgatccgcctttggtggatactgtgcagccctcttcgtagtctttggccaaacctgcctccttctggtttggggtatgccagatatggatgtgagtgaccacacgattgtgtgttaagttctgtgtgtggaaaccacggatgcaggctagaatttgttcatggcttagctacaactgaagttttagttatctgttgctaaatagcacaccgacccaaaacttagtggcttaaacatccaagatggctggagttcagctgggacatcaaacactggttcaggcctccctctatgcggcctttcctccggcagggtagacttcttacttggctgttgatttccaagagaaagagtcccaagcacacgaaaacagaagttgcagatcccatgaggcccagtctcaaatcacacaggatcacttcatccacactggattggcccaaacaagtctgagtgccagccaggactcaacggtccccctgtagatgggaggatagcacagaatgggcagccgtctgtaagccactacacatcaaaccctttcagggaagataattttaaatagaagtggtttcagagtcctctgcattttcagggcacccaagtgtagatgtgctttgtttggcacttgtcactctgcactgtaactacctgcttcacttgtccacgtaagtccctgtggacttcttttttttgaggacatagatgtgtctaactgtacatccagcacctaggccagtgtgcaatagaattcaagaaatgcttattggataaatggctgaatatgtggataaaatatcggtcacaagtacatcgagaattctttgtagagttgctgcttcctggttaactcagtaggaaattttttttttttaacctgagacacggtcttgctctgttgcccaggctggagtgcagtggtgtaaagacagctcatcgcaggcttgacctgctgggcttaggagattctcctgcctcagcctctccaagcacacgccaccacccctggctaattttttattgttttgtagagagaaacaggtctcactatgttgcccagtctggtcttgaactcctgggctcaagtgatcttctcacctcagcctcctaaagtgctgggattataggcatgagccaccacgcctggcctagaattctttttttaaagctaatctagaaatgtatttactataggaaatttagatatggcagacttttaaaaaaagaaagaaataattctttttattatggaaaatttcaagggtaagcagatagaatagcataatgaactcccatgtacactgtggcacccagactccagaccggcctcctacactccccaccacctcctaatgttcacaccttggataatctcctgtccttcagtgtgtgcaggacctgtaccttgcttctagccaagagaatatggcaaatttgatgtcaccccttgtgattacattacataatctaagattccctcttgctggcagacttgctctagggactctccgtgccagcttcatgaagtaaaccgccatgtggggaaagttcccatgacaggagctatagatgacctctagggctgagggtggtctccagtgacagccagcaagaaatggggcccacagtcgttcaggagaattagtctcaaagaaataaaatttatagcttatccaaggactccttgtgtgactttgggtgacccctagcttctctggacttcagtgacctttaaaatgaagaaattaagctacatacacgggaattatatttctggagggactcatggtaatttttttagctgagattttagaggtacaaagacagttttaaataatgttgaatcacaccacgagaaagctgtttctctgacggttttcttcctggttatatctccttccaaataaggcaaggagagagattcggtgtggtgctagtctgcctttaacacctctcttgacacttaccttcttttttaacaaagagagagtggatctcaggagcaatgttcagccagaaccttcagctccaaagtaacaaaggcttttgccatgcatctatttttgtggttatcttctgatttatgtcaaatggatttttattactgaataataagatgtttcctctgtagtgggtcagtttaacagattattaagcaaataatctaagtaaggtagataaaaggaaaagtaggtggagatgacaaaaactgtgaatgtgatgccaaacactatcaaacaccaaactgaatgattcttcccagttctctcatgttgtgaggctgacactgcctgacagctacaggacaacttaataacttttcacaatccaccctccccagtgatgtggaccctcttcattaatactgccaggaccagaaaaatattacaagacattgtgcatttggcaaatgatagctgcgtgtcagggccccaagtctccagttctatcatggggcctgatgttctaagccccatgttttgtgtgccatttcggttacacaatatcttagactttttcttcaaagacttttccaagagccactacttctaagttccttggtcccacagtgcaaagagaaaaaatgaaaatgatctgaaagacatttctttaagaacttttgtcttaaggagttaaaatggtcttcagtctttaaaatgtttctctcttcataaacctgttcagtgtgattcaagcatcatcaaaatgtcaatttgtactcgctatgtcatttacgtggccatctcgtctttatctctttgatgccacaaaacccacattatatttttccctttgaaagaacacatccaaagcaataatatgttgatcttctatttgggtcaaaaattaaaggatcctgtggaaaattcttgcacactcaaagaaagagagaagataggggaaagggagagagggagaaccagcaaatctgcagagcagcttcatcaaatatgaaggaaaacacaagataaaaatgcacgaattgccatttgtgctaaataggggattccaaaagcccatatggtttgttagtttgtttagactcagaagggtgaattgagacattagccctgatccttcctttccaatgaagcagaaccctgtttcgattcctattgatacagacacctcaataattggacctttgaagtgtgaattcatttgatcagagccacaaagaacaaactgaagagaacttagcaggggcacgttgggcctcctggagctatttgaggaattcatccgggtttatagattatttttgtcagccaagtgtctgcagcccaactattccccagttgcccagcctccttgtgtcacccctttgtttgccacttttggaaactgacttgagcctctcccacatactatgggaagcccagtagtctgcacaggacttgggaagatttgctgggctttccagggtcccggtgtcttctcactccagctcccactatagctgttctcttctctgcatggggtgactctggcacagctcccctccccttttcatttcaattccaaaatcatgactaatacaaggctgctactggtagcaattttactaaaggcataagggaagggaaaggccagttcattgcagcctggaagacaacacaaaattaaacatggtgtttcttggtcctcaaggaaatgtcttactattccgcgttcctcctttggcctcaggcctgctgcaatgtccccagtcccttcatatatctcccccttctatgcatgtccacgctcatcctctcctctctgccaggcagccagtgaaaattcaaaattgttcccctcatcttgcagaatatttcagctatgtcaggcttctccttctgtaccctaggagggaggcatcacctttcacactcaagaaggtaattcacactcaagctaaactgtctaaacagagatatttatctgaacaaagtactgcctctcttcatataaatgatgccactcccctggtacctggtccctggagcaccagagttcacgctgcatccatgctcatggctaagagggaagaccctagatctgcccgccccccaataaaggcctggaattggacaaagcaagccttcccccttccatctctgaatcaatgtccatcttctctcttccccgcagatcgcccggggcttgcctgtgttgagagaatagaaaagtaccaagatagtttcctgctggcctttgaacactatatcaattaccgaaaacaccacgtgacacacttttggccaaaactcctgatgaaggtgacagatctgcggatgataggagcctgccatgccagccgcttcctgcacatgaaggtggaatgccccacagaactcttcccccctttgttcttggaagtgttcgaggattagactgactggattcattctcataattcctacagcactactgggtgtcatttcattccattgcctagctcttttttgtttgtttctttgtgttgggagggattatttgggagggaaaagggaagtagtccttggcatagacatggatgaaattgccccttgaatgcgggtacttgaaactattgcatttcgttctccggtcctgtgatgtgaatgctctgaaggttttatggttgtggaggtggggtgggggacaatcattaactcaccagcaccaagcatcaccagctcccacccgtccctggtccaagacttgagtcagcaaaatggcgccacaggacactaaagaagccttaaaaccaagataatacgaccacctccacccaatcctgatgttcgcagggctgaagttaacagagcacagaccacctttagttagatgtggctttcagccttttagggaaagactcgaacaaattttcatctattcaagagcatgctgtttgcagcactctttatggtctcctaggagcataacttggaatgtacaggaatatttgtgtcctaaaaaaatcagctgcccttccaatatcatttttataacgttatggtttaattcaagttatacaaaggtgtgactcaaggatgtgcaggtattgactgatggaggccaacaaggaaaatattttttttcagtgagcccagagaaattagaaatcttcaccaatgtcagtgactgcatggtttccaaaaattcacatagtattacctcacagtaggaaggcttctttcccatttaggctcagagaacacttttacagaaatcaaacctatttacagggtggcaccccttttctgtggcatctgatctgtcatctcccaagctcctgaagttctttatccaggttgtatctttgctgagctgacaacagatttctctatggatcaaatattctaatcaaggaaagatacggtgaaacttcagtcttcttctggagaaatgctgaggcgagattagtgcagctacattctgagttgaaggaaatgcagtgttctgagggcccctttgtgtcctgatggctggaggacgcttcctcctggttagatcctcaagctccttgcctcattgacaaatgtctcctagtcccctttttccctctgactctgaggaactaaatagcttgactatctctaaacagagactggccctgccactgaccctcctgtccctctcatagcataccctgacagatactcaatagaaaacacctgcagaccatgtgcacacttaactttcctgcccaacctgcctccccaacggcccatgctagaatagcttgtgcccagaaaacaaacagtgacacttcatctcttcagcgtcagaaaatgggcatagaatgtacccatgcaattgaatgtatctcattctccactggcatagtagatataaactattcctttgcctaccttttactgccttatcctggaaatattggggaaaataagccatatcagtgagatttacctaaaaacaaaggaaggaaagtcactatggaaaccaagtagatgctttttgtaagtttggtggagcataactggcccagaagtctgggtgcctgagttctagttcgtgctctgtcaactggtagatttgtaattctaggtcttggttttcttacctggtgaataagtcatgatctctaaaacccttcctgcccttaatattgtctgaatttcaaggggaaaaaaaaaatctggttcctttaattatttttttttaacacttaaattcctaactttattagacaagaagtatggcccacttaacagttaaggaacgtaaatttgttattggctcgaaataataatttgacacaatactagtcaaccatttagaggccttggaaaaagaagaggaacagcactgaaaattccaagtatgattggaaattatctgggagcggggaattaaatattcaatgcatgaaagcaattgtactggcttctgggaaaaaggaaacaagaacattgctatggaacttgttacccagagaaaggaagtgaaaagatttacaattataagcacgaaattcattggcagattacctgctttatctacagacagattgttttggggtttggttttgtctaggcagcctctggccaggctccttaattgcttgctctgctaatatttcagcttcctctcttgactccttgaggaaccaaccgctctttggaagacaaacacttagccacctctgtgctccagggtaaccctgagaagctctgctgtctggggcaagctttctttccaaagggaatgagaggaaggcaagcaggcagggtcctgcagcgtcaggccttctggggaaagtttcctcattttgtttgacagggtcctcagtacatcagacacccagatttgaatataagttcagagcctgatctcaagctaaatcagaatgctttggggactaaccatgatcgagaattggccaaatagtatggcatataaacagccatccagccagccgcaagtaaaggaacgtttgatccttggcaccttaaatgattgattgccttcaataggcaaactgctggtctggaaatctcgttgaaggctgaatacttcatgcggagtaggacaagccttagcccaccttcaggttgaaaggaaaggccataggactcaaaagataatgactctgaaactaaactccttccttctgaagctgacagaggtacttagtgcatctcaagactccatctcataaaactcatttgtgagggatttgctctagatttttctaaacattttttcatctattgtccagacttgcaaatccagtgtggacctgatggagatacccttcacacctgcgctcccaccccctcggcagggagacgtctcagtagaggagaacacacccattatgctgggatttgtatttataaatcacttcccttttagggatgagcggtgtggggcgtgtgtgcgtgtgagtgtatgcgcgtgcgtgtgtgaccctcaagtgtactttgctcaatttagacgtgcagtatttccagaaacaatgaaaaaagtaagatgttttcttctttatgattctgctcaaaacaccacgtgccgcctcagagctttttctagagcctcggtcctcaatgacgcgcttgacctgttgatgcctcagcccagcgaagcccctcacctgtgccccgggcgacagctcttcagtgtgcagtgcaggcctggggtggactgccaggccttcgctctgtgccagcaacgccgttcttgttgctcctccatgaacaggggtacaagccctggcccctcctcgacactaagccccccacagactcagcctccaaggaaccgctgagcacccttgaagcatgtcattgtcagtgatacctttttattctatggaactctaacctattcgtgtcatattgaccttttgctgcatgagtcataaattatgaaatcagtcttacagtttttgaaatgtagccagcatttgtaaggctaaacctttttcatgaactgaatttaagtgaataaccaagccacagttcctcctcaaatggagagtgatgatcgacatttgaatctctttgccctttccaacggctatggcatcaggttctaaaataagctcgtaatttttcctgttattttaataatatggaaatattagcatagtgtttcttttgatagtgatagactataatccatatttaaattttatagagaagaaattttattgtactgtgatgtagatatttattatccaggtaaggatttgcccggtgtgtattttttacaattgagacattttactttaatctttaaaaaaaatgcattaaaaacacactcaaaaaaaaaaaaaaaaaaaaaaaaaaaaaaccagactgggggaaaaaaggtttggccttatcacagaatttttactgtgctgtataaatgtttgcaaatgcgaaaagtgtgcatttatagtgtgtttccacattaattaatgccgccttcaagagcaatattgtgcaggtaaaacgctgtttgtggctttctgttgcacagttaaagctgacccaccctatgcacaagacaatcaaatataaatctgtcctcctcaggatgcagataatactcatgtaaattatggagcacaatgtaagacaaaaggagacactttacatatgtattgttgatacagaaattatcagggcatgaatgagctgatgtgacattatgccacttctttcttttggttctcccttattaacttggcatttttaatttgaccatagagccaaattagttctccatgctttcttcgtagaaaatccttttttttcccataatgttttcatgccctgagaatcagaaaaatactacagaatagaaaaagatttacagtcattggaagatttgtgttttgcaaacagtgttaagtgatattgctagatggtgatatttttttcagcctaaaactctgttgaaatctgtgatcaaaatgttttaaactatccaaaaaaaatttgtatatttgggaaaaatggatttttacatagcttttgtatgcagatataaaactgtaattatgaatatagtgggcgtagataaactcataagcttaaattctaaaaaagaaaaagcttataacagatatattttcctgtctctttctttaaatattattattttctacataggcaaagagttgcctgctcttctcacttcagctgctgccaaaagacggaaccacggatgtaaggacatttatttcataaataaacatctactagaataagcaaatttacttgagaagaaactatggagggagagaagaaactaagtaaaatgctgatggggggttacctctttggaaggggccacaaagatgaagggaggagagaggtgaagttttgcagctcaaggacaacattcatcttctcatctcaaattattcaggaatattactaacggaattatgttaacatcagctgccaacatatatctcaatctctgttgccctgaacacatgttaattgagattctttctatgacaagtaacaaaaagctaactcaaactggcttaagcagaaagctaattattgactttaatatctgggatctagggtattgcataccaaagcttcaggcatggctggatctgggtgcacttactcagtattctcaggaagctcctttttttgtcattcatgtagacttaacattcacatggcctttcaccttacggtggcctccaatagctccaggatgagctttacagctccaaatatagtgaaaggagaatttcttttctccaacaattctaatgaaaattctggcctaattctcactggcccaagttcagtcatgtgcccattcctgagccaatcactgtggtgaggaaaacagatgcataaccaaccttatcctcaggaatcctggaactgggtgaggggaaagagggacagtcagcttcatctaaactatggactgagagttgaggcaagatgattcctgaaagaaaattctaagtcttgctgctataagtggaagagaatggtgggcaagcaaaagcaaccagtgcccacaccaaaggtaaatctaaaacaacatcccatttcagtacagcaagcggttctccttcacacagaggaagctcatctccaagtttttatttggccaggacatgaaccaaataaacaccttccaaagaaagtgtttgatcgcattcttcctggttcgtgaaaacaccagttcaggtaagatggggcaagcatcattatttccctaggctagatcagttcagagtactattttctgagtttttccactctatattcaaatgactaagattaacctttatatatttatctcttgtctacattatgtacctcccaacttcctcctaatgaacatatttccctcctccaagaaattactggattcatttattgtggagagctggaacatatatattccagctaggtacaattcttaacccctttacacaggcaaagccagaagctgttgtcatgtcacaaacctggaaaagtctaataatctatgaagagaagccagaggacaaagttggtttgcttctccaccctcaagatgacagctcactctggtttttatgtttagacactcagggcaccatagctttgtaaataaggggaattgtcatcaggtttatgtacacaaattctgacacattaaatggtgtctaaaccaaagcaaaacttagtagaactactgaaatgcagaatgttacagataccatttgagcatgtatctcaagagaattcactgactacttgatgaaaagtgccatgttatactctttaaagacaatctacctacaccatacactgatgaaatcataaatgaagtctgtatctatacagtgatattgcctggaggctatattaaaatgagaagagaattgccttagcctaggttccccagaaagcaaagttcatgctgcaattttattaggcattatagcacccaaggaaggagtggaggcaaaagtgaatgaggcatagaagaaaagagaataaatataaagtgctttgctaagttggccacacttagtaccaaacaaacacaactgagtactcaattgtgtaagaccatcttctaaggggccatatgaactaaagtgatctggtgcagtggctcacgcttgtaaccccagcactttgggaggccaaggcgggtggatcacaaggtcaagagttcgagaccagcctgaccaatatggtgaaaccctgtctctactaaaaatacaagaaaaaattagccaggcatggtggtgcgcacctgtaatcccagccacacgggaggctgaggcaggagaatagcttgaacccaggaggtggaggttgcagtgagccgagatcatgccactgcactccagcctgggcgacagagcaagactccatctccaaaaaaaaaaaataaagaaagaaagaaagaatttatctactggctctcacattatcaaaaatagggctaacttccctccatgtctaggttatatgtacctggccaaagagcaggtcccgtggtgcttcacacttcaggagctaaagcaatcccgcacatggggaaacttggtctctacttccacagatgggcataccccacctttactggttggcagatcaggtggcaagtggggtgaaacaagtggccctgggccctgaggagataagtagaacttagaggctctgcaattttctgatacaagggctccttcagccaacaagttcttccaattatctgtacatgggccgtcaggttccaaagagaatcatgaagctcaatagacaatcaaacttaaatttcactgtaccatggacctgcctgtataggggcttttaatgtaatataaactggttatgtaaattaattgtcctcttaattgcattttcttgcagtaaaaaattaaatacatgtaaactaatcttttaattacactaccttagtttttcttgtagctgtttcattacaagggcaattttttctatatgaatatctatctgaaagttttatagaagccaataaaatttttttatttttccatataaaacttcacttggcatagacatttttggaaacaatgcgtataaagagtaaagtcagaagaagctgaaataaacactccttttctttcaggacagactgataatgtcctgtatattttgttttaactttcttgtacataacaccaatagcaatgaggaagatgcatatagagtataacatcttcaagttacaaatcagaaaattcttatgcccacaaatcccaatggatacagagatatgaaaaacactcctcagtttgaccctaagtcctagaaagaggctgtagccttatctgttgcagatattcaggtgggtttgcattccaaggattttatgatttctccaatgggagtttttagctctaaagagatcttttaggatatctttccactacataaagtcaaggccaagtagattctgtgtaataagttacatcaaaagatgaataacctgccaggtgcaatggctcatgtaaccccaacactttgggaagctgagatgggaacgtcgcttgagaccaggaatttgagaccagcctggacaacataccaagacccctgtctctacaaaacgttctaagaaaaaaattcaccgggcatggtagcatgcatccgtagttagctacttagaaggctgagtcaagagaatcctttgtgcccagttcggggctttagggacctgggatcataccactgcactccagcctgtgtgacagaatgagactctgtctcttaataaataaaaaataaataataaaataagatgaagaatttgagatcaccaaagatttttcattggtaagtgaactactttgtgagaatccagttgaacatttcagaaaattcacctctgtttcccccagcactttgacaaaagttccattcattgttactttccactcaagagtcccagcaaccaccccaaaggatgcgctaggtgtttgtgctgcctcccagagttcttcactatcttgttggagtatgtaacaattgcccagcatgtaatgaacacctaacacctactctatgccagaaatcatactagaccctttatattacctctaatcctccaaacaaatatggaagtaggtgttagtattctcatttggcaacagggacatgggactcagtgtgaataggcaacttatctaagatgacacttttgccaattgtcagagatcttggggttctaagacccatgttctttttacaacctgcactgagaccagggtaaagccttagccccttacaaaaacaaaaaagcaagtctgctctggaaatatttgtcatttcccttcctaaaaggttcacctactctaatgcaaaaaaaaaaaaaaaaaagtacattataaaggaaggttacctgacctctcattagattgtgtccatgcaaaaccactcattggtgttgcaacataaaatgtaatttctctttgtaggacctatgtataacccagctggctactagatatgtcagtctgacaagaggacatttagtttgctaagcatttgagggtctgatcaagttttgggagagccaaattgctctgcataattgaaaaagaatttacagtaatggaggctggaagtggggagggaaagcaaacaagatgacaggaacacttatgtttcaagatgtgacaccatactgtagctctctcaactttagataatcatcttattagcaaatgcatgatgcagatgaatttcttgtggaaacgaacgaaaagagacattcaggtatcatgtttatatagaactggtgagcgccaaaacaaaggggatcttaataatgtaattatcccagaatgcataggattctgggggttattttgtctaatttaaagaattgagagaagagtttttcaaagcagtttcatgtagctctagctacatgaagagagggctctagctgacatctggtagatacgtttacttaagactgtacttagacgtgggaataaattagtaaattgaaggttcttgtggaattttccacaggaaagcaataataaaagcccaactttcactcacacctgcaattaaaggaaaacaacaagtcttaaacaaaacatagcaaaacaaattcagatccattaaaaagagaattttttatgataagatatttgcaatatctgaaatgtcacagaattaacgtcaggaatatgcaggtagattttgcaaatcaacaagaaaaatacataaaatgccatagtaaaatagaatattcatagaaggagaggcccaaatggctaacaagtatatcaagagatcccccacctcacgagtaatcagaaatatgaaaactgacatcgctctatacccgcagattaggtagacagaaaataccaagcattaacaggaatataaaaagataaggaccccatctcccgctagtgagagagggttcagcccatttttcctagagccaggattcccattctgggaaaatacctcaagctcttacagagacctataggcataggaatcctagcatcacatactttgcaatattaaggagctgagttcagagaaggcaagaggagataaatactgggtggagggatacctaccatggaaatcactgcagcatagaaagcattgaaatagacctgcatattgaaacttgtaaaaacaacaacaacaaaacaaaaagatctataacacaatactatttatgtaaactgcaaacacaaaggagtaccatacattttgcatggaatcatatataaccaaggacatacatcaagcactttacactgggtgcctgtatagaagagatgaagggaaaaaaatgaaataaattgtagccatcataaaatacagagtatgattatctcaagtccctgcgcctaaggccattcccccacaaaactgccaggttttaaccatctctttactatctcttccctgagtcacccatgttgtagcagttactgcaagaaaatggacattaaatgattggataacagaatcctgggtgagaagcacaatctatggccttggagccaggaagatgacattaaaaatggcctgaagatgacatggga

SEQ ID NO: 459 - DNA, 2086 bp, Homo sapiens
atgaactactgtatgcaagaaatatatgaagtgcacccagctgccggcagcaattgctacatgcagtccactgattattacgcgtattttgaagatagtccgggttacagcggttgcgatgctcaggctgtgcccagtaacaacatatatatggaacaggcctgggcagtgaatcagccttatacctgtagttaccctggaaacatgtttaaaagcaaggactctgacttggacatggccctgaatcaatacagccaacctgaatatttcactgaagaaaagcctactttttctcaagtgcagtcgccatcgtattctcaaaaaaaagggtacatccccagttacttagacaaggacgagctctgtgtagtgtgtggtgacaaagccaccgggtatcactaccgctgtatcacgtgtgaaggctgcaagggtttctttagaagaaccattcagaaaaatctccatccatcctattcctgtaaatatgaaggaaaatgtgtcatagacaaagtcacgcgaaatcagtgccaggaatgtcgctttaagaaatgcatctatgttggcatggcaacagatttggtgctggatgacagcaagaggctggccaagaggaagctgatagaggagaaccgggagaaaagacggcgggaagagctgcagaagtccatcgggcacaagccagagcccacagacgaggaatgggagctcatcaaaactgtcaccgaagcccatgtggcgaccaacgcccaaggcagccactggaagcaaaaacggaaattcctgccagaagacattggacaagcaccaatagtcaatgccccagaaggtggaaaggttgacttggaagccttcagccattttacaaaaatcatcacaccagcaattaccagagtggtggattttgccaaaaagttgcctatgttttgtgagctgccatgtgaagaccagatcatcctcctcaaaggctgctgcatggagatcatgtcccttcgcgctgctgtgcgctatgacccagaaagtgagactttaaccttgaatggggaaatggcagtgacacggggccagctgaaaaatgggggtcttggggtggtgtcagacgccatctttgacctgggcatgtctctgtcttctttcaacctggatgacactgaagtagccctccttcaggccgtcctgctgatgtcttcagatcgcccggggcttgcctgtgttgagagaatagaaaagtaccaagatagtttcctgctggcctttgaacactatatcaattaccgaaaacaccacgtgacacacttttggccaaaactcctgatgaaggtgacagatctgcggatgataggagcctgccatgccagccgcttcctgcacatgaaggtggaatgccccacagaactcttcccccctttgttcttggaagtgttcgaggattagactgactggattcattctcataattcctacagcactactgggtgtcatttcattccattgcctagctcttttttgtttgtttctttgtgttgggagggattatttgggagggaaaagggaagtagtccttggcatagacatggatgaaattgccccttgaatgcgggtacttgaaactattgcatttcgttctccggtcctgtgatgtgaatgctctgaaggttttatggttgtggaggtggggtgggggacaatcattaactcaccagcaccaagcatcaccagctcccacccgtccctggtccaagacttgagtcagcaaaatggcgccacaggacactaaagaagccttaaaaccaagataatacgaccacctccacccaatcctgatgttcgcagggctgaagttaacagagcacagaccacctttagttagatgtggctttcagccttttagggaaagactcgaacaaattttcatctattcaagagcatgctgtttgcagcactctttatggtctcctaggagcataacttggaatgtacaggaatatttgtgtcctaaaaaaatcagctgcccttccaatatcatttttataacgttatggtttaattcaagttatacaaaggtgtgactcaaggatgtgcaggtatt

SEQ ID NO: 460 - protein, 474 aa, Homo sapiens
MNYCMQEIYEVHPAAGSNCYMQSTDYYAYFEDSPGYSGCDAQAVPSNNIYMEQAWAVNQPYTCSYPGNMFKSKDSDLDMALNQYSQPEYFTEEKPTFSQVQSPSYSQKKGYIPSYLDKDELCVVCGDKATGYHYRCITCEGCKGFFRRTIQKNLHPSYSCKYEGKCVIDKVTRNQCQECRFKKCIYVGMATDLVLDDSKRLAKRKLIEENREKRRREELQKSIGHKPEPTDEEWELIKTVTEAHVATNAQGSHWKQKRKFLPEDIGQAPIVNAPEGGKVDLEAFSHFTKIITPAITRVVDFAKKLPMFCELPCEDQIILLKGCCMEIMSLRAAVRYDPESETLTLNGEMAVTRGQLKNGGLGVVSDAIFDLGMSLSSFNLDDTEVLQAVLLMSSDRPGLACVERIEKYQDSFLLAFEHYINYRKHHVTHFWPKLLMKVTDLRMIGACHASRFLHMKVECPTELFPPLFLEVFED

SEQ ID NO: 461 - DNA, 2235 bp, Homo sapiens
agctcgccagagaggcaaactccagcattttatatttcatctgcccccagtgacttcactgtaggaagaggaaatgcagaaaaacaaacgtcttgaagactgaaagcctgttattcaaagaggttagcagtagactgttggaagtaaggtaggagatgtcagtgaaaaaagggatccagaatgattactaacctatgactcccaacagtatgacagaaaatggccttacagcctgggacaaaccgaagcactgtccagaccgagaacacgactggaagctagtaggaatgtctgaagcctgcctacataggaagagccattcagagaggcgcagcacgttgaaaaatgaacagtcgtcgccacatctcatccagaccacttggactagctcaatattccatctggaccatgatgatgtgaacgaccagagtgtctcaagtgcccagaccttccaaacggaggagaagaaatgtaaagggtacatccccagttacttagacaaggacgagctctgtgtagtgtgtggtgacaaagccaccgggtatcactaccgctgtatcacgtgtgaaggctgcaagggtttctttagaagaaccattcagaaaaatctccatccatcctattcctgtaaatatgaaggaaaatgtgtcatagacaaagtcacgcgaaatcagtgccaggaatgtcgctttaagaaatgcatctatgttggcatggcaacagatttggtgctggatgacagcaagaggctggccaagaggaagctgatagaggagaaccgggagaaaagacggcgggaagagctgcagaagtccatcgggcacaagccagagcccacagacgaggaatgggagctcatcaaaactgtcaccgaagcccatgtggcgaccaacgcccaaggcagccactggaagcaaaaacggaaattcctgccagaagacattggacaagcaccaatagtcaatgccccagaaggtggaaaggttgacttggaagccttcagccattttacaaaaatcatcacaccagcaattaccagagtggtggattttgccaaaaagttgcctatgttttgtgagctgccatgtgaagaccagatcatcctcctcaaaggctgctgcatggagatcatgtcccttcgcgctgctgtgcgctatgacccagaaagtgagactttaaccttgaatggggaaatggcagtgacacggggccagctgaaaaatgggggtcttggggtggtgtcagacgccatctttgacctgggcatgtctctgtcttctttcaacctggatgacactgaagtagccctccttcaggccgtcctgctgatgtcttcagatcgcccggggcttgcctgtgttgagagaatagaaaagtaccaagatagtttcctgctggcctttgaacactatatcaattaccgaaaacaccacgtgacacacttttggccaaaactcctgatgaaggtgacagatctgcggatgataggagcctgccatgccagccgcttcctgcacatgaaggtggaatgccccacagaactcttcccccctttgttcttggaagtgttcgaggattagactgactggattcattctcataattcctacagcactactgggtgtcatttcattccattgcctagctcttttttgtttgtttctttgtgttgggagggattatttgggagggaaaagggaagtagtccttggcatagacatggatgaaattgccccttgaatgcgggtacttgaaactattgcatttcgttctccggtcctgtgatgtgaatgctctgaaggttttatggttgtggaggtggggtgggggacaatcattaactcaccagcaccaagcatcaccagctcccacccgtccctggtccaagacttgagtcagcaaaatggcgccacaggacactaaagaagccttaaaaccaagataatacgaccacctccacccaatcctgatgttcgcagggctgaagttaacagagcacagaccacctttagttagatgtggctttcagccttttagggaaagactcgaacaaattttcatctattcaagagcatgctgtttgcagcactctttatggtctcctaggagcataacttggaatgtacaggaatatttgtgtcctaaaaaaatcagctgcccttccaatatcatttttataacgttatggtttaattcaagttatacaaaggtgtgactcaaggatgtgcaggtatt

SEQ ID NO: 462 - protein, 457 aa, Homo sapiens
MTPNSMTENGLTAWDKPKHCPDREHDWKLVGMSEACLHRKSHSRSTLKNEQSSPHLIQTTWTSSIFHLDHDDVNDQSVSSAQTFQTEEKKCKGYIPSYLDKDELCVVCGDKATGYHYRCITCEGCKGFFRRTIQKNLHPSYSCKYEGKCVIDKVTRNQCQECRFKKCIYVGMATDLVLDDSKRLAKRKLIEENREKRRREELQKSIGHKPEPTDEEWELIKTVTEAHVATNAQGSHWKQKRKFLPEDIGQAPIVNAPEGGKVDLEAFSHFTKIITPAITRVVDFAKKLPMFCELPCEDQIILLKGCCMEIMSLRAAVRYDPESETLTLNGEMAVTRGQLKNGGLGVVSDAIFDLGMSLSSFNLDDTEVLQAVLLMSSDRPGLACVERIEKYQDSFLLAFEHYINYRKHHVTHFWPKLLMKVTDLRMIGACHASRFLHMKVECPTELFPPLFLEVFED

SEQ ID NO: 463 - DNA, 52748 bp, Mus musculus
gtccttggttcccattctgtagcctcgtggcacttagaacaactcctgtgtgctcttccccacccccaccccacccccgtgtataccctgcttttgaaaagagagggccttcatttcaaacaagcctttcttacttggccattagctctctggggcagcatagtctgtcagagcagttcccggcacacaggccgggacctcttactgcttctcacagacagagcataacctgttacatatgaaaggggctgtgtgcttcatgagtctctgtccatcctgaggtaatgacgggtacttactgtcatctggagggatgggagcacttgtctctgagcaaagcacaactgtcccttcgcgtcggatgcagtcattgccgcaggtatgtaaatatggggtcagctgagaagaagggccaatcagaatgttctcaggaaatgcctcaggaaatgttctacagtgtcccacttgaaacacaccccccacccctttttttctcttttcttttccttccttttctttctttttctcatacctcttggcatggtcaagtttctgcttggttacatttctgtagcccaacaaatccagtctggtgaccccaagaccaaaactcctgcaatgcccttgaactttgtgccatcactgacgtagtattttcccaatctaaaagggcagctccatcctgataaacatacagatcttgccactggacaacaggaggtgtctccctggccctcacttcctgaaacgagcagttgctgtggccccggggtctgctgtcctgctcaccctgagtgcttggtgctccagggagtagagagtggcttgggtgtggttgtgttgtactgtgacccctgtatacccatgttgtattctactggggatctgacttcctgtttccacctgggccacccgaggcccccagaagacaaacagtggctctccaaagttcaggcattgctctgcaccccagtctttcagccccaaacctttgcagcttcacctctcactcggggggaagtaaaatggctgtcctatctcagcattactcctgggatccatgatagtaaatagaagtgaaaacactttggaaaggcaacagccaccagtccaaacaaaagacactacagctgcagagtcagctttctggtctcaccattgtgaagaccagtaaggagtccctgataacactgcttgactggggagagacttgccatccttaaaaagaagcctcagaaggctactttgtatcagctgttgaatacccagaattcaagacatcctagatttagtccctagcatcccaccacacatgcacatacagaaagcatccatggtggagcggtgcccctcccgtgtccctcccttcccagactccggtttaactcacctgaaccaccgcaccttcactctcctcagtcaccgggatggctacagacgtcctcatcagtttattctggtgcagacaagtgagacgcggacaagagctttaagtcacaagcgtgtacagactccgtgatgaagccactgttcctgacttctgatgtgtgaactctgaatgactcactcgagaagcctagaacttctgcctttagttggttttagactccttgtccccagatgcctacagggacttgtttctgctactctaatcaaggtagccctagcacgcttggacaacagttagatacagttctcttgaaaggaaaccttttcagaggatcctaaaatgtctatacttcccttcactaccaaagctagaggttgggagtggggtggtgatacgggggagagtacctccagcactctagaaaaccccaatgtcgtgtcccgttgaatgagaatcgtgtatctgtttccaaggggattggttgtgaaattcacttcaaccatcttctcgttctttttacaagcagtgatgtctgggtcccacaggcttcctgaaagttgagagagtactcggataactcctcccttatctgagttcccagggggactttacagaaacaaatctaaagctttgggcacacacccaagagacagggactctagtatatcttctgacactgttcccagaatccaaagtatctaaatgtccaagaaagtttagggactacccccaatgccactactttgctacaaatagcttccttgaactggtagtggtaggtacagatctcagtcaatgactgagtgcttaccctatatttttggttttttgttttgtgttttgttttgttgggttttttttttttgttgttgttgttgtttttcaagacagggtttctatgtgtagccttggctgttgtcctggaactcactctgtagacctcaaactcagaaatccacccgcctctgcctcccaagtactgggattaaaagcgtgcgccaccactgcccgactgttcaccctacaccttgaggtgaggagaggtctaggaccattattttccctttctaggctgggaggaagagcctctatttaggaggtaagaagtatgtcccaaaatatgaagggacgtacacccagactcgggacttacaaggacacgctcccagccttactgaatacaaaggaaggaagtgcacatggcttacagggatccgtggcagatcaactatcagaaagtctgttgtctcatatgacttgcaaataagactggacaagtttccaggaacatgtgtatatataataacaggttatcttccctatgggaggggaccattttgggctctggctgggaactggttctaggagtgaattggagagttgattccaggtcctggacttcacaccccctcaaagctccattcttttacagtgcccttttggtgggaggaaagatctcccccagtgtcacttacttcattggcaccacaaggctatactgctctgaagtttatactcttagaacctgggatgagggaatgactatccaaaaaaaaaaaaaaatgcttcatgtttgaaaggaggttctaagagagagttttgagaaggcaactggggcctcacttggacaaactctcacgctctttgttaatccaaacagaaggtacccagagcctccactgaccacaggccagttgtgatgtacaaatataaaggctaatgggactcttctccagccactgaacagctccccatgggcactgctttcaagtgggattcgggataaagtgttagtttagcacagggactggggtggtttcctgcagctgttgctgtactgtgtaaacctaagagcctgccccagactggatagctgttcagcccagagccgctccagcagctccttcactgagtgacttagagaacgcccatctctgtatctcagttacttctgtctgaggatggatgaagcttcatgggcccagtcaggagtctctccaagtgacagaatcacaatactacatctacttacccgcctcagtgcactgctttttatatttcattacgtggtttaggcagcctgggaatgtgaatgaaagttgttacatttgagtaaaaggtataaccctttgcccagtacacacacacacacacacacacacacacacaaaacacacacacacacacttacttcagatatgagagacaacagatctaaataggaaaccattcttccacggaagctttaagtaatctcctttaagtacaacctttatcaaaaacagtctccaggaggtgacacggaaacaaaagtgagagctgacaatacatataggttctgcctcttccagacatgaagctccaggtggtagatacccagatgcctagtaggcacgaccctcaccaacaatgtcacacagcccagataggccatagtgagaagaattcagtgccctctgtgggattcatacccaaacctcatatccccggcttacatacgaagcaagcatcagacaatttcagaatggaaacaagctaggtaagtttgacaaagtcatgaaaaagcgaggccagaggctggggtggcagaatgactgagtgcctctggcccaggaggaaattgtaatgggaaaggagctgaaatccggagagcctggtgtttagctgctggaaatacaccggacgttacttctgtgttttcacgagtgcaccctgaaaacaagatgccaatgaccagcggaacaggaacagagagctgcatggaaacgtgctactcttgcaggttttcaaaaaccatctccaaataaagctcactttaaagcgggggggcattatccccccccccccacacacacacacagagataccacaataaacagtgagctttggggccatcaggaagctaacaagtaaagccaccctgaatggctcaaggcaccaactacgaaggaccagagttgaagcttccccattgctatgtgcactgcccagggcaagtgctcggatagaggatgcattctgcctcctgcctggcacccaggaacatggtttcccacctttacctaacttaacactccctaccctgagttaggaccgctccgcactgtgtccacagaggaggaagctgacagcttcgaagggttcccaaggctcgtcgcaccaaaccatgtgccgtaacacaggtgagacagtaagacagaagaaccaaggacatgagggagtttacctggcgaggtgaagttcacagacaaagaagggctgtcctcattcatattagcattggggatgttatgggcgctgatgagatagagagtgctcagctccacagggaagcctacataggagaatgtccactgcaaagcaaagcaaggtatctgtacaatacaagggcagagctacttggggcgggagctacttactttcatttgtaagtgttttcacaattacgtagtgtgtgtgtgtgtgtgtgtgtgtgtgtgtgtgtgcgtgcaagtgctagtgagggatcatgccatagtgcatgtggaaagatctggacaacttggagaattgttctctctaccatgtaggtcctatggactgaacctaggttgtcagacttgagagcctcagcccgcttttcgtttgtcatttgatggagcaccgctatgctccagctgatacgggtcagtatctatagggaatgggcccagcccaatctactgatgtatctcagaatttaaaaagtgtggcattttagagtcagggtataagttcaactcccctcactgcgttgggcattgagtctcaaagatgctgccttctccagttactgaggagacaagtagagtttggagccaggcatcttgctctgctctgcatcatcgggcttttctgaaacatgctaatcatgctcctcacacgaagggtctgtctgtcaaggacagcctagaagtacttgctttgccgccggaaggtctggtctggctttggaaggcctctgtgtagttgcacctcacacagctgtatgaattcatgttgtttttgccactcacgcagatcttggtggccttcaacaagcggatgctggctgcagagacagttaagtgggaggttgctttcattagtgcttatgtggctcacacaggtactcaacaatttaaatgctttgtcacagctggtgtgtactgtggtccccagggtacagacagagtgaacgaggttttaggagtctgggggatgggaggtaattctgcctgaacttccacagctcatcagcaggaagtgcaagtttggattcccaagcccaagacccctgctgctcctaggctggcctcagttgtacaaagtgcctgtggttagtgatgcaactgccctggtctaagatgactgcttgggatctgcacataacctagggtgtgtctttcagtgcatgcatataggtatttctttcaggcctagggagggaacgaatgggtcctatacagtgcttatttctggtttagtggatgcttcaggctttagctttgactttttttttttaaaaccctccaagcatcagcacccgactatgcctgttttgacagccctatgtccatacagaccatactgtctgtctgctcctccatccctatatttccaagctccctttaaagtccataacaagatcgaccaaagacctcaccctgcttggtgtagggcctaagcctattgtagcatctcacaggagtgtcctggggccatgccctggtccttccagccccaccccactcacatagatccaatcaccccttggggcatccctggctgcctctcctactgctctgaagaacatgctgacgaagcctgtcagtgacttgttttcccaggtcactgggacccttctcctggctctttccacaacctccttgagtttttgagacaaggtctcaccctgtagcccaagctgtcctggaactagtaaatagcccagatgggcctcaaacttgtaacagtctcctatgtcagtttcccaggtgctgagcaaatgtactcttgactaaaccaagtttaactttggcagatggaaaccacaagcgtggtcatcagggccccaggattggcttgtgcaaggaactcgcatgttgctctccacctaatctggaaaaaacaccaggactttgatgatatcatttgagaagtaggaacgtaacctaagcagagcttttcctaaaatgaggggagtcatctctgccatgaagtatgactgaggaaagcctttgcttgtcagcgactttgcacacttacacacccagccaagaactgcccccagcccagtgctgcctgggctttaagtcacttccaagccagagtagcccccagaccccatcctgaagtcaaaccacttgttttgttctttcatgtcccacggtaggcatgattatagatatagctgtatagctctttgtactctgactgcttgtgtttgtgacatccatattgtcacacacacacacaattctcatagctgtactgagttccaaagtttccacattgtgattcctttttgctcttgggcatttgcatgctgttatgaatagtgctactgtacacatcctaagatagtatatgcctgtgtatgtctggggtatgtgccgaggagtagaattaatgggccctatgtccttcccgtttctagtttagtagacactacgactgatgcaaacttaccgtctgcccggagtatccagcttatgttcatcaaaattgaaaactcctctgctgccacacttgtcttgacgagttccacttggaggtccctcaagtctcctggagtgagtgtgtgttggaccatccactctggagatggccctgggaggaggcaaggggacttcatttgatactcctgtttccggcccagtcagaagttacttcctccaagtgatctctcctgttccatcacctgttcacagctcacttctgctaaggaaagctaaactcctggatcctggcaggtttatgcacctgaataaattctctctgccttatggtcccaaactacacagtgtttgtgtatttgtgtgtttgtgtgtttgtgtgtgtgtgtatgagaccagtcctcctttctccaagcctcacccaggactccacccaggacactatgacagctcttttttaacgccccatctttgctgccactgaacctttcactcactctccctagtcaccttcttcgacaaaacccacccattcttcaaaggctaccatgtcgggtacctatgtgtaaaacatttgctgcctactcccaacagtggtatcaccccttgtaccctaatctctgtccctctgtggggtgacaggtactgcttcccatgtagcatggtgcatcccactctgcctgtgtgctaattcactgggaggccagcccatttcaaacacacccttactccccaaagtccgcctttcctcatgagaacctcattcctgttagttaacaaggccacgcaacacactgtgcctggtctcccgtgaccttcccagttctctaatgtacccacctgtctcagagccacactgaatagtctgcaggaaagagaaaccaaatgtcatgttgaagccagtaaaccacactcctcactttaccaaattaggcaccacaccaatattgttccttagatgcatatacaagtgacaagttttcaacgaaaagatgagccgggagctggagagatgaatcagtggttaagacagcatattgttcttgcagaaaacctgcatttaggctccagctcccatactggacaactcacagcaattgcctgtcactctagctccagaaatcatagtcgtggtttctgagggcacacacacacacacacacacaaattaaaaatacaattctttaaatgttttaaaagaaaagagctagtttgattgcactttccaacttgaggggaattgagctgccccactgtagctgtgatgggccctggcttagccattggtacacctggttttctggcagctgctcacccccttgaagaccaggtaggcctcatgcatgctttctttccctgcctcggattactgagggccacggtgaggccacttgtatcatctaatgcttaactgttggttttcaggaccatgtaatgtttattaatttcttcaaattaaagattggctatgcaaagaggagaagaaagcggggagcaatgactgcagcccgcaggacacacacacacacacacacacaagctcatatcatacttctgaatgatccagaactcagctgagctacttagaaatccgttggggacagtgacctcatctttctaaaacagctttcaaaaaagtaaaacccccctactgtctacgaaaggccagttactaaaccctttgacgtttccattaaaagggaagagtactagtttggaaatagtatattgagcctaaaacatttattttagttgtcagtaatcttcagtggcaagacacaatgtgacaaacccaaaggactcttaagatctcagctctctcatttccaaaaccttggtgaaggcagaaagcagaggttttgatggagcaaatggggtttggatgatgtcatccactgtcctttgctttgtgacattctcttattaagcaaatgagccacctactaggaaccaagttctacttgaatgggagcaagacaaggtgtgtaggaaaagccaggtgagggctctacattttgcagagttcattcaatgttcttcacagctgcccccaggacagtttttttctcttgcacagagacggcaagggcttcaggacaccataaataagctgtgactttccacagtcaccaaggatgccttccaatgtgtgaagagagcagggcttgcatctgaatgccttgttgaggatgcgcttttccctcctagaaagattctttcattcatggggactggagaagaaaggaaagctgccttcaggagttaacatggccctagacagaaaggaaaagcaagcaagcaaactgatgcaggctgtctgttgacccaagaggtgggcagcacagatgtaagcagtactgtcttgtttgtcatcattaacccaggacaaggcatacctgtgtgagttgagtaccaccctttttctttttgaggagaatactacgactcaaatgcccaggtggcatctgtgacagttctaaacctcattcccctgggaagcagtctgacaactgataccttccaggatggcaatagatgggtggtgtgagttcaagacccatcgcggttagctcaggggtgcaaactggcccctttctaaggatggttcatggacaattccttgacagttgagctggcaggttttcaggcgcttgtcgcttgtcagggttcagctaaacggatgggaaccgaaagggtgcccacaatggagggggatgcttaccggctctcgaggcagggcgctcctgcacgatgcagccaagatcagcaacactagcaacatggcccggccactggccaccgcccaccaccacgcggagctggggccagaggtccagggtcctcttatccaggcgcccgccgcagttctccgggctccgcctcccacagtaccgccctgcccaagccggcgctggcctggtcccaagacagtaaagtggccgccttgtcgccctcggggctcgcgggggtaggcggggtgcgaatgactcaggcccgggaggactgaagctccagcaggcgcggggcgtgtcgagccccgcggcacaggtgtgtgccgcaggccaggtggggcgaccgcacccgcgcctggagccagacggagcagctcgcggcactcccgggacgccagttaaagagcagcgggcgaggatcagcggccactgccttctcggctctcctggctcctgtccttcgcgtcctggcccaggtgcggagttgtcccgggtgagtagctagcttttcaggtcctaggctgggtgaggacctgaagcggaggggctcaagccactgaaaccttctgggttttgagagaactagcgacaggaacttaacagttacaaggtaacagtgataggaatctccacccctggcctctcaggctttctggttaagtgtactcctatagaatgaggcctggcggttacatctggggtcccgaagctggtgtctcagcactgtgggttccgagctaaggttctgacatttggcagtgctgcttctgcctgagtgagatctgcccgactctccaccacctctcggaccttaattttgggaaggtgggccagggaccatccttttgagatgaaatggcttgagagggggatagcccagtatcatttggggttagagaaagggctacagagcctggaattctgctgcttcagcccttcctatatcgttagcagagctgggctcaccagacacgtagacagtggaattggagagagcttcaggcacaagtcctgcttctccctgctaagaggttgggtggagtcaagtggctgtatttgctgaagcccgactgggatacagactaaattcatcagtgagacagacttcaggtgaagattctggttttgattcacctggagaaggctccgtccctagcctctgttggattgcaaggaatagtttcctgagaaacttgttctggtgcctgaccaaggagattgacagaagggaggttgtagccccaccctcgcctggaactgggccatcctgggctcccactcaacctcagcgagccgttcaggctcagtggttcctgggaacaataagctttcatagcagcctttctgaccggtaaacccttgcctgctaccagggtgcaaaggtgcatgctcttggcatggagctgagcactgtgacaggaacatgcaaggccagagtacctgccctggtgggaagacaaaatggagacggccttgttttccagcttctatctgagaactttgccctatggggctgaggagccaggcagatgtttagataacaatcagtttccagttttgaaaaacagcccatggggctgtgcagagcaagtagagagcactccctctcagctgagcaagtcacagccgattgccaacacgtgtttactcggtgagtagctgagtgccagtccctgggctgctctggcagaacacagcctgctgtagtcagctcaaggcaaaaggcaaggggctttgggacagcagggatagagaggtcaggtccagggacaagtcagccatttcttggcccctgagacagaaaggcgggcaggaaagttcttgatgtcacatgcacacagaaactggagcgacctctcctgaccttggcaaggggaggtgggacaaacataaggaattgggtacttgattggcttgttttgagaaatggctcagggcagctagttgggtttcttatcccggagaagaatctggtggcaaaggagagaggaagagttgggtgaagggggtagaaaggggtggaagatatgggagaatactcaggcaaggatgccaggacagcctccgaacactgcctgagaagtgccaccaacccacctccaaggccagtgatgacaggcttagagaggacactgccctgtctctgggtcaggggcatgtatcccgtggcccatgtgcagtggaacaatatgcaagcaaggccctgcagctacagacggggttatagctgggcgaagagcctgtacctgcctgtcttcaggactctaacttgccacaagtgccctccttacccccagagtgatgcaagttgattgaacatttggcttctaagataaccagctggagtggacccacctgcttacatgcctaagcctggccaccagaggcagggccacagaagtaaagaaggcttggctatttcacatggatgtatggcaagctgctgctctcctcagagcctcagtttcctttcctgtacaattaaatgagggagccatcatagtgaagaggtgtctggaatctgacggaagcaatcttcagagactccacatgctgcccgtagtcatgcattctgtctgcagggctactagagctacttggcactgggaaccttcatgtccaggggttcaacggctgctcattaaatcccagaacaaatgaataaatgagcacgtgccttcccccaaggccatgcctgagcctgtacacctgggaagattgctttggctttcttctatcctgtaggagaaggctgtagtgtggtatggccagagcctggaggatgactctctccatcacccacacttccagcaggtctgtgtggccactgcagctgagactccaaacctccaggtttcctggctctacgactcacttgctatcacttggccatggccaaagctcttggtctcttgccacctcagtttccccaagaaactgacattacctgtcactctagcagagccatcaggaaactcagaagaaaacagagtcagaggaaagcaagttgaaaggtttaaatttgctgcgtagattttgagcaggggcgacaagacggttaaattttttttttattctaatatctccatgttctcaaatggaaaaattccctcagacctatacataagctctgctgtgtccgtcctggagagaacagggccctgagggttgttgacatgccccgaggctagcttccacccacacaggtggaattttccattttgtttttttgcaaatattaatcaagtctctgggcggttaacagtagactcattgtctcgtgaggagggagctggttctggcgaatgccagctgcctgccagggctcttggactggccctagctgggatagcagccactggagcattcctgcctctggtgctacctctgccctctgttccactccagccgcttggactccgccatgcctaatttaatgctatatttgagccagaaaccctgagagtcacccagggcttgccagtccttgatcttgagcctgggcatagaactccatatgttctttgcccagtacaaggggcataggaaaaccccagactcagccatggttatagttcagtgttaatgctaccccagccaatccaggaggtgaaaccacgtgagggcatgacctctggcatgtgacctctgtcccacagacacttgtgttgatttacgggtttatattttcacattgggacttcaaaaagtatagaccacaggagaaatggggaagccattgtctactctcagagcctcaatatagacgggagtcagccccgtgggggtgcaaggcaaccagcactgtggtggaaagagaaggcaggatgatctggggtgtggttgccaatagtcaggttaaccagtagttgatcttattattggtcgtagttgaaaggtcccgttctgtatgttgtggaagagaacacagccacatggatgaggttaagtaaggaggggctcggggttcaggccatgacccgtaaaccgagggaaatctccttgggctttgagctttgcatttttaaatattttagatttactatttccccgcaccctaaagtctcaaaatcatgaatcccctgccttagcctctccctcctaggtggcggggctataggaatgtgccactatgctctgcacagtttcctttcaccctcataaaaacaagaaactgtgaagtagacagctgcttccattttaaagacttacttattctttgtcttgtgtgtatgagattttgcccgcatgtatttatatgtactgcatgcatgcctggtgcctatggagcactggttccccctggaactggagctccgggtggttgtgagccaccatgtggatgctgggacctgaatccgggtcctctacaagaagagcaaatgctctgagccaccgagccttctctccagccccattcccagttttataagtcaagaacctgagtcccatagaagccgcctcctgagcgtggctgagctgtaatcaactcaaggatcttggccagcagttttcacttgtctgaagtatgagacttgaacatggaaccccaatgtataagacacatacaagttcatttattttataagttggtatttgcgtttttattttgcacgatattcccctccttcagaacccgaggctgtgggagctaagtgacgctaacatgatttgtttctgcaatgagtttattgatagcagttttcgtttactacggtgaagtagtcggacacctttaagctgctctcccttgctgccttggggccgcctgtggctaaagattcagaagtttagaagggggcacagtgtgtatgtacattgggggcctgatcacagctgtgaagggctggagcaggggaggtactagggacccacatcccactctcattagacttggaggtggctcggtgcgcaatggaagatagtatgcaggtgaacatgggcttcagactacataggctttatggaacatttgctcttaatgtaaccctttctaatgtaatataatgtaagcgttttagggcaaatgtttggctccagccggctaggctaagccacatacacatccctgtatgccagttagagatgaggagaggtgaaagcagagagaggcagttgaatccatgtggccatgttgggaagattgagcaaagagcccagtgactccccaacctgtcaggatgcatctatatggttattgaggacaagaaggctgcaaacagacagaagtcttgaacgggcctgaacctagaaaggaaagccgtctcaggaggcagcgatgatggagaaaacaagtgtttgtgttggatttggaaaaccctgaagtaaggttgcaacaagaagcctgcattagaaaagattctgagacccactctgtggacctgcgctgtgcacagacatattccaccaccctgtttctgctgtagaggaacaaataaatatttttaaagaaaaaaaaaaaaaaccgaatagggccagggctagaagcaagcgatcctgactaaggtgtagtctagtttgttagtgtctctcctgattctgctgttggactaaagaagcctttattgcttggggggacaacgaagtgatccagatcatggcctcacccagggacaatggcctcacccaggggtaattgccctcctctagggttgttctgccctggttggttctgctgttggtggcatctaggctaacaaacttctctctctgcctcagtcttcagcggggaccagctaggctaggtgggtggacacacctcagtcctttacatacctctgccgagtcaagcaggagcgtgacctgaggtaaacatgacacacacaggaaagcagagaagccaggttttcatcctgcctttaactgtcctgtgagcccaagggggtgtgaatcctttgtactgagagtcatttccacagtgcctgctgcctttcttaatgaactaacgggtttggggaggctccagcgtgcagggtgcagtttctaacgagctcgaacttcctgtggtgaatgagtaggtcttcacttacttattttcagactcttttcatttctcacgggccgatcttaaaacacactgaaaatcaatcccagtaacaaaggaagccacacatagccccgtccgttgcaagacaagaggcaaggtcactgaaccagatacctggagaagtgtctcaactctgccttccctctggacttctctttcacagaaaatcaggatagtgtgcggccgggccgtactgcatccagttacttgcactgtgaggtgagggctgactgagaaacttttctgacttgaaaagacagttgcagcaaagtgtctacagaaggcctcaggctctggaccgagtgagcagggtctgtccagtgccttcagcttgtcctctagcctggaccaggcctctgccttggtgctttctgtccctcccttgtgggtgatatttgagattctcagtcaactgtggttgaaatcctccctgccatggaaatttgaaagtatatgcaaatttagctagaggaaccaaggtgggaactcctggtctgttcccttgtttgagtttcctgccctcctagcacctgtggggaaccctgtcctttttttctttcattctagtctttgtatactctttacaaaattcctaatctgcaatgtaaatgtcatgtaaatacagtattgaggaaataaagacatgtgagtagttttttctgacaggtttttttttttttgtttctttttgttttttgtttttttctgaaaaagtgctcatgagcatcccccaagaccactgcacatcacatctaacagacaagggtttcttatcttcctcagagctgaattctagtccccaggatctagctaagagccagatacaagcatacctacctcttatttctctcacaaactgcagatctgcccctaccctgccctcccaccccacccccccatgtttatttatttgagtttatttttaagaaatgtgtgtgatttccccacatggattctgtgcacagtggcccttaaatgtcctctgttttctttattttctgtgcttgacgggcaatgcacgatgggcatatctgaaaacgcgatgtcaccccagctttggtgttaattagcatcacggtattttaggcagggtatttcccaggtggcattgcagccttctgtttagactctatccccagatgaggagaggagtccttgcctctccgtcatctcctttacatgatgtcaccttggtgagatccaagctgacccttaacctgtttcttttcctactacttctgctcccaggaacccctcattcttgggacgctccagcagccactatggagaatgtggtggggagagcagtggcgcggtgaggacattgttagggcagggtagggaggcttctagggaaggagctatggagcctgagcagacagggtctgcggggtaggcagaatggatgcccatcacttaggagaaggcagtgctcctccgtaccatggcttccacgcccaccccttcctacttttatagcatgtcttactctctacctgcttctgacagccttaggcaacgaggaatcattgctattggtaaattaaacaacctcccatctccatgctggtccctgctgggtgcagcttgataactcaagcccaccaggctgccagtctttttgcagctctgatgcctgtgctgggcccatcacaagatgcccctgaggagttgttcattttcctcttgtctccctgtgactgcacaagagcccagacactgagacccacgcttgctcagttggggccactgtaccaagtcccatctgctctgaggtcctcctggctgttctgtccactcacccatgtacagtgcagcagagcacagcccctacaggaacaatatatcccctggtttacagtataatggctgcttttctcatggctgtgaccaaattcccaacagaaacaactttagagtggagaggtttgttttgatctgtagtctgttacagtgggaaggctggatggccgagtgggtcaattactggataccagagcttgtagtaatggttttgtgcaagttgccaacaaaagatgccatcaggcacagtgggctgggctataacctcacggtccatacccagtaacttattgcccagtctccctatcccaaaggtttcgcaacctcctaaggcagccaggaactaagtgttgagtcacatgagcccaccgcgggtagttcacattcacactggaaaaggcaagagggcttatagcccacattaactccccagggctccccaccttctgcttccatggagatcagctagagagcagggataggcacagagggcagattcttgaatacagaagccagtgtgtcacctgaactggagcaggtgctatgggagggagatgggagatgggagatggtggcattcattccaagaagcgtcaaggcagggagcatctatctgtctctgaaatcatcagcatataggtttctctgaagttgtcagcatataggtgtccagctgggaagcactggctcaggtcatgctccaagggcaaggccctgggacatgtgatatcatccttgaagacccccagctcttaagggttttcttagcagcctctgctccgtgtacaaaataagtggacgtggacaatgaaagagcaggcaccgttcagaatggcgagaacagactttattggtgtgagaggttggtgccattttatggccctcattttggggtagggaatttcccttaccccattttgtcccatccaaagtgtcttcaccaacagaaccagagagtatgctgcctgtgccaccagggacaagaggacacagccttgttctgtgtgtccagacatcgtctctcagaggctgagtatctcgctattgtgggagatgagactctctgctgcagctgtctactacgtgactgtggagagaaagagaaatttaagagaattatggtcctatgttgatgatataagaaaaggacaggaaatagatttttgaagaaagtgtcttaagttttattaacggttaattctgctcatttgccaagacatttatttacatagcctgacctcaaactctccatgaaccccactggcattaattagggtgcccaggatattcagtgaagaacatgttatagtagctttgatctgagtacgtctaggtagccatgagcaggttatgatctagaacttcctgggttcctactgcctggtacttcctgtctgtcatagcacagatgcataggcttggcctgatatctcagacagccaggggaaatgggctataggccatgtgcagatctatccttgagtgagtgtatctctgcagccagtatgacagagcacagcctctaagctaggctcggcatatggaaagtgggactcagcaaagtccctggtgaacgtggtcagtatagactaaggcttctctacaaagctgatatttgagtgaggccagaggacagggaggagtgacccagttgaacagaaaccgagacaagtacctggaagaaagagcgatgcatgtcagggtcgagtacgtgaacttggaactaaggagcagcccagggcggggtaggatcagacaagcagagaccagccaggcaggcttaggaacaacagggcctctgaggccattaggaagctcttcctggtcttttagggagttgggttgccagggatggagctaacagtgagattcctattagaaccactagacagaccacaagtctcagctcttagattgagactccaagctgggctgtccctgcacttaaccagaaactatcggtctggcgttgaggtagtggtgccgtcagccaggatctgttgggctgtaggaaagcagccaaacctttgccaactctttgacctccttggctctggcatgggtgtttggtgcctcatgcccagcccatgtccagattgttaccttttggctgcctcagtgcagcttagttggtagggactgtggtgggggcgggtagtcctctgacttgatgtcttggggcttgtccagagacccaggacctcttcaggtagtaattgtgaagatcctcacagatccctgtccctctgggggacttaatggcataccccatgcccagtgctcagcagaggcaactgtgtctctggtcagttcgatgcatggtatggtgttcctgcgtgatgacgtagaggctcttcttcttggcacaaatccactctcagttggcaccctcatctgggtcctctggaaatggctaatcaaaacctgcactagaaggccaggtgacaaagttcatttgatctaccccaatccttgagttctgagaatgactctgcagtttgtcaagggtggctgtggcctccagcatgggcttagttgctgccctgaggatctacgtcctaggagcaaggacaggtttgaaggccaaatagccttgaacagtgctgggactcccttggaagcgacatttctgggccttgaaacccttgagtcgctgagctctggactcaagtctacctgagcctgtctaaggtgctggggccatgtggtcactatttaaatgggtcacaggacccttttgtatagatggacacacttcttagtaagcagaggcttgctggtaagttttgaggtcgtagtttctctgtggtgttaatgacccaggaccgacccctggtgcttttggtctagctgttccttttcaattcctggaagtgaggtgcctgagacccaggacctcaagatcccagtgttcccattatctcctggaaagacttactgctccccaactaggcccagtgcaggcaaatccagatttgtcaaggagcccaaattcctcaggctgaaacaaccctatgcttggctaggttgtgggcatggctgagtgcgcccagcattcttcaaagctagctctttttttggatgactgcaaaccaggagctctggggtccatgggtctgacattagtatagtatgtacttgttatgtactgggagaatatttggacgcgtgcgcgcgcacacacacacacatacacacacaaacacacacacacacacacaaaagggggtgctgttcaaaaggtctttcaaatggtttccagagttccagctgcacagctccaaagacagattgtatccgaagtaagagactcctgaaatagtgggtaagcactttgttctggctcctttataacttaacaccaccccaaaattgccagatgtgtgtggctggtcactgacttaaaaccacaagcaacccgaatgttctcaccacgaagttgcacatactttctgatgcccaatttcagttgccagatgtaaagtcttagaggcctgtgatagcaaccgcaacagcaaaacagcagggggtggtggccctgggtttgggattctccatttaatgtcctctcaggatttgatttgtataccacatgtggaccagaccctaactcacctgagttggtggcaagggtgtcatggtagagcagttgaggacttgtaggtggtgggggatatgtttctgcaatgccgggggcaaaggaaaggaagggaaactgaaccctgagagggaaaagcttctgtcttctcatctcctcagcaggccacacctcctggtgaaaggctcctagtgctgtcctttgtctcaggccttggaactggttgcctggattaggaaataaagcacagcagatgcagattggaagcttggggtcgcatttgctgcccagagaaaccgctgttctcagtctcttggtttgactagatggtttgatttggctgtttgacgtctttatggcagtgctcggctgtgtactctaagccagcctggggccgccagcctggggccagtaagtttagcggtatcctgaactctttagaccttgcttatccaactaccagtcactttacagcacccacccccagggattgtggggctctgcatttgttttattggtctggtctggtttttgtttttgtttgtttgtttgtttggtgagggatgggagtggctttaatctaattcttaaatttactgtgttactttagcatcacaggccatttccacagttcttcagctaaccagacagacgcttcgctcccctattaaacagtttgttttctctgccgacagactgacctattcttcgctatctggtttatttcacttatcataatggcttcacgtttcagttacaatttagcttgtttcacattccattcctttctaaagatgaataagagtccattgtctttatgtaccctgcttcacttatctgttcatcagaacatgcaggttggcatcttcccacctggctattgtgattagtgcagccacagccctggtgtggcattgccaggcagtgccgggggtgggggggggtctgcctttcatcccttctgggaatacctacagggtaggattactggaccatgtagtaactcttaactttttgaaaatcttccagcttgtacccccggtggctaacatttgactctttttcagcagtgtacaaaggctgtcaacttctggacatccttggcaactcctgctatttcccatcagtttccattccaggcgtaccggtgggtacagggtggtatttctttgtggctttgatttggctttctctaatgactggtgggggcttaagcatctttttgtgctccaccacatcttctttagaaagcctgtctactgaagagctcttctgtctgtgtccattaggattttgctggtgttaagttccaggatccattgtgcatcctggatattagtacctggtcaaacaggaggctggcaggtgctttccactcagtgggcttgtcatttcgcttagattttggtttttgaaacagtgtctttcagtgtagccctggacctctacatagatcaggtcggcctcacacagtgacctgtttccaccgtactcagcttgtggcttcactcttgctagtgcccttcgatgcgtgaaagtgttaacatttgtggaaccgaaattcatctatattttttcttttattacctgtaattttggtatggcatctgagacactatttccaaatctaatgtcatgaggattctccccatgttttcatcagagtttttttttaattaatgtgtgtgtatgtggtatattcacatgtgcatggtcatgtgagtgcacatgtgtatggctgtgcatgcatgaggtcagaggtcaatatcaggtgtcttctatacctctgcatcttatttatttacataggctactccaaactttagagctctgcctgccctctatgtcctgagtgctagaattaaaggcgtgtgctacctcatcagattctaatgtttgagctagggtttcttattgagcatagagccccttgttcagctgggctggtttgccatcaaggcccagggaccctcctatttctggcttcccagcagtgagagcatatacacgcagtgccgtgtgtgtgtgtgtgtgtgtgtgtgtgtgtgtgtgtgtgtgtgtgtgtgagttcatagtcactgaataagaacatcactcttcaccttttccccctgaaaaaggtgaccaagagctaggaaggagagtggtcagcagagttccataatcctttctccacgttccatagctctgggtcacagccctgtgtgtagccaaggccagttcttacatgtgttctccagacttgagttcaggccctaacggttgtgtagtaagcacgttacttacttgagccatccccccagcccctgccacatggccttttacataggttctggggaccctcaactcagagcctcaggctggcacagcaaccactttcctgactgaacatctccccagcctcttgggctgacttttgactgtggcaaagcaaaggtacaagttcatgctgtagcctgtggctcgcttcccaggtggcgtttgctaagaagacctctgtttcctctttgagcgatttaggctgcggttgaaaaccagttgggccatctatgcaaggactcgtttctgcattattgcattagttcaaatgtcttctgacaccactgcagtttccgcaactatggagttgcagtaattgtagaatccagaactgtgagtcttctagttttgttattcttcctggggttttggttcggtgttttttgttattgtgtttctgatgtgtttctaaaaagataaagaactatgagatgtgttctatgagggtgaagtgcaggggaagggggtgcctcagtgggtccatgccaaggcatcccttccccttgagggaccaaccacatggtgggatagtatagaacagagtttattcagagcatggggaggggagctaagagggtagtagaggcagaaaaaggcagagagggggagagagtagagaagtagaggctggccatggccatgagctcatggagagagggggaagggaatgggaatggggaaggggagagcgagagcaggagagaagcaagagatcaagagagggaggagggggcaagcagccccttttatagtgggccaggcctatctggctgttgccaggtaattgtggggaggaccatacctggctattgccaggtgattggggggtggagtctagacagaatgctaacagtttctgcttggagtcccttgagatcccatataatttcttaaatgaatcttcctttttttcccttcgttattattattttattctttcatgtatgtacatgtaccactgtgttcatgtgaaggctagaggacaacttgtgggagtcacttctctgttttccacatgtaaatcctgggctcaaacttggattgttaggcttggtagcaagcacctttacctgtagccatctcactaaccccccaaatgaggttttctacagaaaaaagaaatgccattggcatgcggtagaagttgtgtaggaactaccatcttatcggtagtacaggtatcttgacaacagtaattcttccaatctatgaatgtaggaatttttttctattttttataccatttttggtatttttttaagcgacatttttatagttttcgatagccagtgtgacgattaatcctgacagcctgacaggattcagaatctttcagaggccacggttctggttgtattggagggggcatttctagaaatttgacagggaggcaggagcatctgccttaaatgtgggtgggtcgatgtcacaagccagccctagactgaacaagaaaagatcggtggaggccagcattcatttctttctgctgcccaagtataattgcaacctgacagccagtcacacccctgcctgagttcagtcccttttatgatagactgtatcccctcaagccgagaggcaaaataacaaacaaacaggcattttgttacagaaaggataaagtaaactaatacaatgttgcttttaaacctttggttaaatttaggcctaatcttttgttttctgtgtctctctgtctctgactttctctgtctgtctgtcactctctgtctctctctctctgtctctctctctctgtctctctctctctctctctctctgtctctgtctctctctccctctctctctctctctctctctctctctctctctctctctctctctctctctctctctctctctgtgtgtgtgtgtgtgtgtaattgttttggcaagaacttgccatactgtgtagcttctgttcttagttgagaaattctcttgctgtcagtattgagcacaacacaaagcttacctattccgctgcttctctttgagccagcttttatcttcagcagtttcctccattgtttttctctatctctgcttagatctctagtgtttccttccctctgctagccttggtttagtttgttctattttctagttgttcacaggataacgatcttccctctgaaggtgcagctctgaatggcctgataaaactgctttcaccacgttgcataagtcgtggtgtctcgtgtgttctctttcgttcctttcacgggtttctaacttcctctgtgatttttttctctgacacattggggttttggaggcattaatttcatattttttgtgagttttcttctgcagattgattcctagttttgttccactgtggtccaaatagactcctggtatgttttctgtcttaaagatttataatctgtcctggagtttggtttgtgtacacttgaggaaaaatgtgtttctgttgctgggttgagtacttggtatatatctgttctgtccgattggttcatgggggttttccctctattaccttattaatctatcatcattgaactctgaacattgaagtcttcagttattgttcaactatttccccttcaaatctgtcagtttttgcttcataaatcctagaactttcatgcatgtatgaattgcatgctttaaaattcattcaggctacaagcgcctgaggctttcttcctatattatgactacgcttttaggatctatccacactgatctgagatgctgtggttcatccagtgatatgtgggattattcctcctcctcctcctcctcctcctcctcctcctcctcttcctcctccttcttttcctcctcctcttctcctcctcttcctcctcctcctcctctttcccctcgccttcttccccttccccctttccccttccctcctccttctcctctttgcctcctccttcccctccctctcttttcccctctttttcttcctctttcctttccttccctcccatcttgtttcatcctttctctctcttttctgagacagcttctatgtagcccataccggccttaaaattgtgtcctcctgcctcagtctcccaggtgctagaattacaagcatatgccaccaggctcacagttcttcacgtgactctactacactactcctgcagctgctctggccataagtatacagtggagtctcacttagttttcattgtggctcagtcttggcatgctctggacagcttctcttcaaatgcttaagagccaggtgtgagtatcttctttgctaagtgtctgttaatgtctttgactcacttggtaatcaggacgtttgttaggtatacttagcagtttagtttatgatgtgtgtattttatgtgacagtccttcatctcaagtgcagtcagtggcttgtcctttctttctcttgacagtatcttagtagacttttttaattttgatgagatctggtttaccagtttttagctttgtgtttagtttttgcctttggcgctctattttaggaagtcattgtcagccaccccacacacacattgggctttcctattgtgctcttgaattttattttttattttttatttatttttttaatatgctttgtgttttagacttgggtttgggatccattttgaactttgaagctatgtccaagtctagcttctcttgtgtgtttcagtggctctggtaccctctgttgaaaaggccatttctgctccatcccactgctttgttggcctatttacatgacttagcttctgagctctgccctgctctgttgatggctgcctgtttctttgacggtggttccagcaagcctggagattgaataatgccagccctataacttaatattctttgaacattgcattggcttttttgaggtcttttgtgtctgcatataaattttggatcaggttattaatacttacaaatcttgctggggtacttaaagggattgcactgattcataagttaaatggtaaagaataaagacagaattgaatctccctacccacaaataaagaatatcaccccgtgtagctaggttttctttggtgattttctgtagggtttggtagatgtccaactgcaaaggtgttttgatttattccttctcactgggcacattcaattcagtggaactgtgtctccccttcagtggcccatgctccctgctggcatttcggagtgtgactgatactcgcaccttgactctgtctcccgaggtccccctggagctgcttgttaggtccagggacctttttggtcagtttttttttttttttcagatttcctacacagatgatcttgttggccagaagcattcatgtccaacccccatgccttttgagtttcctccatttgactgttaagttaagctgcaatgtccaatgtgatgttagaatcgatttgccttgctcctggttttggtgggaaagtgtctgcattccttgccacgacagaggttttgtagataacctttatcatgttgggcagcagaaaggtactttaaaaaattttttgcccaatgctttctctgtacctcttatttcttcacctcatgataattttctttgtttcttcctccctttcttttattttccattttttttccagacagagtctcactatgttcaacctggaatttgctatgtgaacaagactgattttgaattcacagagatccactcgcctctgcctcaaaagtactgggattagaggtgattggcagttttaatagtgtttcagaacaacaacaacaacagaaatcacataactacttatatgttttaaatctggtagaaggcataagaaagaggttgtcaacagggaaaataagttttttttctatatgcctaaatagatcgcctaaaatatctgcaaagttcaacctagtggtagtagtgttgtttttttacttgaaatgacaatttgcaaaaatggaaaattaagagactttctattattgttgttgttgttgttattattattagagagatgatagagtgtaagttggcctggctagagatactcagtgagaaaaatggagccctctgactctcaggcaggtgtccctgtgccctccccactgggtggcgctgctgtgctcgcctcactgggtgctcactgggtgctctctcttccatgtgcacttctcttttcttattcttttttttcttttttcaagtctatccagtctctttgaagcttttgtttggttgtcagtgactttaagaagccaacattggggttttctttaccatcactggcaacacagtcctgcagtagatcccttgcagtcgagtgtctctccagtacacttcatttcagtgcatggacaccgtctctcatctctgctattagctccaaggggtgcctcgatggccctgagacctcaggaggaagtgaacttgaattgattccaggaagaccaagcaaggggcagtctccctctgtgcaggcgtgaccccacttgacatttaatacacctcacattttgaacctgagtaccgatgcgccaatgggctgatttctgatctttgtgtcatctttggtttattgttctcctggagttcttttctgtcactcatatttgtattctgtatcttctcccattccttctctctctttgccttctttaactcctggtggggtggcatgcgtgaccttcaggccactcctcaccagctccttccctgtaagcagtcttccagcacaaggtgcttgctctctgaggtagtaccgcctgaatctgtttccttttgtcatgtgatcttttctcttctgccatccacactttcttgatattggatttggacgcaggaagaaagtccttttctgcacatgaaatgcgtgaatgcttatcctattttggagtctgaggtagggagaccagcctgtaggtctcggagggaatgtacacaaacccagagccccatgaactgattttcacatgtgaaatgtttcacacgatgaacacccggggaccaaactgcttgaatgtggtacataagtttgtttgtttatttttatgtagaactagaatcaaaactctaaaaacattttaaatttatttgtgtgtgtgtgtgtttgtgtgatatgcaagtgtaacacagaatgttgtggcatgtgtgtggaggtcagaggacagttggtggggaaatagttctctcctagcatgtggcctccaaggtctgaatacaggccatcatcctggagagcaggtaattattaccttctgaacctgctgctacaaactatctggatttgagttctaaaatttagttgagagatttttcttgtctggccaccttcccctcctacccccagctgtactggccctctgtgagacccatcccaggatgcttattcatctttgttcataagcgatactgatctatagttctcttttctttgatgtttttgtctgtctggttttggttttagtgtggtgctggccttttagatcgggtaaagacatgttctctgcttcttctgacagagactagagagaatcagggagtgctcacccttaggtgtttgggagaactctcctggcacccatctctcagggtttgctactttgttttggactgttgttattttctatgtatattggctcatcctagcatcttgtttcttctcacaaggtgtgtgtgcattttggcacactgtatctttggtggaaccgatctatttgtgtctagttctcctgcttggactccacttacccacactttagcatgatggtctaaaagctccccaagtccccattcttctcctccgtccctttttctcttctcccttcacattttcatctagaaacagctcttcccctaatcttcaatgtcactgctctcctcctgttatagctaatcaaaactcctttgtcctagcatcggactttttcttgcatttttttgctttttaaatcagatcgatcatttccaatttttctattgatttattagttgggtgtgagggtatacaatggcacagtatggacatggaggtcacaaggcaacttttgagagctggggacctctccttccatatatttgaggcagggtctctctggtttctgccatacatgaactctaggctggttggcccacaaacttctggatgagtctcccgtctctatctctcatctcactgtaggagtgcgggcttttatttacatgggtcctagtgattaaactggggtcctcaggcttatgaaataagtgcccttgcccacagagtcacctttgcagaccactgatgcctacttgaaagtcccttcaacatgtcctcttgtcaacgaaatcatttctagtagctgtgaccttgactttgagtctttgtctgatagttacaacacctgggggctctggttctgttgcttgctttctctctttgtaaagagtgtatttgtgtgtttccaaattataatggaatactgacgtgtgtagcagtctaatggagatgggtaatggcgtcctcttacaaaggccgcaactatcctgggagggcattgggggaagtgagtccatccccgggagagcagagcatgggcattgctaccctggagctgggggtggaggggactctctgcagaattcttgctccagaaggccctaccactttttgtcaaaggccctggttactgatacaggactgagggaaagctaagggggatttgccatcatctgcatctgggcaggccaaagttgacaagggacttttcagtcctttcatttcagcttcagggtagactagaggttgttgttggggttgcggggttcagctgctcttgtcctcacgaggtcagtggcatactgaggctgttctcaacctttgcaccaagcatgtgggacattggtgagagaagacccatcaaaagtcattggcatatataggtctgagcaggtcgctttccataatcacatatatttacacgtaacaactattgaagaaaaagaggctatgactttgaaagagagtgagatggggtaccggggtgggggaggggggagggaaagatctcaaaagcaaaaacaaatcaacattatttttaggccattggcatttctctgtcaaagctaccgctttacaagttgaccttgcaaagcatggctgtgaccctgtgtcctagtgcgtcctgggatctctcaggctatgagctcccaagtcttagtccctcagcctactttgtccctctccatctggagagcttttctatttttttttctttcttgtgcattcctgtaataaaatgcagcatcctgcctgaagtaaggagaatagccccttgttggtcaggctggaaagccttcctcccgtttagcagctagatgcccagtctccaagttcctatggccatctcaggaaagttgtccagggaacaacttccaagcctgtggaggggcctcccctcttccccaacgcccattctggactactatctccatgataaaatctctacttcaggttctacctccccagggcagtggctatcatgcgccatggccttgcccaagctaggcataaccaaccagctccaggctgcttctacatatgcagtggagttgagagtcttaaaaccatgtttcctgttctaggaaaagactcttccaactcctgtcggtggatagaggaactgggctggaagcatgtggcaggtccttagaggctggaggaaaggatggcagagcccacgtggagccctggcatgggctgtgcagggccagccatgccccccttgcagccgcgctgttgccagtgtgggcaaggatgagtacacctttgtggtggtgggcgcaggctctgctggctgtgtgctggctagtcggctcaccgaggacccgaatcatcgggtgctgctgctagaggcaggacctaaggacttgttgatggggagcaagcggcttcagtggaagatccacatgccggctgcccttgtgtccaacctgtgtgatgacaaatacaactggtactatcacactgagcctcagcccggcatggacagtcgcgtgctgtactggccacgaggccgggtctggggtggctcctcatccctcaatgccatggtctacatccgaggacacgccgaggactataaccgctggcaccgtgaaggtgctgagggttgggactatgcacactgcctgccctacttccgcaaggcgcagagacatgagctgggtgccaatatgtaccgcggtggggatggcccactgcatgtgtctcggggcaagaccaaccacccgcttcaccaggccttcctgcaggcagcacgtcaggctggctaccccttcactgaagacatgaatggcttccaacaggagggcttcggctggatggacatgactgtccaccaaggtaccgatttaaaaaatttaatggatacgagtacactgtagctctcttcagacacaccagaaaagggcaccggatccattacagatggttgtgagccaccatgtggttgctgggaattgaactcaggacctctggaagagcagtcagtgctcttaacaaatgagccatctctctagcccccagggtactgatttttaatagcccccacctctaattataggcatccttcctgactccatcatggtcagtaagcaaatcagcatggtgtttggtgagagggagatactatatacggcccctaggtatcacaggatacaacccaatacttgggtattcactgtgcctctaggtcatgcagtatagcagaggtgactttagagttcccaggggcctgtccagcctggatagggcagccaaaccctatagtcacagatctaggaagctgagaggggtagggacttcagtcctgtggtacctgtagccagggaaaacacagtggaccccactaggggtagtggttggaggggaggggctgtggaagagtgaaggaacagctctgtgtaatgaataacgcatggcgttatagagacttgcagatgagcaagctgaggcagaaagagacagcacaagaccatcgtgtcccagctatcacctcttggtagatggatgcaggtagacagacagcaggtagcacgggacccttgcacacagcaggatagagcaaaccatggggctctcaatagtttggactgcagggtaggctatccaggtcacagacatacctttgaaggtgggccttgcattgtcaagggagggctagatttgctttccccagtagtttcgtgtccaggcacgaggggagggcagcaggccatggctgacctcgctccatcctgcaggtaagcgctggagcacagcctgcgcctacttgcacccggtgctgagccgccccaacctcagggccgaggtccagacacttgtaagcagagtgctgtttgagggcacccgtgcagtaggtgtggagtacatcaaggacggccagagacacaaggtgagttgacttcctgtggaacgtgtggggactgaagagggcaggaaggggacaggcaatcaggctcttgctcctgtcccacgtgctcttgttcctaggatgagttgacagccagtagcagtggcaggcttgtccctggggtcccacaggatgtagaggtcagaagacctcaactcctgccacccgcagactccatggtcccttgtgcctccgtaagcctctgcctgtcacatctacccccacgagagtcctctagtatatggtttcagggtctggcctgccagaaaccattaaatcaaccctagaagtttaaaaatccacaaatggaatcatatttggtgcttttcttcacttggcgatatgtcagagatggccttcccccgccttcccttctcaggagatctatttgtgtgcttgcttcaaatcactgaagtgtatgctatcatctacttgagctctacccccaccccccatttccaaggcccccgttactgttacagctgttacttagagtcacccatggggactctgtgcggatcatttttaagtagccctccagccggccccctcctctgttctctatctaggatctgagaacagattctccacagtggtgtaatttccaaaggcccagcaatggctggaactgggtgcctctccacggggcagtcaaacagctggcttttcaggaagtgtgattggtcgagctctgcctcttccaggcttacgtcagcagggaggtgatcctgagcgggggagccatcaactctccacagctgctcatgctctctggcgttggcaatgcagatgacctcaggaaactggatatccctgtggtgtgccacctgcctggtgagtctgactgctgcccggaaggtagctctgtccaacctagcagcctgttgcttgaagtggcggtgggatacttcttgaaggtgtcacatccttccttcctatacatctgagggcatctgggtctcactggagaaccccaggtctttatgctattttccttcaccctccctcaggcagcttctgcaccctttaggagagcatcctgtagcaggcatggggctgagattaccaccaggatggggttgtggtgtgagagatctatcctaagatttaccagttgctctaagcacaaatgaggccaacctatggctccagagcaagccactgttcaggtgaagatccaagcttcatcttagaaagggtgtgttgtgtccctgagggctggcctttctcgggaagctttcctggaggcctatggaagcagtctgtgtcctgactgcccagtgtacccttgatcttgcatgagcttgagtagggtctgttgggactgcctctcccttaacaggctgggggagacgatggagctgacaagtgtcaacctggccagcacacacacagtgacacttcccaagtacctgttgtaactgtgggccctgtccttggagggcgctgctgaggagggctgaccaagggcacctgagtgattgctgtagagagagtgacagagtgggtggttttagcagcattggagaaagagccagacttgtctaagagagcaaaagacatgtctcagggaaacaacttccaagctgggggccagggcaggcaggaagacaaagcggactagagagaagcttccaaagccaggggttcacccctgtgtcagccattttcctaacccttccttcctgtgccaggagttgggcagaacctgcaggaccacctggaggtctacgttcagcaagcgtgcacacagcccatcaccctccactctgcccagaagcctctgcggaaggtctgcatcggcctggagtggctctggagctacacaggtgggggctgcctcctggggtacttggtggctacggtctgtgggcatcgtggttttcttcctgaagagccaagacgggcctcaggttgctaggtataaagccagttgacaacccaagccaatttttccactctgtgaggtgagggcacaaaggtcctgtctggcaggtctctgcaagggtacaagaggcagtagtagcacacgtcgagggactgagcacaggaccttgctcgaggtgacgctcactgagcagcaagacgaagggcacataacacaagtggccttggcagacctgacgcccctcgcttagcatggagctagtgtttttaaagttgtaacgctgggtatggctgcccggggaatgaaggaaggttatggacgaacctggtgccgagccccgaggccaggaagatagacacaggggagaagagggacaccgggcagagctgggccatctgctgtaccctgaccagctcttctgccttgtcctcatgtgaccttcaggggacggagccacagcccatcttgagaccggagggttcatccgcagccgacctggggtccctcatccggacatccagttccacttcctgccatcgcaagtgattgaccatgggcggaaacccacccagcaggaagcttaccaggtatgcagccagccatggccagagactctgcctccatgctcctgcattagaatagatgttcctgatgttatctatcccaccatggagacctccgtttagtactctgcccacaatgcctactgtctgactggaggaggaaagggagccctaaccttactcaccccagggagtgagcccaggggtcggcccacaggatgtgtgtgtgtgtgtgtgggggggggaggacctgttacagtgacttcctcagcccggggatcgtcccatgaacgtttcagacaaaggagtaaaggccagacaggatggaggtctgtacactaaatgctgagtgcccacccacagggaacctggggctcctctaagtgtctgagctgtagctaatggagattactgtgaactgttacctctgaacccttctaggtgcacgtgggaaccatgagggccacaagtgtgggctggctgaaactgagaagtgccaacccccgggaccaccctgtgatccatcccaactacttgtcaacaggtaacaacacagacgctactttggtatcccctgggcctgccatcgagttagggaatgttaataaggttccgtttgtccctcacccttactctggatcctactgcttaacactcgggttgccctcagttctaggtcacacaaggtagcctgggcctcacagcacagcaggatagaggtaccactttcaggcccgtctgtaggaggaacaattgccaggcctgtgcatactacctgcctggccttccctgccagagagcacgctgtattcccaagcctgcctctttgcacgcaccacagagactcatgcctcatgatcaaggtcttacctcccaggaacatggcagtagagatagactatacatctctacccctggcttacagagatgccagacctcagacacaaacctggcactgtttgtctaagatacctggttgccactaactgcctctgggcaggtaacaaagcacttgtagcttggttctccatgtccctgacctttgtcccctggtttggccagcagagtaagagaaggggacctcacttatttctcctccacagaaaccgatgtcgaggacttccgtcagtgtgtgaggctgtcacgagaaatttttgcccaggaagccttggctccatttcggggaaaagagctgcagcccggaagccacgtccagtcagacaaagagatagatgcctttgtgcgggcaaaagcagacagtgcttaccacccctcgtgcacctgtaagatgggccggtcctctgaccccactgccgtggttgacgcgcaaaccaaggtcatcggcgtagaaaacctcagggtcgttgatgcctccatcatgcccagcgtggtcagcggcaacctgaacgctcccacggtaatgattgcagagaaagcagccgacattattaagggacaccctgcacttgaggacaagaatgttcctgtctacaagccccagactctggacacccagcgttaagacagacagccattgcctgaggacgacagaggaactcaggccaagccaagagatccagccagtacagccctgccctagatatttctgaaccggtatatagacactcgggacccagataccccgactcttggctcagactttcatggtttctgaggaaatgaggtcatggtaggcagtgaggcaagtcccttttcccagtgtctctctgatgcccctccacaaaaagcctagcaagcaagctggggccctccccctggctgcctgcgggtagcaggtggggtagctaacatggttttcttgtctccagttcagagctctgcttccaggaaggactgggatgatcctttccctggtctcccacctgaggccattcctgcaaagtcagggtggttgaactggactgggctctccaaggaagcttttgctgaagccaagaggcaggtagcagctcagctgggctggttacctgagcttatgtccccaattagagggacaggcagcagctagaggacgcctcatccccctctgcacttctctcctgccctgatttaaatctgaagagcgaggcacagggacgagggctcaggtgactgcacaactcaacgcctaccactctggctctcatgaaaccgtccaggtgagaggcttgcaggacgttgttcaagaaaaggccattttggcctcactgccaaaggttttattgtttaacccttaccacacaaaagtgcaggagtatagagccagtcccacatgccagtcactacctcatgccaaggacatgagcccacgaggtcctttcatggtggccccagaaatggcccaggcaccagagctacttctgcagacagggctggccgtttcttattctctagacgtgagaacagagagcatggcaccaaggctgatggagaacagcaaaggactttggagtgaaagataaaccagctagaattcgagtcttgggtcaggggagcagataccagcagcatttacaagagctctttgatctggaaattcctcataaatttggatgtaaccggtaacttaatttttgagccaagctgcctcattccaactgttcttatgagagaatgggggtcagacgcattgtaggttagttttcctgaagatgtccaaagccatcatctgtagtcgggaagaaagggatcgctgtatagaaatcacatggctgagtgaagaagagagaggaaatagcaggattccagggtcccctagggttgactggcaggagctgccttctggacttctgagtctgagaagacccttcaaagggttcaaaaaacaaattataaaccaacacttttactttgaaaacaaggttgcccttatttcatcttacctgctttgccttttgttttttgtttttttgttttgttttttcctgttcaaaaagaagatcaaggaaatcctaggtctgccaagagatcctcacagggcaggtgttagacggccgtcatccgtagcatctttagcagcacaggtgtcacccctgggagggccatgttctcctctcaggctcagcggcgtttgagaataagcgaagatcaacctggcgtgcccctcagttgcagtcgggcctttctctcacttcggcatagggaggctggcttcacgtgctgacatgatttagccacataaggaaacgagtttcccgagacaagaagtcgatgttacgtgcccagaactcacagatggcgacatcgggacagaacatgaggtttggagggatcctcgctgaagccccgacagctattccaggttccagcccaaacagaacggatgaacacgcaggagagtcttgcctgcagtgctgaatccacatgctggggttgtctggaagtcccagtgccacaagggagacagagtggtagaatggtgcagtcctgcttccgttctaaagtggggttcacacaggcagttaagactgagtctcctggggaaactggaaaggcttagttaagtaggctccttggcaaagagcctgtaataccccaatcatggaaggccacatgttgccaaaaccagtacctgcacacctagcaagcatgtgccccagggttgacccctagcaccaaaaagaactgtggggagccctgctgtgttgatgggacttgggcccacctcactgttggccaagtgtgttcctgacagggtcacagatcatggatggagacagggacaacttgccagcatgaccagacacagtcatagaagcagaaggtggggacactgtaacacatgagccctgcctcatttccatacattcaaatagattcttctcacccaccatactacatccctcaggccccaagatttttcatatttccacttataaactaccacaatatcaaacctaatgcaaagattttaatcttcaaatttggaggggggcggggaaaacatgacctacctcctaggcccaagctggtgacctgcgaagcccctgctggctgggctgttgtatattcaaccacactcttcacccttgttctgaaatcagaagccagagaccgagcctctccctaggtctccactgccctctgggaaagcacagctggagtgggttttgtgagaggtgcccatgatttggtggtgtttgtacaagtaaaccaacactccatcctccccaagtaaaggcagagctgataaagatcgtagatagtaaaaagcacacagcacaaaatagagccgatctggcttaagagctggaccactgtgaagtgggtagtgcaccccagctatgctctcttcaagtggctagggctacaccctcaaccttctagaactatggagcacaagtccacatacctcacagaccatcccaaatgaggttcttgctgacggtgagcagatcatagtgacttccaccttttaatgtcattaaaagcaggagcttaaactaaaagcagcattccaaagacctcaatatcaggggggggtggggcagggtaggaaaaccaaaaagcagaactatttagtcttaaaacttccttaaaggggaggaaaaaaccatgctctacaacttcaaatttttcttacaaagagaaatttaatattaaatgagaggttgaaccaggcttaaagcagacataccgggaaggacagcctgaaacgccaggcagcgttgacagctgactttgggaacgatcacccattccagaacacacgtgagtgtgatctgctgatgttacgtcgcacagtcagacagacagacagacacccagcacgacagagtccaaggtaaatgctgatggtagtttagccctttaggagaacagcactctgcagctggtgtgaagttactatcggtctcggagaccaagggcggaaaaagccgcccgaagctcccccagtagagccagctgtgtgaggagagctccccatatgatgacattatacagagtttattctgaagaacgttttgcattttaataaaaaaaaaaaggctttatgtcaggaaatagtcatttacaaaccttgaagtgtttttgcctgcatctggagtaagaatgtcttccgaagaggtttgcgaggtctttataataaaatttatttacaaaaaaaaaaattgtttccacaggttgtctgtgtactagttaaaaattttgaacccaaattgctacctgtatttttgattgcagagaatccttaggaaagtgatgggatgagatctcatgatgctgacaggaaatcttgacagttctaacgattccaaagctaactgtccccaggtgtgcagtcagagcgcttgtgttctcgtgaaaacttcagcccttgctccgctgtgtgtgacagctctcaaagagaatcctgcacagcagctgtgaaaggcgacaggactccacagaccacctgcattcacaggacaccacggtgctcccctctcccctcctgtggtatacctcctagatcttaagcatccttggggatgtgagcagacgtgggcagctcatctgtgcagctccacgtcagagacccagaagcatcctgcgtgggcaactgagggagccagaccagtggatgccactgggccgagtagccagctggacctgctgcataactaactgaccagagggttgtgaaaataaaaccaaaccaaagtcaacggcaacccatgtgggtgggaggtgcactataaaatcatagaacccaaagaaaagactgcaaattagtcaacttgatatcttacggaaagataggtttatagtaactcaaaatattttagaaaaaagttctgaagtgccaagttcttaggaactcaaaagtttatccccaaagattcttttactgaacatgtgagaattggctctaattctcctaattctttttagcccaagtaaaaatactaataatttctaggtttgggtgggaaactacgattgttaggacccgtggatattgctgcagttcaaatacggtacgataattacaaaatatagaccatctctttacaaatacaaattgtatattacaagtcatgtacagtaaatctataatttttaaacaaactaaacgtatctaagttttacctggtttgcaagtgcggtactcttccagtttacagttgcccttaatgtgacagaactgaccgtctgagtgatggtctcttatgtaaactggcatcgcttaacaaaacgatccggtcccactccccttgtcgtgaccactagtggctgggttctgatgtgtaccattcagaacagctccacagaaaccaggaaccagtgtgttgggggagggggctcagaaatggatatgccaggcccagtgggtgtctgatatgctagaccaatggttgaggtaatgacacaggcgtggtgactgtcatcacctttaacctctctcatgtctgcaggcaaaggggcatgggcatgcaccctggatgggagacaccaactcctgggcagccctctggcctctgtgcaggccagatatactgtcttctgaggccgggcctgagcatgtgacatagcacatgccaggccgctcagaacctgctcctaccaggtttatggcttccttgaggcatgaaatcacttgtacaaaagtctaattgagcgtttttctcccaactagtgcctaaactttcctaattatgaggcactttatccctggccctcccgtgcccgtctctggctggagccagcctgccctcactgggctacaaggtggtaatgcaaatcatctcatctgccaggtcctcttcctctcgcccagggtctggctcctcgtcactgtagccaggaccaaagtcctggagctcatagtcctggcggtgggagatggggcccatgtccccattggctcgaggacacacactgccattgagcagggtgctggcagcactttccatctcgtctatggttaggtcacaggcatcggcaatctcatgttttgtcgctgagacaaatttggggtccctcgcgtagcgtcccaagccttcggatatcaggacctgtataggagatagatcgatggcatgagggaaggtctgcatcagctctcagtgcgcggcatgctctggggacgctgtcagccatgctgctaaactttatacacgatgctaaccataaatgagctcagctctgttggtgtcgaaagctgagtggctccacaaggctgagcaagagagaaagcactggggacgtagcacagactggcactgcaggatgggactctctggtgggacttggcagtgccagctggttttcactcaggccttaaatgctgccgagaggccaccctcgggtggcaaggctgcagagcccaccactgccccctccccatgtgatcatggctctgtttctgctgccacctaagatttgtccagaggtcaaaggccacccatactcactgcctccaccaggctgtctgcactcctctgcttgtcgctgttcttgttccggaagctgctggggacagtcagactagctggcgtgaaagtcctataggagatgtcgggttcatctgtgtaccaggagcttcggtgtagggatggcaggctgccattgacctggtccatagattctgagcggtccacctggatcaaaggggtgtagcatgggctccagtctcggtatggaggggttgctggaggggtggcccacgaccgggtagagtggctcggtgagtacttctgggctttactggaatctaggcctgcaacggccatgatctgagcgggagaagcagagagaggtctgagccttggtcccagtctggcacatggcagctgtgcagagatgcttctcaaaaacctgggggaagatgcctgtgtagcagaggccactcagtgagctggccagggaaccagggattaataaaagactgggattccgggctggtgagatggctcagtgggtaagagcacccgactgctctgagtacccgactgctcttccaaaggtcccgagttcaaatcccagcaaccacatggtggctcacaaccatccataacgagatctgactccctcttctgaagacagctacagtgtacttacacataataaataaatctttaaaaaaaaagttgcactgtcatgcattcatatatacgaattggcagccaaacttcataatgtgaaagtgaaaaaaaaaaaaaagactgggcttcctctttctccaagccatagggccttctctatgactgaactgtcagttactaacttacgtaaccacttggggatgaggagggaagatggataagctgtgatgtgtgaacatactacccaggcctctccaggcttcagtactgaagcacacttcagggactctggctcattcaggacaacaaccatgtctctcggctctaaggcctgccatcctgcagtgagtgtgccctgaaatgccgggcacagtcacgattctcacatgtccctcatgggagagccaccttgagatgtctgctaatgccggtttgcactgacactgtagttgtagccaaggaatccaggacaacccaggccagtggctgaggtaagacttgggattctgccctgtgggtcacaggcctcttttagacctccttggctgtctgaggtttggcatcgagtgatctgggtttccaaaaagtttatctttcttccatgatgatacaggcaaatgggctcagtggttgagctcactaatttatcttccagaggacccaggttcaatccccactacctacatgggtagtttataaccatctgtaactccagttctggggatctgatgccttctaaaccccaagagcaccagacatgcctgtggtgaacagacacatatgcaggcatgtaaaataaagtaactccaaaacaaatattttaagtgctggcagaggtgactagaaaatctgcaatggccactgagtacatatgggttagagcttggggtcagaacctcacagagatccagatctgctggctggctggctggctggctgggtgcaggtttctgacatctcccttcatcaatcagcccacacagctcttctgatgagatagttcaggaaatataaagactgtatgtgtggtggtttggcccagagggtggcattattaggaggcatggtctattggaggaagtgtgtcactgttggggtgggctttgacaatcctgtgctcaggctctgctcactgtggaatgagcacctcctcctgactgcctttggatcaagatgtagaactcttggctcttcctacagcaccatgtctgcctgtatgctgccacgctttctgccatgatgacagtggaatgaacctctgacactataagccagcctcaattaaatgttttgctttctaagagtatagttgtcatggtcatggtgtctcgtcacagcaacgaaatcctaagacaatatgtatgtattcatacatatctacacatatatatgtaatgcatgcatacctctatccttaagccctggtgaacaggctcagttgcctttcatgtgagcatgtgggcccccttaacccactctcatggacagagggttcatgcacaagaagctgcccaagtggcttgatggtggaaccacctctctgaaggaataattagtagcagcagccatcaatgggactcttatgagtgtctgtaattgccttaactcagactataccagtgtcctctgacaggaagcacggatccaaggatgcccggtccaccctttgctgcatgtgcaactccagcagaatgggccctgggggatctaccaggaagggctgctcaaggataagcagattagaaggggcaggctctttgcttcctccatgtgtatccccaggggagagtgcatcccaggtggggccagagcagctcacctgctgctgcatcaggtgcaggggcagggcagcgcggtgaggcagggcaggcgatggaaggacatcgtcttggctgctttgcctgcgcagacactcaaagttgaaggaggacctccgatgggctgcggagcaaaagcacaggatgctgtagtgatataaattctgtctggacaatgtgtcctgagagtcaagactactttctgaggcattcagcaaggaggccaggaagaagcaggccacatgcttcatccaagagaaacaattacataatgccccaactagggatgggaaggctaaaaggagcaagccagctgtgggacgtttcgataagggagcaatgaatcacttcaaatgtttgctctcaggcagcccagtggaatctgtgctaagttacaagccccggaatgtattgtagagatccattctagaatcgtagacgcaccatgctatcctatctctgccctacaaacactctgcatctttctgaggtccccatatttaagcctctgttttcaaaatgagggattccgtcaaccagcttaaccggggaaaataaccaaattctttgcctagaaagaacccaccttccctagcctagatgtgagtgtatctaagtacttgctgtgtgctgacagcagttgcagatagaggctcgctgatggtccacagcttctgggtttatagtgtaccaggcttagtgttctgggatcctttggcaaagacagccgagtcctagaagcttgtccaccctgtcgtgggcctcagggagactccctccccatccccgacctgtgctctgcattactccaactgtactttctgtactgctaggcttctgcaagccctcggttagtggatcctcagacactggaccaaagaggcctcccagacaccctggacttcacaaaaagccaggtccacgatgaagaacaggccaagcctggtcattggctggccagcaatggccagtggagtggaaacagtcagtactgaggggtatgccagggcctcccaggtgagctggtactacttataaagaggaccacgccttgcctgctaaccagtgcaaccacagaaaacggccctctcggtcggcacaacctctagaccctaagacctaggcaggccagctgtttggaattggaagaaaaacagcccctcccatccattcaggatctactgctaaaataagccccgggtcccctcatccagtgagctttgcactacagcctctgtaagacatagctctttcacttatctgcccttacctactcccaatggctaagcatacaggccagtttagccatgttccccctcgcccaggtctgcaaactggactgccctgggaccagggcactcaagtgtccccttggccatgtaggtgtgggataagtgaagacacagacctggaagaggggtggcaggaaccaaagggcaaagacccctgctgggcctcacttacacctgtttcgtttggtatctatggattaaggaaaggcttcatttagcagcatgtgtttggggctaattaaatattaagcactcaaatggatttgactagactcccagcaggccgtggcagctggggtggggtatggccacccatgttctttcctgtgtgctcagtcaggctcgggagctcctgtgtttcgactgttcttggttattaaacagaatcctcaatttagcttctttcctccgaaacacaaaaaatggatattctttaccatcatcaaacacccatacttggcaaagttcaaatgcccttctaggggttggcagagccttggggatgaccctacaggtacaggagaaaggagagcccccattttgctttgggccaggaaagcactgtctatccaggtactggctggtcttaggagttaccagcacttccctggtaacacacatcaattattaatccagggttaggatggggacaggcatggtgccctctgggaggctccaccctaaacaagaaagctggcctcacatggtggggtaggaggtagaagacgtctcctcggagatctccgtgaatcatagccagtgggagagtcatcatcttctaagaagccttgggggtggtggtagcctcggggcctctcaaagtccatggagctgcctgggtacctgttgtagtagttgtagttttgcctggcagttagtgagagaaaacatgagaaggcacttgtgagggtctgggcaagaacacttgacctaactcctacaagccctgtcttatgagtggtggaaacttccgggtagaaaacaaggaccatctccggagattggagctggaggcttggaataagacacatggcagtcattttcatgcctgggacaccctcaggcccgaagcgaatggtgatcacacaaagcttgtcaactggctaccctttactcgtctcctggaggcctctgtcccaaggagctgccctctccaagtacccggcaggacacggagcttagagcatgccatcagtgtgcaggctcagtacaatgtaaaaagtgggagagagtggtgagttccacggttgggttcttgtttgaagggcatgattcagttccaaacaggagagatgcgaaggctggcctgctgctgctgttaaagtagactgagaccagcaggggtggctaggacacctgagagggagacctgggatgacaagccccagaggtggggtgtacataggtccatgtggctccaaatcagtgaatgtggaagttgggcgctggtgggaggtggtggaaaagggcctgtcagagcacaggtaaaggtgaggctgtgtctcaggagccaggcaaggagccatagcaccatttcaacctggtggccccagcctgatgaaaaaagtgagtcacgggtcaggaaggattggggtaggtaattttgtcctccagtactggctgcaatgtgtcttatgtttaaaaaagatttatttatttatatattatatatatgagtgttttgtgagcatatatgtgtgctctgtgcatgcaatgcccattgagaccagaagagggcatcagatctccctggaactggagttaagtgatagttgttagcaccacgggccatgtggggggctacaaacagaacccaggtcctctggaagtacggcaaacactcttcatccttgaaccatatctccagccctgtacaatgcctattttagccagcagcattctttctgcaggacagaagttgggggaggcacctctgcttgagggaagctgttcctacctcttgtccccataccttcaggaggccctttcattggcataggaagcaggagtcactgagactccagccagcatgctatgcaaacatagctgaggctggtgttcctatgtcagttaataagaactcatctctcaggccaggtgtagtggagcacacctttaaccccagcacttgagatgaaggcacacagatctctgtgagttctaggccagcatggtctacagagttccaggatatccagtgctatgtagagaggccctgcctcgaaatacccaccccctaaaacaatctaacatctgagatggcagggtctgaaaccgtggaagtccagttcccagggccagagcctttctgagggcccccggggcccagggtgaaataaggcaaacttgaactcctgccctgatgtgtcagaggaatcctgagtgtgtgtggctctctgagccctcaacaggagcagagtagaggacggctggtcttctgagctctgcccaggctgagcccctcacctgctccaggtgggagagctgtcgtcctcacagcactcctcgctactgaaatactcctgttcccccaagcagcgggggtctcggaagtagccgtgtatctcaggatcttcacggcaaatggttggaaattgctcatctcctgactcagacctgcagttgggaaagagatctgagagcttgaggaggtggcagctagatccttcagccatgcctctgcaacagcctgtgtcctccctcagagtgcctccatcttcctacgcatccctgccccggggccataagactactcaggccctggccaaagtgccctgtgcctgtgcctctgtgtgtgtgtgtgtgtgtacttgtggtctcagtaccttgcccagtgctagggccaaaccactgtgcctagagacctcgagacatagacacaggtgtaatgtgaataacagagcaaggcagacctagagtcctccactctgaagtcaggggacccacgaaaagtccctaggttcccagctgtttcacttccactcccccaccccagctccagccaatgtgacttcagaacctgggacagagatctcagtcctgccctatcaaatcgaggctgctgaagaagttctggcttttctgccactagagaggtgttcctggaaattttttccacaggcttccctgccctatgtcggaacactatttccatgaaatgccctgccttctggcctcaagccccaggaggcccagagggctcagtgacatcgactaagagcaactcatttgttcactcctcagaccaagaacctcctggtcttacttgaagcaatgatcctgaagccctttcctcttgcccccaggaaagtgaccattccacccataaggaagtctagttaacacatgtacatgagattatcccatcacacgcgcgcacgcacgcacgcacgcacgcacgcacgcacgcacgcacgcacgcacacacattaaccagagggatctggggcctggttttcaggatgtctgggctgtgcttctcctaagtccacgtgagaatctggacccctaaagcagcttaggcctccccagctatacaggggcagggaaagtggacagactggtgggccccagttttcctttgtgagaaataagtgggaactgcccattcatgaatgcaaagctctggcatttcgagaacaaatgctttgatggcttggcactgagcaaatgtagtgggtaacaggacagcacagtttccagacaaagacagaagcggcaagcacctacctaatgtaagtctcgtaatagcgggttctatccagggaaggcataccatgggaaggagggagaagaagagttagacattcccaaaagcattagacgcgcagataccagcctgtcttctggagcgggggcaggcaaaccagagtttgctggccagctatggtctactatctgttttcgtgtggcccacgatctaggtagggattttccatttataaagggcagaaaacaaagtaaaaagcagcgaacccttttgccctttctagccctacaaagtccaaattccagtgctacacgcacagctctatgggaacccaactgcttcgtttcttaagaatgtaccctggcccctagcaaacacataagtggaggctcacagtcagcagctattggatggatcacagggtccccagtggaggagctagagaaagtacccaaggagctaaaggggtctccaaccctataggtggaacaacaatatgaactaaccagtaccccccggagctcgtgtctctagctgcatatgtatcagaagatggcctagttggccatcagtgaaaagagaggcccattggtcttgcaaactttatatgctttagtacaggggaaagccagggccaaaaagtgggagtgggtgggtgggaggtcagtggggggggcttgggggacttatggggtagcattggaaatgtaaatgaagaaaatacctaattaataaaaaataaaaataaataaattaaaaaaagaatgctccctggctatgttcaccctgccatggcaaacctggggagttttgcaagagagactgaatggtccccaaaactaaaatactggccctttacagaagacattcaccaacccctgtcccaaagaatgttaccataactgagggaggtggattttgtggctgctgttgttttaagagaacaccccatgcagaaggtgggtagtgggtgaccccttatgtggtaggtccctcacacgggctacatacagagaggccaagaggcaagtggctctcaagttcaaatacaaatgtctccagggagttaccatgggccagagcacagggcagaagactggccctgcggagcgggtgtgacaagggcagacaacagcatcaccctttccaaggttaccttttaatactggaccttctttgaagctctcgatcatgcttgcaggagtaatgcccattttcagacacatgctcaaggttcccaatgctgggcggctttccgtgggcagctttggacatattggcattattgagattggcatttgttgaggtgggagcttgcttccctatggaattatggttatgatggttatgacaccccgaatttcctgctggaggaaacagcggtttctcagtatcacttgcaggtggcattgaaggcctttggacatgcaggggacggtgggtggtattggtctgctgaagggaat

SEQ ID NO: 464 - DNA, 6921 bp, Mus musculus
gtggccgccttgtcgccctcggggctcgcgggggtaggcggggtgcgaatgactcaggcccgggaggactgaagctccagcaggcgcggggcgtgtcgagccccgcggcacaggtgtgtgccgcaggccaggtggggcgaccgcacccgcgcctggagccagacggagcagctcgcggcactcccgggacgccagttaaagagcagcgggcgaggatcagcggccactgccttctcggctctcctggctcctgtccttcgcgtcctggcccaggtgcggagttgtcccgggaaaagactcttccaactcctgtcggtggatagaggaactgggctggaagcatgtggcaggtccttagaggctggaggaaaggatggcagagcccacgtggagccctggcatgggctgtgcagggccagccatgccccccttgcagccgcgctgttgccagtgtgggcaaggatgagtacacctttgtggtggtgggcgcaggctctgctggctgtgtgctggctagtcggctcaccgaggacccgaatcatcgggtgctgctgctagaggcaggacctaaggacttgttgatggggagcaagcggcttcagtggaagatccacatgccggctgcccttgtgtccaacctgtgtgatgacaaatacaactggtactatcacactgagcctcagcccggcatggacagtcgcgtgctgtactggccacgaggccgggtctggggtggctcctcatccctcaatgccatggtctacatccgaggacacgccgaggactataaccgctggcaccgtgaaggtgctgagggttgggactatgcacactgcctgccctacttccgcaaggcgcagagacatgagctgggtgccaatatgtaccgcggtggggatggcccactgcatgtgtctcggggcaagaccaaccacccgcttcaccaggccttcctgcaggcagcacgtcaggctggctaccccttcactgaagacatgaatggcttccaacaggagggcttcggctggatggacatgactgtccaccaaggtaagcgctggagcacagcctgcgcctacttgcacccggtgctgagccgccccaacctcagggccgaggtccagacacttgtaagcagagtgctgtttgagggcacccgtgcagtaggtgtggagtacatcaaggacggccagagacacaaggcttacgtcagcagggaggtgatcctgagcgggggagccatcaactctccacagctgctcatgctctctggcgttggcaatgcagatgacctcaggaaactggatatccctgtggtgtgccacctgcctggagttgggcagaacctgcaggaccacctggaggtctacgttcagcaagcgtgcacacagcccatcaccctccactctgcccagaagcctctgcggaaggtctgcatcggcctggagtggctctggagctacacaggggacggagccacagcccatcttgagaccggagggttcatccgcagccgacctggggtccctcatccggacatccagttccacttcctgccatcgcaagtgattgaccatgggcggaaacccacccagcaggaagcttaccaggtgcacgtgggaaccatgagggccacaagtgtgggctggctgaaactgagaagtgccaacccccgggaccaccctgtgatccatcccaactacttgtcaacagaaaccgatgtcgaggacttccgtcagtgtgtgaggctgtcacgagaaatttttgcccaggaagccttggctccatttcggggaaaagagctgcagcccggaagccacgtccagtcagacaaagagatagatgcctttgtgcgggcaaaagcagacagtgcttaccacccctcgtgcacctgtaagatgggccggtcctctgaccccactgccgtggttgacgcgcaaaccaaggtcatcggcgtagaaaacctcagggtcgttgatgcctccatcatgcccagcgtggtcagcggcaacctgaacgctcccacggtaatgattgcagagaaagcagccgacattattaagggacaccctgcacttgaggacaagaatgttcctgtctacaagccccagactctggacacccagcgttaagacagacagccattgcctgaggacgacagaggaactcaggccaagccaagagatccagccagtacagccctgccctagatatttctgaaccggtatatagacactcgggacccagataccccgactcttggctcagactttcatggtttctgaggaaatgaggtcatggtaggcagtgaggcaagtcccttttcccagtgtctctctgatgcccctccacaaaaagcctagcaagcaagctggggccctccccctggctgcctgcgggtagcaggtggggtagctaacatggttttcttgtctccagttcagagctctgcttccaggaaggactgggatgatcctttccctggtctcccacctgaggccattcctgcaaagtcagggtggttgaactggactgggctctccaaggaagcttttgctgaagccaagaggcaggtagcagctcagctgggctggttacctgagcttatgtccccaattagagggacaggcagcagctagaggacgcctcatccccctctgcacttctctcctgccctgatttaaatctgaagagcgaggcacagggacgagggctcaggtgactgcacaactcaacgcctaccactctggctctcatgaaaccgtccaggtgagaggcttgcaggacgttgttcaagaaaaggccattttggcctcactgccaaaggttttattgtttaacccttaccacacaaaagtgcaggagtatagagccagtcccacatgccagtcactacctcatgccaaggacatgagcccacgaggtcctttcatggtggccccagaaatggcccaggcaccagagctacttctgcagacagggctggccgtttcttattctctagacgtgagaacagagagcatggcaccaaggctgatggagaacagcaaaggactttggagtgaaagataaaccagctagaattcgagtcttgggtcaggggagcagataccagcagcatttacaagagctctttgatctggaaattcctcataaatttggatgtaaccggtaacttaatttttgagccaagctgcctcattccaactgttcttatgagagaatgggggtcagacgcattgtaggttagttttcctgaagatgtccaaagccatcatctgtagtcgggaagaaagggatcgctgtatagaaatcacatggctgagtgaagaagagagaggaaatagcaggattccagggtcccctagggttgactggcaggagctgccttctggacttctgagtctgagaagacccttcaaagggttcaaaaaacaaattataaaccaacacttttactttgaaaacaaggttgcccttatttcatcttacctgctttgccttttgttttttgtttttttgttttgttttttcctgttcaaaaagaagatcaaggaaatcctaggtctgccaagagatcctcacagggcaggtgttagacggccgtcatccgtagcatctttagcagcacaggtgtcacccctgggagggccatgttctcctctcaggctcagcggcgtttgagaataagcgaagatcaacctggcgtgcccctcagttgcagtcgggcctttctctcacttcggcatagggaggctggcttcacgtgctgacatgatttagccacataaggaaacgagtttcccgagacaagaagtcgatgttacgtgcccagaactcacagatggcgacatcgggacagaacatgaggtttggagggatcctcgctgaagccccgacagctattccaggttccagcccaaacagaacggatgaacacgcaggagagtcttgcctgcagtgctgaatccacatgctggggttgtctggaagtcccagtgccacaagggagacagagtggtagaatggtgcagtcctgcttccgttctaaagtggggttcacacaggcagttaagactgagtctcctggggaaactggaaaggcttagttaagtaggctccttggcaaagagcctgtaataccccaatcatggaaggccacatgttgccaaaaccagtacctgcacacctagcaagcatgtgccccagggttgacccctagcaccaaaaagaactgtggggagccctgctgtgttgatgggacttgggcccacctcactgttggccaagtgtgttcctgacagggtcacagatcatggatggagacagggacaacttgccagcatgaccagacacagtcatagaagcagaaggtggggacactgtaacacatgagccctgcctcatttccatacattcaaatagattcttctcacccaccatactacatccctcaggccccaagatttttcatatttccacttataaactaccacaatatcaaacctaatgcaaagattttaatcttcaaatttggaggggggcggggaaaacatgacctacctcctaggcccaagctggtgacctgcgaagcccctgctggctgggctgttgtatattcaaccacactcttcacccttgttctgaaatcagaagccagagaccgagcctctccctaggtctccactgccctctgggaaagcacagctggagtgggttttgtgagaggtgcccatgatttggtggtgtttgtacaagtaaaccaacactccatcctccccaagtaaaggcagagctgataaagatcgtagatagtaaaaagcacacagcacaaaatagagccgatctggcttaagagctggaccactgtgaagtgggtagtgcaccccagctatgctctcttcaagtggctagggctacaccctcaaccttctagaactatggagcacaagtccacatacctcacagaccatcccaaatgaggttcttgctgacggtgagcagatcatagtgacttccaccttttaatgtcattaaaagcaggagcttaaactaaaagcagcattccaaagacctcaatatcaggggggggtggggcagggtaggaaaaccaaaaagcagaactatttagtcttaaaacttccttaaaggggaggaaaaaaccatgctctacaacttcaaatttttcttacaaagagaaatttaatattaaatgagaggttgaaccaggcttaaagcagacataccgggaaggacagcctgaaacgccaggcagcgttgacagctgactttgggaacgatcacccattccagaacacacgtgagtgtgatctgctgatgttacgtcgcacagtcagacagacagacagacacccagcacgacagagtccaaggtaaatgctgatggtagtttagccctttaggagaacagcactctgcagctggtgtgaagttactatcggtctcggagaccaagggcggaaaaagccgcccgaagctcccccagtagagccagctgtgtgaggagagctccccatatgatgacattatacagagtttattctgaagaacgttttgcattttaataaaaaaaaaaaggctttatgtcaggaaatagtcatttacaaaccttgaagtgtttttgcctgcatctggagtaagaatgtcttccgaagaggtttgcgaggtctttataataaaatttatttacaaaaaaaaaaattgtttccacaggttgtctgtgtactagttaaaaattttgaacccaaattgctacctgtatttttgattgcagagaatccttaggaaagtgatgggatgagatctcatgatgctgacaggaaatcttgacagttctaacgattccaaagctaactgtccccaggtgtgcagtcagagcgcttgtgttctcgtgaaaacttcagcccttgctccgctgtgtgtgacagctctcaaagagaatcctgcacagcagctgtgaaaggcgacaggactccacagaccacctgcattcacaggacaccacggtgctcccctctcccctcctgtggtatacctcctagatcttaagcatccttggggatgtgagcagacgtgggcagctcatctgtgcagctccacgtcagagacccagaagcatcctgcgtgggcaactgagggagccagaccagtggatgccactgggccgagtagccagctggacctgctgcataactaactgaccagagggttgtgaaaataaaaccaaaccaaagtcaacggcaacccatgtgggtgggaggtgcactataaaatcatagaacccaaagaaaagactgcaaattagtcaacttgatatcttacggaaagataggtttatagtaactcaaaatattttagaaaaaagttctgaagtgccaagttcttaggaactcaaaagtttatccccaaagattcttttactgaacatgtgagaattggctctaattctcctaattctttttagcccaagtaaaaatactaataatttctaggtttgggtgggaaactacgattgttaggacccgtggatattgctgcagttcaaatacggtacgataattacaaaatatagaccatctctttacaaatacaaattgtatattacaagtcatgtacagtaaatctataatttttaaacaaactaaacgtatctaagttttacctggtttgcaagtgcggtactcttccagtttacagttgcccttaatgtgacagaactgaccgtctgagtgatggtctcttatgtaaactggcatcgcttaacaaaacgatccggtcccactccccttgtcgtgaccactagtggctgggttctgatgtgtaccattcagaacagctccacagaaaccaggaaccagtgtgttgggggagggggctcagaaatggatatgccaggcccag

SEQ ID NO: 465 - protein, 598 aa, Mus musculus
RNWAGSMWQVLRGWRKGWQSPRGAWAVQGQPCPPCSRAVASVGKDEYTFVVVGAGSAGCVLASRLTEDPNHRVLLLEAGPKDLLMGSKRLQWKIHMPAALVSNLCDDKYNWYYHTEPQPGMDSRVLYWPRGRVWGGSSSLNAMVYIRGHAEDYNRWHREGAEGWDYAHCLPYFRKAQRHELGANMYRGGDGPLHVSRGKTNHPLHQAFLQAARQAGYPFTEDMNGFQQEGFGWMDMTVHQGKRWSTACAYLHPVLSRPNLRAEVQTLVSRVLFEGTRAVGVEYIKDGQRHKAYVSREVILSGGAINSPQLLMLSGVGNADDLRKLDIPVVCHLPGVGQNLQDHLEVYVQQACTQPITLHSAQKPLRKVCIGLEWLWSYTGDGATAHLETGGFIRSRPGVPHPDIQFHFLPSQVIDHGRKPTQQEAYQVHVGTMRATSVGWLKLRSANPRDHPVIHPNYLSTETDVEDFRQCVRLSREIFAQEAPFRGKELQPGSHVQSDKEIDAFVRAKADSAYHPSCTCKMGRSSDPTAVVDAQTKVIGVENLRVVDASIMPSVVSGNLNAPTVMIAEKAADIIKGHPALEDKNVPVYKPQTLDTQR

SEQ ID NO: 466 - DNA, 48642 bp, Homo sapiens
caaggccctctgacctcctcacacctgcagtgttctctgtacccttggtgggaagctcagcgtccaaatctgccttctagcaaggacagcatggacggctgtctgaaagggtaccagggatgccttgtgcagtgaagggtgcctaagagttctgggctgatccaaataccactagcctcattagcattccaacactatattactcagaaatttacacaaacccttggaaactgggcactagggactaataatcctaaaggggattactacaaaattcaaggggtaaaattcactagcctgtgaaaagtgatcctctttgaggacacaaattgagagcgtaattgtgggccagtcctttagcgaactcacactcccacctcgaatgtttgctaatccaaacagaaggttcttaggatccccatggccacaggtgggtggtgctagcatctgagcaggtggaagggctcgtaggactcccatcaatcaggaagagcctttgattggcactgctgagccatttgggctaaaatgttgttaaccaagtggatgggggtggttctttgtgactgttgctccactatataaatgtactgagggtctacccctttctggacaggctgctgcactcagtgggcaaagtactggctggagatcaggagccataggtgcttctgccaccaccatcgggggtgcttggatattcaactctcccctagggctcagttcttctgtgcaaagatgaagagagctatgctgcctcaagttacaagtttcttcaaataataaaagcaaatgccgtatttacttaccggccttgacacacttttttttatatttcattatgtggtctaggcagcctggaaatttgaatgaaagtttttacattttagaaaaaggtatctctgccccaccccctttgccaagtgcacacacacatacgcataccacacctgtaacaaattgccaaaacattccagatgtaagatggcaaattcaaatggggctctaatttttttttttttttttttttttttgagccggagtcttgctctgtcgcctaggctggagtgcagtggcgcaatctcagctcactgctagctctgccacccaggttcacgccattctcctgcctcaggctcctgagtagctgggactacaggcgcccgccaccacgcccggctaattttttgtggggctctaacattttactgctaaacagagaacatctgcccattacgtgataaccagagtctaatttaaatacagcctttatcaaaacagtatctttgatccctaagagaggactcgaaaaccatccatcatttgaaaaggacatttggtaatatctgtagatgctgccccttcaaggacatgaagcctaacactcccctatcctcaccccagggtggggtagaattagtgacttgtttccaaaaacgagagttgggaaaaacagtagatttacatggagaagtctggcagtccccacattaatctagtgttgatggtgacccccagcctggtgtcatgtgggtgccatggacccctgatgggataagaagggcccggcacctctgtggtatgaattccctgtctaatcatgagacaaacatcagacaaacccacactgggggacattctacaggatgcctggtcagaactcaagactgtcaacgttctgaaaaacaaagactaagaaactgttacagaccagaggagagacacacagggactaaatgcaactggaacagaaagaggacattcatgaaaaagcaggtgaagtccaaataaagtctggagtttagttaacagacacgtactaatgttggtttcttagttttgacaaatgtatcatggtaatacaagacgttaataggagaagctgggtgagaggtatatggaaactgtactatctttgcaacttttctgtaaatctaaaattattccaaaataaggctgggtacggtggctcactcctgtaatcccagcactttgggaggccaaggtaggcagatcacccgaggttaggagtttgagactagcctagccatcatagtgaaaccccgtctctactaaaaatacaaaaattagctgggtgtggtggctcatgactgtaatcctagcttcttgggaggctgaggcaggagaatcacttaaatccaagaggcggaggttgcagtgagctgagatggtgccactgcactccagccagggcaacaagagcaaaaccccgtctaaaaaataaataaataaataaataataaaataaaagaattccaaaataaaaaagcttatttgaaaacaaaatgaggtttgctctcatcaagaaagttggaaaccacgtgtagtaaatggtgcagcaccaaaaacaccctggaccacaatctccaagaccagcagtgaattggaaattaccgtttggctttgatgccttgcctgtgacagatgacaggatggtggtatgggatgggtgactcggctcagatagacccttcacacacaccatcctgtctcatcctcatcacagccctgtgtgtgacattgcagctgtggtaccagagaactggtcctgtgtcacaaagctggggcaagggcccagcatccaactcaggaccaccctgcctctcatggacagcttggggacaagccaactggagtctgtagattctcagaggcccagccatatgcagcccactctagaaagctgagataggaacgaacaaacattttgcatcagtgatataaagagtggctcaggtgcattgctctagaaggaccaaagtgtgaatgtcagcttcacttttatgtgtgtataacccagggaaagtgacttaacctctcagtttcttcatctgtaaaatgcagctatcccaaccttggggttgctgagatgcttaagtgagatgatgcatatcaagtattcagcacagtgcctggcatacaggaacagactttttcctacattttacctgactttattctctctgctctgtgggtaaagtatggttactactgtgtccatgctttagataagggaactgagatttagcaaggccaaaagccttatccagggttccctgggctctctctgtgcatatcgcaaagcaggcatcccagcaagacaaagaataataaacaaatgaggaagtttacctggtgaggtgaaattcacagacatggaagggccatcttcattcatatttgcattaggaatattatgggccccaatgaaatagactgtgttcagctctacagggaagccgatgtaggaaaatgtccactgaaaggcaaagcaaggaactctcaattcccaaaacactgcagtacagaaacagtataccttagtgtgttgcccttttagtttgtatttcattactcactctgtgaaaacttaggtctccaaccaatgtctacttagggaatgggcactaaacaatttacagaatcagagaagtataaagttttaaagccaggatataatttaagtccaattctcttccattggctggtagggaaaaactgaggcccagagatgctgacttacaaaaggcacaaaacagagaagtagccgaaaatgggatttgaaccaagggatcttgctctaagctctgagtcatagctatttaccagcccgtgtgagcagcacatcatccatgctccccaaacaaagggcatagctttcagcaacaattagccaaatacataaaagtgtctatgcccggatacagtggctcatacctgtaatcccagcactttgggaagctgaggcaggcagatcgcttgagcactggaattcaagaccagcaacacggtgaaacccccctctacaaaaactacaaaaattagccaggtctggtggctcatgcctgtagtcccagctgcttgggaggctgaagtagaacgatcgcttgagcccagaagattgaggtcgcagtgagccatgatcgcaccactgcactccagcctgggtgacagaacaagatgctatctcaaaaaacaaaacaaaaaacaaaaaagtgcttactttaccaccagagggtctggtctgagtctggaaggcctctgtgtaattgcacctcacacagctgtaggactggaagttgcttttgcccgtcacacaaatcttggtggccttcaacaagcggatgctggctgccgagataggcaagaggacattggtttatttagcacttgctgtgtggctgacttgatgctagatgctttactagcatgctttattttatgtctcggttcatattcacaatagtactgaaaggtaggcaccactgtctccagtttacagatggggttcgtgaggcttaggaagtttcagggagctctgcttaaacttagaaaactcatcagcaagtagcagatacgaattcagattccaaagcccaagctccctcctcctcataggtcagcttgaatttcataggatgcctgcaaaggtggctatagctctgcactattctgggtctcttttaagaggaagaggctggcctcagggagacccacaaagaccctccaagactgtcatcaccaaaccacacctgttccgattgcacctttatccatgctgattcttctccctgaaggtcctttcctcccattatctacctcttcaagtttcactcttttaaagcccaactcactcatgcaccacagcccataaccacagctgacaaagagctcactctgtgccaggtaagggcccaaacccttatggccacatctcacctaaagcaacctcaccagagaccctttccagctcctctcgccctatcccactcagatgaagcacagctcccttctgggactcccctgacattgtgcctgtgtctgcctcccctacccctctgaatcctcctgggtggagactgtaggtgactcctctctctgtgcctggcactcatggattcttgaccaggtagacttttttccgatctgaatttagcagatggaaaccaaaaggatgggcattaggatcccaggagtagctcactgaaagaactcatatggtgccttgcagcacaatcttggggaaatgccaaaagcttcgtgacgtcatctgggaagtggaaaagtaatctatctaagccagtgctttccctaaactgaagtggggtggggaaaatcatctctcgccttaccttatcttcttccatgaagtacatacacagaaaagtacacacataagtgtaccacttgatgcatcgggacactcatgcaaccagtatgcaggttaagaaactccctcaggtgtgctcctcatacttccttacagttattcctaccccagcaggaaccactaccctgacttttattttattttattttattttattttgagacagtctctctgtcacccaggcaggagtgcaatggcacagtctcaactcactgcaacctccacctcctgggttcaagttattctcctgcctcagcctcccaagtagctgggattacaggcatgtgccaccatgcctggctaattttttgtatttttaggagagatggagtttcaccatgttggccaggctggtcttgaactcctgacctcaagtaatctacccgccttggcctcccaaagtgctgggattacaggcatgagccaccacgcctggtcttttgcttttttttttttttttgagacggagtttcactctgttgcccaggctgctggagtgcagtggtgcgatcacagctcactgcaagctccgcctcctgggttcaagcgattctcgtgcctcagcctcccgagtagctgggattacaggtgtgcaacaccacatctggctaatttttgtattcttagtagagatggggttttgccatgttggccaggctggtctcgaactcctggcctcaagtgatccacccacctcggcctcccaaagtgctgggattacaggcgttagccaccgctcctggctactatcctgacttctaaacactacattggttttgtttgcttggcactttctgtaaatgggatcatatggcatgtatgcctgcaggcatgcacacagatataaatgtacaaactcttttgaatctgccttatgtttgtgacattcatccatattgttgtacgtagttacagatcattcattcttgttgctgtgacggaatttatctggtgattcctttctactgttgggcatttgagtgctttctaatgttgcctgttgtaagtagtgctactgcgatcaccctagtatgtggcttttggtgcgtgtatgcatgtatttctgttggttatgcatagaaggggaattaatggttcatatagtctgcacatttctgatttagtagacactttgggccttatctctgatggatgcaaacttaccatctgcccggagtacccagcttacattcatcaaaattgaatagtcccctgttgcaacactagttgtaacaggttctactcggaggtccctcaagtctcccgggattagatcatgttgtagcatccactctggagatggccctgggaaaaagcaagacttccatgacactgtctttcccagcccagtctgatgccatgccatctcctctcagtgactcacaccaaaccttcccccattcacaattcctcacttctttttttttttaattaaaaaaattgttttttgtagagatggggtctcactctgttgcctaagatgatctcaaactcctggcctcaaatgatcctcccacctcagcctcccaaagtgcttggattataggtataagccaccacgcctgacccaattcctcagttcttcctgctaaggccaaatgtttcttagcgctggctgatttatagcccagataattttgatctaacagaagtactctcaacctcctggctttcacctacagagcacgtgggaccactccaggtgcctgtgtatgtacacatgtatatatttagtgtatttgacatgtttattagagtcaggcctgccttcctcaggcttcggccctggattccagccagctggcccacacagcccccactttcccacctcctaacctttgctggtgccatctctcctccagctcactcttcctacccacattttttgggcagaagcctacccattcttcaaatgccaccatctcaaacacccgctctcctatgaaacatttgcttctcggtcccaactctaagtgaccttccttccacggccttgatctccctctgcagagtggcaggcatcactttccaccttgtatggcaagtcccatcttgactggccaagaggctagcctgtctgaaacacggcctcattcccacagagccccagagttctgcttcgagcagacagagacttcatctgcatcagccaataaagcaatgggtcaccctgtgtctggtcttcgatgacctattgcctatattaggcttcctaaaagtccaactgtgctttcaatgtaaagccccaaatacccattctctaatgcacctaccagtttcagagccacattgaacggtctgtgggagagaaaaaaaccaagcgtcatgttgaagccggcaaaccacaagctttcctttgccaaattaggcagaacaccattttccccttaaatgcatatacaagtgacaaactttcaaagaaaagatgaactggttctgcttcacagcttaggggggaactaagctgtcccactgtaggctatgacggaccatggattagccatcagtatacctgatcctcaagccagtgcataacctcacttgaagaccacaggtgggtctccatctgtctctggatgtcatccttccctgctgcaagcaggggatgacttgggaccgatgtgaggccccttcacactctaatgtttaactctaggtttttaggacggcctagagtatttactgggctaccccaggttaaggagtagctatgctaaggagataaacaaaagaaagctctgaatgcagtccatggtactttcctcaggttctttaaaatgttccccttctaacacaaaaggactcactgagcaattcacgaaaccataagcaattattagtgttcaagaaaggctggtactaaatcgtttgaagttagctgctcgtgttttttcataagaaaaaataatttgtgctttggttctggaataaaatactgaacctaaaatattggggctttaggcagcagcaagctcaaatgacaagactcaatgtgatacgtccagcagctctggaatatgctgctgagcatccacatttccaaacaccttctaagatctccttttgatggtttgaatgatttgagtttgggcaaaattgtcaatcatttatttgtcttttaaaaaatgaactctaagggatatcatcagattttttttttcctttttctgagacagagtctcactttgtcacccaggctggagtacagtggcgcagatctcggctcactgcaacctctggctcccgggttcaagtgattctcctgcctcagcctccggagtagctgggattacaggcgcctgccaccatgcccggctactttttgtatttttagtagagacggggtttcaccatgttagccaggctgttcccaaactcctgacctcaggcaatccggccgcctcagcctcccaaagtgctgggattacaggcgtgagccaccgagcccggccagacttgacttttttttttttttttaacaaatgagccatcataccaggagctgagttcttatcaaatggccggtgagaggccaagcaacaaccctaaatgctaccaagctcaaattgttggccttgcagcaactacagcaaaagggatgaattcttccctttagtgcaaagagccaagagggcttctgaactgacacagaggggaaggataggagctgaagacatcaggaaacagtgaatggggtttgtccaccagcaggtgactacggagcttgatgctatatgctattctaagagggcagcggtatcatttcaaaggttatttgggggatgagctattttctcttcagtgacccagaagattccctcgatcattcagggtactggggaagaaaggcaactgccttcacgagtgaacatggcaatcaatatggccaaaaagggagggggtactaatggagaaacagttcttgtgccccaacaggtgagcagaccccaagtaacaataactacgtgccaggcccttcgccgctaattgcaggccatgtcgttataccttaagagaccctggtgggttcggtactgcccttcgttttaccgttcgggacttggaacttggtgagcataaatgacagaaccaacagtacagggtggcatctgagaccgggtctgtctgattcccacgcccctgactcaagcaacctgacgccgatgtccggggctgccctgagggtgcaggcatgcccctcgagccggcagtccgcgcacgccttcggggcagcctggactggcggatcagacgacgtcaggatctgggctcgagggccgggagatgagggaagaggtgctggcgggggcttaccggctctcggggtacggcgctcctgcacagcgcggccaggcttagcagcacgagcgacatcgccgggccactgcgcgggatccaggccacccgcacgctgcgcttttatcccggcgccgccgggccgccccttctcggctccgcctctcgcagcgccgacccattcccgccacccgaacagagggcgggcccgctggccccctcccaggctggggcaggtcgcagcgccctcgcctgctggggctcggagggatgggccgtgtccgagcgctggcggagcacgggccgccgcggcgcgcgcctacccccgcgcacacgtgcatgcagtgagccaggtgcatcagctgcacccgccctcgggcttcgcgcgcctccgctggagcccagctagcctcgcggctccggggccgaccgggtcggaactgctgcgtccccattccggacgcagagagcgcgcggggcgccggcgccgccggttaaagtgccgcggggcaggggccgggccgcggccacccgctcctcccgctccggtcccgactgtcgggctctcggccgagtcgccccgggtgagtagccgcggaggcgccccgaccaccccgcagcagcgccgcccggccgctagcccggagaggcctgggggccggaggtttggggccgggctggacgccgagacccgggcccgctttacacaatcgccccgccgcgcgaagcgaaacgggtggaacgcagactgccgaagctcactgactcctttgagggagcgaattctttcagctacgcggggttagagcggtaggagtgcccgctgcccgaccccaggctttctggtaaatgtctgtttccaccaagtgagttcggacagcaacacctggggctcccaaagcggaagccgtcagcactggcgatttggagctgcggttctcaagtttccctggcccgggatctctagcgccgcctaaaatgagatccagacggcaggtccgggtcaggcccgggatctgcatttaacgagcctccacccacgcccccgtaattcgtgggtgggtggcccagggaccatcctttgagacacagtgggtttgggggaaagttcacaaaaatcagctgggctaacagtggagtcacagaggctggaactgctgcttcagccccctcggtttgcaaacgacagggttgtggtgaccaactcagggccatttaaacttgtaggcagaattagctccattctacagatgagaagacggaggcctagagaggggtatggaacttaggggtgtgttgtcagctggtgagaggctgtactaagtcaagcagctgttttagctgaggccctacttgtgtgccaggcctggcccacctgccagcttgattaaggcttgcatggactggggatcagccaggggtttgggctctggcatgcatacgtgtggagttgcaggtagcattttcagagaattgctctgtttcctgaccaaggaactcagttgaggttgtggccgcacccctgcctgggactgggccaccctgagcccctcattccacctctctgagttgctttgggccctgtggcccttgagaacattttcagctctaatagtcatcttcctgttcagcaaatacctgctgggtgcaaaggtgaaccacacatgggtgctggctgatgggtactcctggagtgaggatgagtgcagtgagaattattttcaaggacacaagtacccgccttgctgcggaagcccagatgaaaacagcctcgtctgcaagctcaagattgtgaactttgtcccatggtgctgaggaacaatggtacaggcttaaatggtcatccatttttggttttagaaaggccacctggttggctctgcagggcaaaatagagggctagtccctctgagacgagcgagcaggcagccattcactaacatgcgttcattccgtgagtatctgattctgtgctgtgggccaggctctgggctgtgctggcttttcagttgtgtgccagggcaggccctgctgtgagcttggtgttgttcggcacacaggctttgagacaaccagggtgcggaggttaggcctggagacagggttcatgagtcagactttctcagggggcagtggagaggagaggaggatagagccctggggaggagagcttgcctgaggaggtggggaggtctaaggggctgcagcaggaaagcccagtagtgagggaggagctcatggggtcagatggggcagagagaccaagggcactgaggctggttggtggcagtcacaggaagccttggcaaaaggataggggagggggttttgtaaaaagagaagggctgaggttctttctccccccaggggaagaagtgtcaggtgagggtggtctggaggtggctgagctgtaagaaggaggagtactcaggcaggggctgccaggcagagacccaagacccaggccaagtggctttcctgctgttctgggttcagaatgacactgccctggccccctggggcttagggatggggtgatacctggttcagtttcgtagttggggctgtggagtggaggagagggtgtgaagggccctgtagccacaactggaggttgaggtgggcaaacaggtgtgtctgcctgtcccctcgggggttttcccccctagctcagaaggccatgcctcaagtggccctgcatgagaggtcccaggtggcctgccggaaggcacacaatttatttggctgcctaagcctgatgactttgtggctttttgaactggaggctctggcaagtcactgctcttctcagagcagtttccttttctgtaaaatggggtggtgataggggcgatgaagtgatttgagtctatgagagaagcgacctttggacattttctgaccttctcccttcagtcataaattctgctaggtctgggtttctgaaagagctaccagccagtgtgccttcctgtccgggggggctttgtagggggtgctcattaaatgcttgaatggatgaataaattaacacctaccttcatccaaggccagtgcctgagcctgcccacccaggggagctggtttgaacttcctcctctttcttcacaagcagagcaaaggtcagggcctctgccagagcctggaagatcactgggtcaagtacctatggccctgacccagaccctagggtctgcacagactctgtgcagccacagcgcggtgagatgcctggcttccagaccacctggttctgcggctcattcaccatctgttggccttgagtgaggctcttagtcttttggaacctgtttctccatctgtaacatggggctgacatcagttctgcctccccagcagggctgttaggaaacgcagaagaaacagcaaaacagcagataggaaagcaagttgaaggatttaagagtgctgtgtaaatttaggggcaggagaggcagaagcaaaaaaaaaaaaaaaaaaagggggggggaaattccctaggacccaagagtcacggtaatccccagattctgtcattgttattcagacctttgcttctttgcctgatccatccctgggagaacaaggccatcagggttgttgacaagtcctgcgggtccagcctccacccacacaggtggaattttccagttcgttcttttgcaaatattaatcaaggccctggctggtcaacagtggattcattgtctcgtgaagagtgagccgtttctggcacatactggctgtctcccagggcccctggtggtgagccggagctgggagaggaactgttgggagcactcctggcctcggtgctccctcaaccccatgttctgctccagctggttaagcttggcagggtcaattttaatgcctgctttgagggaaagaccctgaagccacactgagggcttgcaccccactgttcccagcagggctacaaaacacattttctctgctctagtaggaggggctggcccaggaaagcccgcagactcaggctaggtgttaactcagcgttaatcccactcctcctggttcctaggagaaaccccttgaggtcacatacatgtgttctgttcatggctgtggtccctgtgccttgtctcctgggtacttgcattgatttttacattgttgttatcacactggggtctcaaagaaagcctcggatgcagaggagacaggtactgttgtcgttctctcaaagctccatctgtaaacaggggtgatgaagttagcctcatagggctgcagggaggatcaccctgtcaccctacgttgggccgtatgttgggcacatgcaacaggatcggtggtatattttttgatccatgatacttgaatttatttgttattaataatatatgggtcgtagatgtagcatcacattccacactttatggaggaagaaacaagatgagtgaggctatgtaagaagagggaggatgaaactcaggccagctgtgaacttgacaaaatcactatgtggtttggttttagctttgcgcttttctttttttcttttttcttttttttttttgagacagagtgttgtcctgttgccaaggctggagtgcagtggtgcaatccgctcactgggctcaagcaaccctctgaagtagctgggactacaggtgcacaccaccatgcctggctaattttttctttctttttttattgtttagaaatggggtcttgctatgttactgaggctgatattgaacttctggcctcaagcaatcctcctgccttggcctcccaaagtgctgggattacaggcgtgagccactgcgcccagcctgtgagtttattttataactttatatttgtgatttgtgtgtgtgtgtgtatcatagttagaacagcgataccattttcaggagcacactagaaacctagggccatgggtgcaggttgatgtcttacactagtcccagctcctgattaatttcagtactttagtgatagagtgatttccagttgatacaaagaagcagtcagtttttcaaacactcaccttgcaatcttaggaccctctgcggttaaacccacccagaagtctgaagaggaaacagcagtgggcatgtgtgtgaaaattggctggctaaccttggctggccaaggtgctttgaccagcaggggcacccagcacacaacctggaccttgcagtgagctgtgaagctgccactgcactccagcctgggtgacagaggtgtctgctggaagtggctctgcttgtactggtgtggaagtgtgccaatgagcgcagaaaatcaaacaggctttgcagcgcctgtgatgtgtttataggaagtactggagtcggcgcagcagacggtgggaagggaagatttgtcctggcatctgtggccaacctcctaagctggtggatttggggtctgcaggggttccatgtctggtccataacagtgcttctcaagctctccatggtgaaagactagatgactgtttttaaaattttaatctttcatgggccaatttttaaaatatgatgaaaattgttataataaaatggaagatatataaaaaagataagcccactatctgcttattagactcaacagacataggttgctgtgtcaaatgataaaactgtaaaagtttctaccctctgacttttgattctgtacttatctctctcagacaatcacaaagagtgtgtaggccagccccggtcacagagtgcaccgtatcctgtcacttctggatgtgaggtgggtattttttaactgagatttcaaaaagatgggttaaaagtttacttgaaaaaggaagctggcaatgagcatttgcagaacaccccaaacttctggggaatcgttggaaatccctcgctgtcggccaggccctgtgccacagagatgttcccacctttctgctttccttcactcctctggtgggatctgagatttcaaacaaacaacaactacaaaaatcctttttatcatggaagatttgaaacctgtataaaattagccagaagagatgatggagatgggaattttgtgttctcttcacataactttgttagcctcacctcgtgggggtcctgttttgtatgtccccctaatccctagggtgattgtaagccaaatcctagataacttttttttttttgagacaaggtctttctctgtcatccaggctggagtacagtggcaagatcatagctcacgtaaccttgaactcctgggctcaagcaatcctcccacctcagccttctaaggagctgggactacaggtgtctgctaccatgtccagctaataaaaaaatttttttgtagacatggggtttcacaatgtttcccaagctggtcttgaactcctggcctcaagcagtcctcccacctccacctctgcctcccaaggtgctgagattacaggtgtgagccacccttaaatatttaccgttagaaatagttgaattattctcttctagttattttgaaatgtataacaggttgttaactacagtcaccatactgacctgtcaaatactagatctcatttcttctatctaactgtatattagataattcttctatctaactgtctatctttaaccctccatcctcccttcccttcctgaactctgataactacccatctactccctatcttcctgagatccacttttttagcctccgcaccatgagtgagaatgtgatttttgactttctgtgcttggcttatttcacttaacataacgacctccatttccatcagtgttgctgcaaatgacaggaactcattctttgtgatggttgaatagtactccattgtgtatatggatcacatttttaaaaaatctgtttgtccattaatgggtacttaggttgattccatgtcttggctattgggaatagtgctgcagtaaacatgaatgtgcagatatctctttgatatattgacttcctttcttctatatacccagcccagtagtgggattgttggattatatgatatttctatttttagtgttttgaggcatctccatattgttttccacagtggctgtactaatttgcattcccacaaacaatgtacaaaggttcctgaaagggtgagtttaaacaacataactgcagaatcatagtcatgtctgacaaataatgatatcttgacatcctcacatacgcactcagtgttcagatgagcagggtccagtgaagagcagcacattctcatggttggatcttgttcctctcacagcctgtaggcttcccttcctctctctcatctctctctcatttatccattctatacttggatttattgttgaagaactgtgtggggtttccctgcacttggattctgctgatgatggacctttgcaagttgctctgacctttgcgtttcttgtgagtcggtggattgatctagaagtgtgatcagattcaggtttgaacttttgggcaaggatgttttataggtggtattgcattctcccgttcagacccctgcctggactatacagagaagtcggtcttttaattgcctcatgtgtgtgaagtcaccttggtgagtccccagctgaccctcgcccatatctttttctccttctgctggtccgggctccccgcttgttctgacatcaccctggctactctgtggagagttggttctggggtagcctgaggaggcagcactagtagcagggacactgctagtatgttgtgaggagggtcccagtggagatgatggggcctgatccaggtggtgtccaaggggtggacaaaagtgggcagattctgcagcaccagcctcatccttatgagagaagctactaccccctaggcctctgcttctgtgtctgcttttcctccccggatagtgcatttttatataccagtcacatgacaagcgtttattgagtgcctgctgtgtacgtggctctgggagcttctagctctcccccactgctgtctgtaagtgaatgcacatggcaggaagagcagctccatgatgggctctgccaggtgggagcttggtaactcctggcctctgaagcctgcccatgaggagagccttcatctcccctggagagggaacagcagttgtctttcttttgctgctatgtgactgcataagagctgggacaccagcgccttctatcccctcggtctgcctctggctgtgctccgggttacccatacccacctccctactttcacccgaggccctctgtgctgcagatgccactcacccaggcacagtgcagcccagagtgcagggagtacacatctggagcacagtggccagtcttcctcaggggccagcctgaggcactgtatcccccatcccctagtctatcaggtgcttgactctgggaggggcccctaagggattcgggtctccccagcagcgacctctgttgtaccctgcctcctacccatggctgggcgcccgcagcacctgcacagactggatccacagacacgcctgcaagggagaagaaatagtaggttaccctgaggagccatccgtggaggttgagcggcctgggccccccacccttgcctgggtgttagaactccaggtttccaatcttacagtctctttttttttttttttttttttttttttgagacagagtctcactctgtcgcccaggttggagtgcagtgatatgatcttggctcatggcaacctctgcctcccaggttcaagcgattcttttgcctaagcctcgagtagctgggactacaaggcgtgtgccaccacacccggctaatttttgtatttttagtagagatgaggttttgccatgttggccaggctggtcttgaactcctgaccttaggtgatctgcccacctcagcctcccaaagtgctgggattacagatgtgagccaccgcgcccggcctcccaccttacatacactctgcttttggtatagaccaccgtgaaggttttagaaagtggtgaagcagctagagagtggagggatgtgtgcagagggcagaggcctggaatgtggagcacaaggttcccaggctgaggaagcacccacagtggggcagcagaggggaggcaggagggcagacttacttcagaggagccacaggcatcggaggtgcccgcagaggccagcgcccacgccttaccaacaggaaaccctgccctgggtcacacggtgcggcctggcagagctctgatgcgatgtcagacttcagggctccacctcgggttttgttggcagcctgtagcctcagcccagtcccatctgcccctttttaccaagaggatccagagggcaggtgggctacgcccgagcagccagggcacaaggggccaagtggtatggcctcgtccacactgtccagaatcatctcccaggtagcagtttccaattcagttgttaattatgtatcaatatgtgggagatgagattcctggaaagagaaacttgacactaaagaaaatgcccttttttttttttcttttagagacagggtcttgctctattgcccatgctggagtacagtggaacagtgctagctcactgcagccttgaactcctgggctgaagtgattctcctgcctcagccttctgagtagctaggactataggtacacaccaccgtgcctggctaattaaaaaacaagtttttttttagaaaaaatttctgggttttgctatgttgcccaggctggtcttcaactcctcaactgcatcaagcaatcctgcctcagcccagaaaatgctttcaaaaaattgttttaaacattttaattgaggtgcaacagacatacgaagtgtccatcatgttggttttgatctgtgtgtatgcctgggtaaccatcaccaggtctggatctagaacattcccagggggtgccttctgttggtcctggcacaggtgtatgagctcagcatccacatctcagactgcgcaggttgggtttgctgtaggccacgtgcagcctcatcccctgcatgtgtccccttggccagcatgacgcagcgccagcctcaggccaagctcagcacatggtgggaggcaagggcgtggagccctcagccagggatgtgggctttccacagctcatctcactattagcctgttgaggtcccagtaagtggcacagagaagtcccaggatggatgtggtcagtggtgaggagggcaatccatgcctgagggaaggtgaggagtgagtaggtgaaaggaggttagcacctgtacctggaggagagaacagcatgtgcaaaggccctggggaggaagggaaggtggaccatgcacctggatcccagggagcgatgctcacagtgggatgatggctacagaggccggggcctggcctggtcgggcttaggacaagagggcctggggggccatgaggaagcttgtcccactgtcttagggagatggaggcctgggttgggggtggcatgagattcctgagagaggaggagcagctgcccagggttactccctggaccaccaccgcctctgggcccagccaggtctcattctcaaactgggatccttcccaccctgggccactgcactgcactcccctcagcccaccacagggctgggtattcagacggttgtgctcctgggaggctctgctgggctgtaggaaagcagccaagccttcttggcttgagacccctggcatgggaacttggtgtcttgcacctttttgcatgctgactatgaccttttggcttctgtgatgtggctttgttggctgggcctgtggtggagggggtcccagcctttggcttgacatggggcaggggctcgacctcttcaggctcgtttccctctctgtgacatggggctgatggtgacggagtgatgatgaagaccctccaccccacccagcatctttggtgacttaaatgtgataacccatgtgacgtgctcagcaggggtagctgctcctgttaatataactcagtttggtcccatggtttaatggagctgtatgatcagataaaggcagccacagagcagtgtgttcttacccacacaaagcccagcctagcatgtagggaatcttgttcgaggtctcacagagattgcaggtcaaagccagtactagaaggccagatggaaaaaagcaggtgacctgccctgaatcctcctttggcaaatgacccccagatgggcacaggtggccatggcccttaccacatgttttgcagtttccccaaaagactgtcatcatcagcctggcctgtgggcacagtgacaggtgtgaaggtcaagtgcaagcctggggcagtgctgacttcagggtgccaagattcagggctgtaaagtaactttctgggctttgaagctcatgagtagctgagctttgtgctaggcctacctgagccttgtccacaatgggctatggtggccactttttaaatgtgttaacagggtcctttcatgtggatggactcactttttaatgggcagtaccctattaggggagtgttaggttgtttataattctttgccactgtaaacaacacagggacagggcccttgtgcttgtttttctatggttgtgcagagcactctcttgattaaattcctgtaagcaggattgctgagacaaagggctatacctttaaattgcatctgtttttctggaaatgttgacatgctcccaggttgtccccaaagtggaatcattatttatcattggccttgtccagcctgagctcctcaaaggctgagcaagtttgaggcatcattttgcatgcaggactaggctggtgtggctcggcctctctccagagttctgtcttctcctcttgggtgaccagtgaaagctaggactgtaatggccaaaggatctaatcctacagggcacagtacactgcactggccaagagctagaaagaaaacatgtgtgcacaccaagatgtggtgaggaagaaagtgctgctgggaggcctgtgcgaagggccctttcaggaagcttcctcagtactctagctgtgcgactctgcaggcagacatgttgcaagtatgggtactcctggaatggtgcgtaagcatcttcttctgggcatgatccttttgcaacttcactctaccaaagttataaaatgtcttgtgcaattggccacatgctcaaaattacatggaaatctgtcttgtcgtataaagcaatccgttttctgaccacaaaatgtagcaaacttgtcaatagcagtctttggctccttttttttgtttttttgaaagagtctcactgtgtccctgcaggctggagtgcagtggtgcaatctgggctcactgcaacctctgcctcctgggttcaagagattcttctgcctcagcctccagagtagctgggattacagatgccttattatgcctggctaatttttttgtatttttagtagagacagggttcaccatgttggccaggctggttttgaacttctgacctcaagtgatccacccacctcggcctcccaaagtgctgggattacaggcctgagccactgcacctggccaatttttgactactgatttgagaatttgaaatgagaattgttagctgatgcaacaaagggctatggcaatgaaagccaccagccataaccagtaggacgtggtggcccccatgtttgttactcctctctctgcttgatccacccactgtggccatcactggcattgggggtgggggtttcaagttgaccaaagccttgcctcccacacagtggtgctacagggaccaggtgtccagcaccaaggccagccggccagatggaaggtgtggcttggtggggctgcccagtgccgcgggaggactcatgtcacatgagtcttttcctcttgactggaaggtagagcaggcaaaagtctgttcttcctcgtgcttgtcagttggcaaagccacatcttcctcttctggtccaggcactagactgggcctggacatggttggtttcaggaaacagagtgggctgggagtgcaggcacccagagtcaaaagggaagccttggatgctacctcaccaacttcagaccccacccatggcagggaggactccgaccccaacacatggaaatgaacacgcatgctatcctgtttttccctgctcccattcctgcccaccttccatcctgccaatgccaggcagctccttccctgcccaggcagcccagggaagtggaaggggctgcttccctggaactcctacctcacaccagtcagtctgcccacccacccagcctgcgggcctgagagggcactacgctagcagcttaggagtccctgtcctcaaggagttccctttgggtagcaggcccctcccttgtgtggggagggtgggagtatcaaggggaggtgttggagcagagttgtgatacggggtggggttttcaaatgattgggacccggaagagtaaatgacctgccgccacctcaggaagaaggcgtctgtcttcactcctgcagggtaggcttgctgccccctggcgaagctcctgttttgcctcttgatcttgtcaattttaattattgtcatttactgcagaccttctgtaaaactacacaacaacaaacacacatgtgcctgtcatctagatcaagaaataaaatgtgattggtgcaaatgaaaacccccaggaatgcctccctgctcagaggttactactaccctcaagtttctttatacctttccccttcatagatttgatttacttaacaagatccagaattcagtcgcatgtaggattttgttggtgatttaaccattgtaagcgtaattcagtggcattaagtatattcacaatgttgtacacccatcaccactatccgtttccaattttttttgcatcacctcaaacagaagctctgttcccccaaacaataactccttgtttcccttcccctcgtctcctagtaacctctaatctattttctgtttctatggatttgcctattccatagaatcatacaatatttgtcctttggtgtctggcttatttcacttagcataatgctttcaaggtccagccaagctgtagcatgtgccagaatttcattcctttctaaggctgaataatataccattatatgtacataccacattttatctactcacctgtttttttttgttttattattattatttttttgagatggagtctcgctctgtcgcccaggctggagtgcagtggtacgatctcggctcactgcaagctccgcctcctgggttcacaccattctcctgcctcagcctcccaagtagctgggattataggcacccaccaccatgcctggctaatttttttgtatttttagtagagatggggtttcaccatgttatccaggatggtctcaatctcctgacctcatgatccgcctaccttggcctcccaaagtgctgggattacaggcgtgagccaccatgcccggccctactcacctgttgatagacatttgagttgttgccacctttttgctgttgtgaataatgatgctgtaaacattggtgtaagaatatctgttcaagtttctgctttcaggtttttggagtatatacctaggagtggaattactgaatcacatggtctgtgttagctttttgaggaactgctaacctgtcttctacagaatttgcaacattttacattcctaccagcaatgtgcaaaggttcccatttctccatatcctcattaacacttgttacttttctttctttttttttttttttgagatggagtctggctctgttgccaggctggagtgcagtggtgccatctcggctcactgcagcctttattatagccatcctgatgggtgtgatagccatcaggatgggtgtgaagtggcaattcactgtgattttgatttatagtttcataatgattagtgatgttgagcatcttttcatgtgtttattggccatttgtgtttctttcttagagaaatgtctattcaagtcctttggccattttctatttgagttgtttgttgttgagttatagttttaaacacattctagatattaacctcttatcagatatatggtttgcaaatattttctcctatggattgtcatttcattcttgagaatgtcctttgatgcagtaaagtgtttgattttgatgaaatataactttcctacaggtagggtgacacaagcacccctgtggccaccaacactgggactgtgctgggtcagacctgaagtcagcacaggactgggtcttgcccaaggcctgctgtaaccactatgtggctaccgcctgtattcacacaaggccccagggctctacagttagccagcggtgaagccagccaggcttgtggccttccctttggggcggcaagtttccccaggccccgggcagatagagatgctttccgggagccaggtactggagtcaaaaacattagaaagctacctcgtgttctattctactgtagctgagctggcactcacaccatgtgacacagtccttcccacttttcccttttcacaggcagaggagcctcacaccatggcgaccaccacaggcccacagggaggactgccaggataccaccagcattcacttaaggcccaagggctcttcagtcagcttgtggtgaatgctgccaggcctgagactcacccttcagggcagtgggctcccctctggcccagggttggtccggaaaggccacttaagagccaaggcctggaatcagggaacccaagagccctcttggtgctctcctccactgtggccaagctggtgcctgatttttggttgctatgaaattgctccctttgtgcagatagttgtcaaacttggtgttcctgtgggggtggggggcgagggggatgattgatggagcaaatagagatttgccatcttgctcttctcctccctgatttcagtcttttaagatgtattaagatttgttttgttgcctaacatatggtctctcctggagaatgttccatgtgcacttggaaaaaatgtatattctcttgttgtagtgaatgttttgtatatatctgttaggtctccaactggtttatagtgttattcaaatcctctgtttccttactgatcttctgtctagcttctgtccattattgaaatctgagtattgaagtctccagttattgttgtaggactgtttatttctcccttcaaatctgtcattgtttgcttcattttggggccctgatatttggtgcatatatgaattgcatgttttaaaacttcacatatatacaaatatatgtgaagatatatatatatatatataatctcatttaggccacagcctcttataatattctttttgtgtgctgaatatatttttaggattcatccatgttgatgtgaggtgctatgtgtccttcattttcactgctgtctggggtttctttgaccaactgaactatacctttttctatgtcctttatatttccacatacattttgaaatcagcatttcaatttccaccaaaaaaaaaaatgcctgctgggattggcattgcatcgaatctataaatcaatttggggaaaactgacatcataaaaatattgggtcttcctattcgtagtatttatttaggtcatctttaacttctgtcaatgttttgtagttttcagtatataggtcctgtatatattttaagtttattactaagtatgtcatgtttcctggtgctcttgtaagtgttattgttttgtcttgtggttgcccatggagggtgggatcaaccccccaccacccaaagttggtttgaatgttgagactaatgacatcacacacacaccaagtggctaccataaggtttattgctcacataatggagctttatagggtgaggagggcaagcacccaggcttgtctgtgaaggaagaggtgagtgttcctggttattattatagttagggagtggagtcaaggtgagaatcccacacgtgaattggatttgcatgacttgaacctccctgttgatactccaggcaggaatgccagagcttttttattcacttgcccaggtgtggggcaagaggggaagagggagggatggagcttgaaagctatcggtagtcaaacatcaaaaatggagtcaggctctattatagttttaaaatactgtttaaaaaggcagtttcaggctcacagcaaaatcgagaggagggtgaagagatttcccatataacctttgcccctacacgtgcataatcctcccattaacaacatcctcgcactaaagtggtacatttattacaaataataaacctatattagcacatcattatcacctaaagcccatagtttacattagggttcactcttggtattgcacattctataggtttggacaaaaatgacctgtatccaccactgtacagaaaacagattagttccccgccctaaaaatcctttgtggcctgcctgtttatccctctcccaactcctggtaaccactgatcgttttactgtctccatagttttgcctttttcaggatgtaatatcgttgaactcatacggtttgtagccttttctgattggcttctttcgtttagtaattatgcatttaagtttcctccttgttttttcatggctttctggctcatttctttttagcactaaatgatattccattgtcaggatgtaccacagtttatttatccattcacctactgaaggatatcttggttccttccagctttgggcagttatgaataaaactgccataaatatttatttcctggtttttgtttggacatagttttcagttcctttgggtaaataccaaggagcacaattgctggatcatgtggtaagagtgtgttgatttttacaagaaatcaccaaactgtcttccaaagtggctgtaccatttagcactcccaccagctatgaatgaaagttcctgttgcctcacatccttgtcagcatgtgatgttgtcagtgtctggattttggccattctaatatgtgtatagtagtgtctcactcttgttttaatttgcattttcctgatgacatatgatgtggacgatcttctcatatgcatctttgccatctgtctgtcttctttagtgaggtgtctgttaaggtctttgggccattctttaatcgggttatctgttattgagttttaagaatatatttatttgtgtatttacatagtagtcctttataaggtgtatcttttgcaaagatttacttctcgtctgtgacttgtctattaattctcttggtagtgtctttagcaaagtagaaaactcacatttgattgaagtccagcttatcaattatttctttcatggactgtgcctttggtgtcataatatataaagtcatcgtcaagcccaaggtcatctagaggttctttctcctgtgttatcttctaggagttttatagttttatattttacatttaggtctgtgatccattttgagttaatttttgtgcagggtataaggtctttgtctatatttactctgtgtgtgtgtgtgtgtgtgtgtgtgtgtgtgtgtctagttattccagctccctttgttgaaaagactttcttgctctattgtgctgcctttgatgacttgtcaaagaccagttggctacatttatatgggtctatttctgggctctctgttctgttccattgatctattcaccaatatgacactgttttgattactgtagctttatagtaaatcttgaagttggttagtgtcagtcctccaattttgcgcttcactttcagtattttgttggccattctgtgtcttttgcctctccatatatactttgaaccagtctgttaatatctacaaaataacttgctgtggttttgactgggactgcattgaatttgtagatgaagttgagaagaactgacatcttgacaatattgagccttccaatttgcgaacatgaaatatctctccatttatttagtttttaaatttcatcagggtttcatagttttcctcatatagatcttgcacatattttgttagatttatacctaagtatttctttgtgatgcttatttatttatttaggggcagggtcttgctgtcacttaggctgaggtgcagtagtccaggctggagtgcagtggctcaatcatacctctctgcagcctcaagctaggactacaggtatgcaccaccacacccagttactttattttttactagttatttttttttagagatggtatatttagtcttttctctcattgctataaagaactacctgagactaggtaatttataagaaaagaggtttaattggctcatggttccacaggctttacaggaaacatggcttgggaggcctcaggaaacttacaatcatggcagaaggtgaaggggaagcaggcatgtcttacatggctggagcagtaggaagagagagaggaggggaggtgccacacgcttataaacaaccagatctcataattcactatcatgagaacagcaagagggaagcctgcccctataatccagtcacctcttccaacattggtgattacaattcgacaagagatttgggtggaggcacaaatccaaaccatatcagatggggtatttctatgttgcccaggctggtctcaaactcctggcctcaaatgatcctctgaccttagcctcccaaagtgttggggttatatgggccactgcacccagcctggggtgctaatttaaatgatattgtgtttttaatttcaaattccacttgtttgttgctggtatataggcaagcaattggcttttatatattaaccttatatcctgaaaccttgctataattgcttattagttccaggaatttttgttgattcttttagattttctatatggacaatcatgtcattagcaaacgaagtttcatttcttccttcccaatctgtaccttttccttttcttgtcttactgcattagataggacttccagtacaatactaaaaaggagtggttcaaagggacatccttgcttcgttcctggttagtgagaaagctttgaattttttaccgtcaggtatgatgttagttgtagggtttttgtagatattctttaccaagttggggaagtttccttctactcttggtttactgagagtttctatcatttaatggatgttaaattttgtcaaatgctttttctgcatctgttaatatgatcatgtgagttttctttttcagcctgttgattatttttgaatgttgaaccagtcttgcatacttgagataaagcccacttggttgtggtatataattctttctatacatactttgattcaattttctagtatttttgttgagtgtttttatctatgttcatgaaagatattggtctgtagtggttttttttttttattgtaatgtctttgtctggttttgttattagggtgatgttagcctcacagaatgagtcaggaagtaatcgtctgtttctatcttctagaagagactgtagagtactggtataatttcttccttaaatggttgatagaaatcaccagtgagcttagtcaagcttggtgctgttttggaaggttatcaattattgattcaatttctttaatagatataggcttatctggagtgtctttctgcttgtgtgagttttggcagcttgtatctttcaaggaattagtccatttcatctaaattatcatctaatttatttttaaagatgtattccctgggtataatttttcaatttcagtaaactaggactagaggtttttttttctttcaatatttaaagttgtcactccattatcttctggattgcatgttttctgagaattttactgtcattgttatatttattcctctgcatatgttttttgtctggctacagtgatgattttctctttattttgaagtttcagcagcttaactatgatgtacttagatgtgtttttctttgtactaatcctgcttgggatgctctaagcttcttgaatccatagtgttttgtcttgcactacgtttgggaaagtctcagcaattatctcttcaaatatttctcctcccttgttctctgtctcttctttccgccttgccctccttccccactatttccccctcagactccagttatctgtactttagtttgatattgtcccagagttgttggttgttttttctctcttcccctctttatatttccagattcttttctgtgctatatccaattaaaaattgttcttctctaacattgtatttttttcttgcatttatgtttttttctatagttttcattgtttggctgaagtttcctatctgtccaccttttcaactatatcttttataatgctcaccttggttaaagtccctgtttgatgggttctaacatctgggtgcattactccttggtctgtttctgttgactactttatctcttgataaggagtcattatttgccttgctttttggtatgtatcctaattttttattgaatgctagaccttgtgtgtaatgggatagtggagactgaggtaaacagtatacctagcaaaggacctgtctttcattctgttgggttgttagtgtggagtgttgtcagtctggtggggagtggtgtggggcctggagctctgaagagttcttctcagtgttccagcagcctcagacataccattcaggaggccccgccacctctgtctcctatgcctgtgcaacggtggacgggaggaggagaaagagcctctgcactccagtggtaggctgctgttacttggtgcagggcttgtggaaggggtggtgagatttatcagggtttccttttgtttcagcctgtcttgggcaggccttgttggtctgagcctcacgggtggggtgttctcaggtgttcttttcaatggaggttttcatgacatatcctgtttcttttctacctctgtgcactatgctgggattgatttgaacattgttaggaaagggccctttcaaagctattgccatttttctgttaaaacgctagcattctacagagtgatctttgaagagtgtagctctgatcttgaacctgcttcaaatccctctagtgctccccatggcccctcgggtcaaaggctttgagctctacagtctcgtgcctctcatgctgatcttccttcagttatttaagtcttgtccttttcccaggccctaaaccatccgttttgaaagcagatgtctttctgtgtattgctgcaggaactgggtggggcagggaacagtgcctagcacatggtaggggctgagcccactgtcttgaagggatgagtacaaatactctgttttctttctcccttggaaagccctttgcccccctgccttccagcaggcagactccagcccagtctccaggttcatacacagggcacagggaagcattttacccctcagttgggggaggggcctttctgctgccccatcccctggcctgtgcctgtccatcctggcacatacaaaacagttctgaaattcctgtgtgtccctcacttcctcctcctagttcctttgagcagccacatcaggctgggcctgctgcaccctgtcccagcaggccgttggtgagcataccctggatatgcggagttaagatttttaaagcccctcttcctgttttagggagaagtgagtcatctcattcccctccgtggatcagaggacttggactagatagaagcatgtggtgtctcctacgaggcctgggccggcctggagccctggcacggggagccctggggcagcagcaatccctgggtgcccgggccctggccagcgcaggctctgagagccgggacgagtacagctatgtggtggtgggcgcgggctcggcgggctgcgtgctggctgggaggctcacggaggaccccgccgagcgcgtgctgctgctggaggccgggcccaaggacgtgcgcgcggggagcaagcggctctcgtggaagatccacatgcccgcggccctggtggccaacctgtgcgacgacaggtacaactggtgctaccacacagaggtgcagcggggcctggacggccgcgtgctgtactggccacgcggccgcgtctggggtggctcctcatccctcaatgccatggtctacgtccgtgggcacgccgaggactacgagcgctggcagcgccagggcgcccgcggctgggactacgcgcactgcctgccctacttccgcaaggcgcagggccacgagctgggcgccagccggtaccggggcgccgatggcccgctgcgggtgtcccggggcaagaccaaccacccgctgcactgcgcattcctggaggccacgcagcaggccggctacccgctcaccgaggacatgaatggcttccagcaggagggcttcggctggatggacatgaccatccatgaaggtagtggtctcccttctctttttaaaaaagcactaccccctaccccagcccccacccatcttggcccgtggctccaggctcctggctccagcatggtcaggaggcatgggcagactgaggctggcacgaccgggaagagatctggcttagtatacccctccaagagtacaacccagagccctgagagtgacccaggatggtgaccctgggcgttctctgcacctctggcccctgttggtgtggataacagagaatcagctctctggacagagagcctaactcctctagggacttgcacatggggaaactgaggcacagagtggtgaagggccttgctcacagcaggacagaggcgagccagggctgacccggggcttctgcctgcctcttgaaggctctcacccctctggctgtgctcctggtctctgtgtcctcctgtttgagggtgaagggtacttttccacctgcctccaggggaccccaggcagatgtggactcagtagggcagggtcttgcagggtctttccgtctcagctttactttgaaggcgggacttgcagtcagagctgggcatatccactctttctttctccagctccttcctcctgcccaggtgccaggggagggcggagccatgcctgaccacctcactccatcctgcaggcaaacggtggagcgcagcctgtgcctacctgcacccagcactgagccgcaccaacctcaaggccgaggccgagacgcttgtgagcagggtgctatttgagggcacccgtgcagtgggcgtggagtatgtcaagaatggccagagccacagggtgagtggactgcagctggggtcctggaagaagggggtgggcagtgaccctggtggtccagctcagagtgggcaggagtcacgccctcacccccagacccacgtgctcatccctgtgatggcggggggaggggcgagtagctgatggcagtgggctggtggaggtgaagaagcccctagtcctgccaccgagaaagggcctatggtgtcagtgcccctgtgtgccatgcctaattcagagctctcccccagtaccttccacaccatttcaaggcaccgatgtcacagaaagctataggtttaaagctataggtttacactagaggttttaaaacccataaatgtgattgtactctatttctgtgttgttggcagggggtctgattgttttgcagcttcatgtgtagatctggttcaccgcttgctctctctaaaccacccacttgaatgcctgctttcatttatctcatgtaagccctcccctcctgtttctaaggctgtcactactgtccagctgtagttgcacctgctggttgctttcaagtagtgactcagtgagtttcctctccttagctctggggcctgtcccgggtgtgccacaggattctacatcccaaggctgtgttctcatggtgctggctagagtagggcgctggtctgtgagtcaggagaacagctggcttttcagggagtgacctggctggacctcttccaggcttatgccagcaaggaggtgattctgagtggaggtgccatcaactctccacagctgctcatgctctctggcatcgggaatgctgatgacctcaagaaactgggcatccctgtggtgtgccacctacctggtgagtccccttctttactgctccccagaggctgtctctgctcaacaaaaggcttagtgtatgtatcttattagcatgaagtggggaggtggtggcagtcagtgatccttggaactatcacattgtccccgagagcccgaaggtttcccaggcctcactggacactgtcatccctgggccccgagtcttgcattgttttccttctccctcctccggctgccctatttcatttggagaagggcaccctgcagcagggagtatctgccctgaagccccactgggtcgggcatgggcgtgtcaccagggcagctctatggcgagaggggtccaggcctcgtccttccatccacaggactcgctggctgccctgagcatgaatgaggtcagctccgtgctccagagcctgctcttcatgttaagatgtaaactttgttttataaactgtctctgatgctcttgagggtcgggctctgtctcttgccctccttgataaccccactccgggagggctaggcctttgtgcctttaggcttcatcatgaggggcccggggaagtgctgcttcatgatgttgacctgcccagtgtcccaataggcttggatgaattcatgcaaggacggtgtagcacgacagggctgcttcctccttccccacgctggcgtgagggtggggctgctgtctgcccctctggccatcaccatccagcaaccgctcaccaagcagtgcctgctgaaggcgtaggccctgccctcacagagggggctgctgagcagggctgacaaggggcacccagaggctgccgtaggagtgagtgacaaggacaggtggccttggcagcatccgaggcaggccagacttggccaggagtgcacacatagtgtctctgggaggcagcctttaagctgagaccagggaactgagcaggagctggtccagaagataagggaataggaaagaatttttcaaaaccggggggatattgagaagcagctgagcccccttggtagccattttctaaaccactccttcccgtatcaggggttggccagaacctgcaagaccacctggagatctacattcagcaggcatgcacccgccctatcaccctccattcagcacagaagcccctgcggaaggtctgcattggtctggagtggctctggaaattcacaggtgagcacgcttaccagtaacctgggaggagactgcctataagcattgagacctccttcctgaggagctgaacaggggttctggccactgggtttgatgcggaactatgccatttaccttagccctgagcctcagtttttccatcttcaaaatggggatgcacagtttcaacctgacaggttgaagcgaggaccagaaacaatagcacatgccaaggagcttggcccagggcctgctggaggtgagactcctcggggcttaggggctgctcctccttacggatgagcagggatggccttgtgctggacagcaggtgaggtccaaggagccaggagaaaaggtggagagaggagactttggggctagactgcagaatcagcattcatctttcaaccttttccatttgatttctagctgtgcctgggccaggaactggtagtttaaaatcctacccatccactcagtctgtatttctcacacacctagtatgtgctgtgtgctgtgctaggtagtgggaagagccggtaaggcaggtggcatgggcagtggcagaattggccctggtagagagcagagctgatgccatccttttggcaaatagctgacattttatggtgtggtgctgggtgagccccctgtgaggggtgaacagatgtggacaggacttgggtccaggcactagagtggagtccgggaaaaggaagaggagcggccaggagaaaggagggaaaccaggagcagccggcccacctgccacggcctgactggctcttctgcctcatcctcttctgcttctcaggggagggagccactgcccatctggaaacaggtgggttcatccgcagccagcctggggtcccccacccggacatccagttccatttcctgccatcccaagtgattgaccacgggcgggtccccacccagcaggaggcttaccaggtgagcaggtggaagagcctcggcttcccaggatgtctccttcccaccaggaaggaagatgctcccatcttccaaggcagcattctccctggtgccatatggctgcagagtgggggacacagaggcctgtcccctgccttccagctgcccagcgtgtcagtctgcgtggtgcatgccaatggtatgactgtttcatgcaggctaggtaccgagcaccagaaatgggacaaacagaggggctgacttggctctgggatcaccacctctgaaagctttgagccatggagtatgaggccaggatgaaagagtgattccttgaggtggtctgtaatcactcgtggaggtgggtaccatgcgggcaaatgctaacatgcatctgttccccactgattctggaagcagaggcccaccctacaggtaaaccagggttgacagaggtcactgtggatgtctatggagggaccgtcactgcttcctctgtgttcttctaggtacatgtggggcccatgcggggcacgagtgtgggctggctcaaactgagaagtgccaatccccaagaccaccctgtgatccagcccaactacttgtcaacaggtacttcacccacctgtgtcttcctgggcttgaacaaacgaatgcctttgtggggttcctgtttatccctgaatcatacccttggactacactttctaggacacaagtgaccctctgtcgtcccccaccgtgtcactttaggctgtaaacttgcataggcagccccgtagtgtcctgggacacatgagataaatgaagtcccagggtttagacagtaggggagattttcagctttcagaacaatctgccatgatgtgcagggagaccacgccatgcaggtgccaggtctgtaggtagagcatttttcctgttgtcactctgagcagtctctaaaagcaaattccattcctgggcctgcctctttgcatgcagcaaaaacgagcactacccactgggcaggttttgcccagcagtggctgcagggtgctcacagccccactgtagcaggggcagggtgtgtgtacttatccctgccctacagataagtcagatccctgatttaaacctgggcctctgggtgggctgtgtccgtgtaggatgctacctttgagctacacggtacagtctaacccgctgtgggcagggacaagcagcctgctggctcagtcccccatggccctgaactttgtccccaaacaccatcccctcagacagcttacagagcctctccatgccgtgaatcttccagtgaggccagcacgggcaaaaggaggggtcctcacctgtttcttctcctcgacagaaactgatattgaggatttccgtctgtgtgtgaagctcaccagagaaatttttgcacaggaagccctggctccgttccgagggaaagagctccagccaggaagccacattcagtcagataaagagatagatgcctttgtgcgggcaaaagccgacagcgcctaccacccctcgtgcacctgtaagatgggccagccctccgatcccactgccgtggtggatccgcagacaagggtcctcggggtggaaaacctcagggtcgtcgatgcctccatcatgcctagcatggtcagcggcaacctgaacgcccccacaatcatgatcgcagagaaggcagctgacattatcaaggggcagcctgcactctgggacaaagatgtccctgtctacaagcccaggacgctggccacccagcgctaagacagttgctgctggaggatgaccagggaagccccctgataagccaagagggccagcacagcccttgctcccaggctcctgcctgaaactatctagcacactaggacccaggtggtaccctactcagtggctgagaattggataaagtcttgggaaatgagacaagtactgggcagtgaatccagctccttttccccagcctttccctgtgggccatttggggaaggccagcattcagcctgagatgttcctccctgcctcctggagggacagaaggggaggatggttaactcctgccgcatcctttttcttgtgttcacgtggcattctctaacccagggcagtggttccttcccaggccatgcacagaggctgggtgcctgccagacccacggagggttcgcgaaggaaggggcatcctccttcttgagctgcaagctttagctgaggcagtaagtcacacagtagttagttcagcctgggctggcacataagtccccagtgtccctgttgagaggggaaagttgcctgctggttgaaaaactggcttttcctttctcgctgcctaatttcactctcagagtgaggcaggtaactggggctccactgggtcactctgagagggttgtggctctggttcttattaaaccagggccaggtgcagggctcacacctgtaatcccagcactttgggaaggtcacttgagctcaggagttcaagaccagcctgggcaacatagtgagaccttgtctctggaaaacaattagctgggcatggtggtacacacctgtagtcccagctacttgggaggctgaggcgggaggatggctttagcccaggaggttgaggctcctgtgaaccctgatggcaccactgcactccagcctgggtgacagggtgagaccctgtctcaaaaaaaaaaaaaaaaaaaaaaacctgagatttttatggaccttattcaaggggagaggagtctggagggaatgccgcttggcttcactaccaaaggttttatgacttagcattttaaaaggttttccttttaccaagaaatgcagaaaccaagagcaaaccccacgtaccagatcactgattcctactgaagcagctagcccgagaaaggactctctcatactggtcttgggaaatgacttggcagcctgagccatcccagcagtggacaaggatggttaattcttattctgtagacgtccacaggaacagactaggatggaaaacacagttaagcacagccatgcaccctgtggctgtagaaatgcccctgtgtgaaagaaaaataaattcaagactggagttttggaggaaaaaaaatacaagtagcatttacaacagctctttgctctttaaatttcttaccattcaataaagtgatccagtcactcacatttgaactgagatgccttctccagactgttctgacaaggtaatgaaaataaaatgcacttggatttttccagacatccacatccaccgtcaagggctgggaagaaaagcattgttgcgtggaaacctgcagctatactaggcccagaataaggacgggaggaaattgggggattccaggctttgctcggatctgagaggattggggcggcttacagactggggccgggggggggggcgtccgacagccacaagttagttttctgagaaaaaccttcgagagaggcagcaggaagaaacccatcacacctctccttttaaaaatcttaagcagctcttgtttaatcttacctgtattttttaaaatttttgttcgaagagagggtcaagaaaaaaaattctaaaccggccaagagacttatttctcctacggagggtccccacctgccccacagcagcagtccatggccatcagtcacctgggtctcggggctgcctgcaagagtgcagaaacaggagttcaggtgccagccccgtaacttggagggcctcgtgcagctttcctgctggagcgtgtgtggattcaggggcaggggatagtcctggaccaaccatgactgtgctgacccttcttctctggaacaggtatggatatggcagggtgacagtcacttagttctaccatctctgtgtcccatgggtgtgtcagtgtctgagaccatggtgggttcagtctggtggctgtattttaaaataagcaaaacgtcatatggtaagaggagcccattggtgatgctgctcaattgcacccaggcccttctttcactctcaaatacttagccatgttctacacaatcgcacaatttggccataaacaggaatgaggttcaaaagaaaagatggtaagtgtcacatgtccagaacctgagcgttcccctgccatgaagggagtctttcattcaccccaggaggagaggctgtcacctgaggaagccagcatgggggagaaaggcacttgctacaaagtggggtgcacagagggtacccccccatcttcagtctcatagggaattgggccccttggccaaaagcttgcagtacctaaaaacagagaaacgtgctttgcaaaaatggctcaaagagcacaacagaatgcgctgtccatgtgcccagtgctctcaggagccctgacctattgcagaagcctgtgttgaagccgctgcactagtagaaggcagctcctgatggaataggggataggggtgggctgtgtgggagccaagagcatctggcagcctgactggagatggtgagttcctgaagcaggagttgtaggcacccaaacatctagtctttctgcttgtagcgaaggttgcaggcatcatctccacgaattcaaatagattcttcttggctaggcatggtggctcacgcctgtaatcccagcactttgcaaggctgaggtgggtggatcacttgaggccaggagtttgagaccagcctggccaacatggtgaaaccccgtctctactaaaaatacaaaaattagctgggcatggtggtgcacgcctgtagtcccagctacttgggaggccgatacaggagaatcgcttgaacctgggtggcgcaggctgcagtgagccaagattgcaccactgcactccaccctgggtgacagagtgagactgtctcaaaaaaaaacaacaaaaaaacagattcttctccagccaaccatgtcccgccactcagaagtggtttcatgcttctactgataagccaacttaacatcagatccaatacagattttttaaagataaaataccatctctactggacctgtttagtggctcaggctgccctcacaggacatccctgagaccaccctgtcactcttgatgttggaaccagggcccaggcctgctcctcattgtctcctgccctcctagtccccaggagaggaaaagaaatactgttttagagaaataacattttcaacaaaacatccctggagtcagattttgagttggggtgggctaatcagggagtcggggctctctgcgtgatgtcagttctatggctaactggtttttctaaaccagccagctgcctatcaaaacagtacaacttttctaggaaatgcaattggcaaagacacttacgatgctgagaagtacacaaggtgaaactgctccagtttttctcatagcagggtcagcaggaaagcaagtggtgcccctggtcccatctcacacaggtgagactgcaccgagaggtaacgtggccctcacagcccaccacgcctggccttcgcccaattctgaaacttcgtaggatagagctggaaagtgccacatggtgaagcgagatccagctgtctgggtggatgtcggagtccataggctgagcagagatggttcttagtgaggttctcgctgccagttgacggtgaaatcatagctgccatttacattttgtgagattatgaaaaacataagactaaagaaactaaatgtgttattcctgtggacacaaaaatgtgtgtttttcagatggggaggggaccaaaaaggaaaaacatttcatcttaaaactttcctaagacaagggaaaacaaaaaaccatgctctacaacttcaaatttttcttacaaagaaaaatttaatattcgatgagaggttgaaccaggcttaaagcagacatactaggaaatggtgcagcctgtaagaatgccagtttgtaagtactgactttggaaaagatcatcgcctctatcagacacttagggtcctggtctggcaattttggcctgatgtgatgccacaagacccaacagagagagacacagagtccaggataatgttgacagtggtgtagccctttaggagaaatggcgctccctgcggctggtattaggttaccattggcaccgaaggaaccaggaggataagaatatccataatttcagagctgccctggcacagtacctgccctgtcggaggctctcactggcaaatgacagctctgtgcaaggagcactcccaagtataaaaattattacacagttttattctgaagaacattttgcattttaataaaaaaggatttatgtcaggaaagagtcatttacaaaccttgaagtgtttttgcctggatcagagtaagaatgtcttaagaagaggtttgtaaggtcttcataacaaagtggtgtttgttatttacaaaaaaaaaaaaaaaaaaaaaattaacaggttgtctgtatactattaaaaattttggaccaaaattgctacctatcatctatctttttgattgcagggaatccctgccaaggtaacctgacagtcggcctaattctgttgacagaaaatgaagccttgacggttctaattatccaaaagtgggttttcatcaggacgtacagtcagagtgtgagtgcattctaatgaaaacttcagccctcattcaattgcatataaaagccctcaaagagaacatacagtacagcagttttgtaaaaggcaacaatacgatttgtacagaccccgacactccaatcctatagatcaccacgttgctcctctgtccccagcaccccttatttcttaagcagcaccaccagtccccagaggacaagagcagctatatctcatccacctatgcatttctgcaccagcgatgcaaaaaacaccctgggtgggccacagagaaaaccgtaactatggatacccaaggggcagagcagccagctggacctgctctgtaattcacttacttacttaccagagggtggttcaagtcaaacaaacaaaaccaaagacagttgcaacccatggtggatccaaaggtacagtatcaaaatcatggaactcttgcccaaagaaaagactgcaaatagtcatctggtatatcttgtggaaagatgataggtttatagtgactcaaaatattttagaaaaatttctgtagtgtcaagttctttcaaacttaaaattttaaccccagaggattttcgctgaataaatgagaattggctctatttcttctacttctggatagcccgagtaaaaatactaataatttctagattttagtggggaactacaattattaggacccatggatattgctgcagttcaaatacaatacagtaattacaaaatatagaccatctctttacaaatacaaattatagtatattacaagtcatgtacagtaaatctataattttaaacaaactagtgtatctaagtttacctggttgcgagtgcattattattccagtttacagttgcccttagcgtgacagtcagaaaccgaccatcggagtgatattctcttatgtaaactggcgtcacatcacagaaaaccttatttatgaggtcccattgccctcgcaataatcactggtagctgggttctgacttacttacacaccgtatttcagaacagctaaacaggaaccaggacgcagtgtatttgggggaaagggtttaaaaatggatatgttgggcccagtgactgatatgctagaccgatggctgaggtaacgacacaggtgtgatgatcgtcatcacctttaactttcccctgcaccccgccgccatgccttcagttgggtgggcctggtgccctggtacatgggagaagcagactccacagcagtgcccatctggacaatggggcagggcaggtctggcctcctcacccatcctctgtgagagggcggggcctgctgtttcctgcagctggggccgagcgcatggtactctgccaggctcaaccgcttgggacctgttcctaccaggtttatggctttcttgaggcatgacatctcttatacaaaagtctaattaattgaatattactcccaactagtgcctaaactttcctaactatgaggcacttttcccctggctctcctgcgccccacctgaggccagagccagtctgcccctcgctgggggctacaaggtggtgatgcatatcatttcatccgccaggtcctcctcatccctcccagggtctggctcttcgtcgctgtagccaggaccaaagtcctgtagctcatagtcctgccggtgtgagagggggcccacatccccgttggctcggggacgcacgttcccattaagcagggtgctggctgcactctccatctcgtcgatggtgaggtcacaggcatcagcgatttcgtgttttgttgctgacacaaattttgggtcccttgcatagcgtcccaagccttcggatatcaggacctgtacagaaaagagggatggatggcatgggggtgttataaggctttgcagggcagggggacgacagaaaaatcaactccagtgctaacttaactgcaccgtgtgctttggggatgcagctcaatcatgttttctagacctcatacataataactagtgtaaatggctttgaaaatgtcctggagctaaaaaactacacatggcccaacaagagtgaaacccactggggaaagacatttagtataaactagaaacatatgccggaacagcacccataatgccagcacagctcatttatgagaattgacggtggtgaccagtttttgttttttgttttttttttttttttttttgagacaagagtctcgctctgtggcccaggctggagtgcagtggtgtgatctcggctcactgcagcctccacctcccgggttcaagcagttctcctgctgcagcctcctgagtagctgggattacaggcatacaccaccacgcccggctaatttttgtatttttagtagagacggggtttcaccatgttggcaaggctggtctttgagccgctgacctcaggtgatccacccgcctcggcctcccaaagtgctgagattacagacgtaagccactgcagccagtggtggtgaccagtttttactcatgcttcaggtacattcctgctgctcagaagtgtctgattgaggcagcctagctcacagcctggccgccctcccaccactgcccttcctgctgttacagttgcacctctgctgctcctggtgcttcctgcccaccacggccaagaaccgtactcactgcctccaccaagctgtccgcactcctctgcttgtcgctgtttttgttccggaagctgctggggacagtcaggctggctggtgtgaaagtccggtaggagatgtcgggctcgtctgtgtaccaggagctgcggtgcagggacggcaggctgccgttcacctggtccagggcctctgactgctccacttggatcaggggggtgtagcacggtgtccagtcccggtagggaggggttgctggaggggtggcccacgaccgggtcgagtgactcggtgagtacttctgggctttacttgaatctaggccggcaactgccatgatctgaggaaagaggggactgttgggagaccagaggttctcagaggtccgggcctcaaaccttctgcgcacagaccaagcaccggcgctgcgctcgccaggggcagtccaggcaaggacttggaaaggacatgggcacactgaagtacgctgaatgaatgggcggtgatgactttgttttctagcagactgtgctttcttttaccccgaatccataatgcatttcctttggcttttcccaaggaggtatcagttgctaattcatgaaattgcttcagaatgaagaatcagggaagcccaacaagctgtgggtgtgaacacaccacccagttcatgctgggtttaaataccgaagtacattcaggggaaactaccacttcccagcacttataggaaaacagctggttctctttgctctggagtaatgcatcctagagccggcatttggcatgtgctaaagcactgggtacaagccccggtcttacaatcccaccacggcagatgcaccttggggttcacactctgcagagagggacggggaacgctgtctgtaaacagcacaggtccatgcccaccaccctgtcgtgcacgaatgaatggcatctctgatgtgatattttcagaaagaaaaagcgccatattgttatccttgagggaaagccctagtgagtgggctccggccccaccctcttgcctgtgcagccgccctcaacgtgggcaaactgttctccccagactgctccctttgtaggcaggggaggttaaccctgcatagtacccacagggccctgcccatggagggacccataaacttaatgaaggaaccacttcttagagaaaatgaagggctgcaccgcttgttcagaatcagccaagtggcccccactccctgagctcagatcacatcaggctctgtattcaatgccaggaagaggtggtggggatcgcagggaggcacctgggcagtgaggccagctttggcagctggctccctggattcaaatgccagcagtcacttgtgtgagcttgggcagcatgggactcatggccatagctatttgacaggattgttacaaagattaactagactgtaggtgaagattctctccttccctcctggtgcttaaggccaaggagaagggagtgacctgatgggggtcctatgtggggtgcccctaggtgtgggggcaaggccaggtgggccgctcacctgttgctgcattagatgcagaggcagggccgtgcgatgggggaagatgggagacgacgggacctcttcctggctgctctgccggcgcaggcactcaaagttgaaggaggatctccggtgggctgggaaagcaaagggcatcacacagctgtgaagcaagttctctgccgggacaccgtctttcagagtcagggtggccccggatgctcagcaacgagcccaggaagaagcatgcggtttgtccaagagaaagattaggtagtgaggtctccaaactttagtaggagaggatgaaggcagaagccccagtgagggatgttttttaaagtacaaacttactactttttttttttttttgagatggagtctggctctgtcgcccaggctggagtgcagtggcgcaatctcagctcactgcaagctccacctcccgggttcacgccattctcctgcctcagcctcccgagtagctgggactacaggcgcccgccaccacgcccggctactattttgtattttcagtagagacagggtttcaccgtgttagccaggatggtctcgatctcctgacctcgtgatccacccgcctcagcctcccaaagagaacttactacttttaaacgttcgcctgttctcaggaggaggagtgaaggcagcccatagggcaactgatccgagtcagaagccctggccctgcatactgtggggagcgcacagcacttcagtgcaagaacacaagtcctgccagaaccccacgacacttcccactgtcaccttccagataccctaagtgtccccagcagctgacatatcttgctggggctcctgtgtttacacctgttttaaagggagggactttacctgcactgatcagcttgaccaggtaataagcaaattatttttgttgggaaagattcagcttctctagcactgaatacaaacaaaggacacctctaattttaagaaaatgcttgtcctgctaacagctcttccaacagaggctcacacagaggttaacaagacaatccacagctcccagcttcacagggcaccaggcccgggagatcagtctgaattctggggccctaagacacagccagcagcctcctcccagaaacctcctaccccttgcaggggcctctgtcgagagcacacctatcgtttacaaggcatttctatggctcctatcttgaccgctgcttttctcggatcacagggcctcctttctcagccctggcaaaactccacatgcccctcattcc

SEQ ID NO: 467 - DNA, 2238 bp, Homo sapiens
ggctagtccctctgagacgagcgagcaggcagccattcactaacatgcgttcattccacaatcacaaagagtgtgtaggccagccccggtcacagagtgcaccgtatcctgtcacttctggatgtgagggagaagtgagtcatctcattcccctccgtggatcagaggacttggactagatagaagcatgtggtgtctcctacgaggcctgggccggcctggagccctggcacggggagccctggggcagcagcaatccctgggtgcccgggccctggccagcgcaggctctgagagccgggacgagtacagctatgtggtggtgggcgcgggctcggcgggctgcgtgctggctgggaggctcacggaggaccccgccgagcgcgtgctgctgctggaggccgggcccaaggacgtgcgcgcggggagcaagcggctctcgtggaagatccacatgcccgcggccctggtggccaacctgtgcgacgacaggtacaactggtgctaccacacagaggtgcagcggggcctggacggccgcgtgctgtactggccacgcggccgcgtctggggtggctcctcatccctcaatgccatggtctacgtccgtgggcacgccgaggactacgagcgctggcagcgccagggcgcccgcggctgggactacgcgcactgcctgccctacttccgcaaggcgcagggccacgagctgggcgccagccggtaccggggcgccgatggcccgctgcgggtgtcccggggcaagaccaaccacccgctgcactgcgcattcctggaggccacgcagcaggccggctacccgctcaccgaggacatgaatggcttccagcaggagggcttcggctggatggacatgaccatccatgaaggcaaacggtggagcgcagcctgtgcctacctgcacccagcactgagccgcaccaacctcaaggccgaggccgagacgcttgtgagcagggtgctatttgagggcacccgtgcagtgggcgtggagtatgtcaagaatggccagagccacagggcttatgccagcaaggaggtgattctgagtggaggtgccatcaactctccacagctgctcatgctctctggcatcgggaatgctgatgacctcaagaaactgggcatccctgtggtgtgccacctacctggggttggccagaacctgcaagaccacctggagatctacattcagcaggcatgcacccgccctatcaccctccattcagcacagaagcccctgcggaaggtctgcattggtctggagtggctctggaaattcacaggggagggagccactgcccatctggaaacaggtgggttcatccgcagccagcctggggtcccccacccggacatccagttccatttcctgccatcccaagtgattgaccacgggcgggtccccacccagcaggaggcttaccaggtacatgtggggcccatgcggggcacgagtgtgggctggctcaaactgagaagtgccaatccccaagaccaccctgtgatccagcccaactacttgtcaacagaaactgatattgaggatttccgtctgtgtgtgaagctcaccagagaaatttttgcacaggaagccctggctccgttccgagggaaagagctccagccaggaagccacattcagtcagataaagagatagatgcctttgtgcgggcaaaagccgacagcgcctaccacccctcgtgcacctgtaagatgggccagccctccgatcccactgccgtggtggatccgcagacaagggtcctcggggtggaaaacctcagggtcgtcgatgcctccatcatgcctagcatggtcagcggcaacctgaacgcccccacaatcatgatcgcagagaaggcagctgacattatcaaggggcagcctgcactctgggacaaagatgtccctgtctacaagcccaggacgctggccacccagcgctaagacagttgctgctggaggatgaccagggaagccccctgataagccaagagggccagcacagcccttgctcccaggctcctgcctgaaactatctagcacactaggacccaggtggtaccctactcagtggctgagaattggataaagtcttgggaaatgagacaagtactgggcagtgaatccagctccttttccccagcctttccctgtgggccatttggggaaggccagcattcagcctgagatgttcctccctgcctcctgga

SEQ ID NO: 468 - protein, 584 aa, Homo sapiens
MWCLLRGLGRPGARGALGQQQSLGARASAGSESRDEYSYVVVGAGSAGCVLAGRLTEDPAERVLLLEAGPKDVRAGSKRLSWKIHMPAALVANLCDDRYNWCYHTEVQRGLDGRVLYWPRGRVWGGSSSLNAMVYVRGHAEDYERWQRQGRWDYAHCLPYFRKAQGHELGASRYRGADGPLRVSRGKTNHPLHCAFLEATQQAGYPLTEDMNGFQQEGFGWMDMTIHEGKRWSAACAYLHPALSRTNLKAEAETLVSRVLFEGTRAVGVEYVKNGQSHRAYASKEVILSGGAINSPQLLMLSGIGNADDLKKLGIPVVCHLPGVGQNLQDHLEIYIQQACWITLHSAQKPLRKVCIGLEWLWKFTGEGATAHLETGGFIRSQPGVPHPDIQFHFLPSQVIDHGRVPTQQEAYQVHVGPMRGTSVGWLKLRSANPQDHPVIQPNYLSTETDIEDFRLCVKLTREIFAQEAPFRGKELQPGSHIQSDKEIDAFVRAKADSAYHPSCTCKMGQPSDPTAVVDPQTRVLGVENLRVVDASIMPSMVSGNLNAPTIMIAEKAADIIKGQPALWDKDVPVYKPRTLATQR

SEQ ID NO: 469 - DNA, 2252 bp, Homo sapiens
gggccgggccgcggccacccgctcctcccgctccggtcccgactgtcgggctctcggccgagtcgccccggacaatcacaaagagtgtgtaggccagccccggtcacagagtgcaccgtatcctgtcacttctggatgtgagggagaagtgagtcatctcattcccctccgtggatcagaggacttggactagatagaagcatgtggtgtctcctacgaggcctgggccggcctggagccctggcacggggagccctggggcagcagcaatccctgggtgcccgggccctggccagcgcaggctctgagagccgggacgagtacagctatgtggtggtgggcgcgggctcggcgggctgcgtgctggctgggaggctcacggaggaccccgccgagcgcgtgctgctgctggaggccgggcccaaggacgtgcgcgcggggagcaagcggctctcgtggaagatccacatgcccgcggccctggtggccaacctgtgcgacgacaggtacaactggtgctaccacacagaggtgcagcggggcctggacggccgcgtgctgtactggccacgcggccgcgtctggggtggctcctcatccctcaatgccatggtctacgtccgtgggcacgccgaggactacgagcgctggcagcgccagggcgcccgcggctgggactacgcgcactgcctgccctacttccgcaaggcgcagggccacgagctgggcgccagccggtaccggggcgccgatggcccgctgcgggtgtcccggggcaagaccaaccacccgctgcactgcgcattcctggaggccacgcagcaggccggctacccgctcaccgaggacatgaatggcttccagcaggagggcttcggctggatggacatgaccatccatgaaggcaaacggtggagcgcagcctgtgcctacctgcacccagcactgagccgcaccaacctcaaggccgaggccgagacgcttgtgagcagggtgctatttgagggcacccgtgcagtgggcgtggagtatgtcaagaatggccagagccacagggcttatgccagcaaggaggtgattctgagtggaggtgccatcaactctccacagctgctcatgctctctggcatcgggaatgctgatgacctcaagaaactgggcatccctgtggtgtgccacctacctggggttggccagaacctgcaagaccacctggagatctacattcagcaggcatgcacccgccctatcaccctccattcagcacagaagcccctgcggaaggtctgcattggtctggagtggctctggaaattcacaggggagggagccactgcccatctggaaacaggtgggttcatccgcagccagcctggggtcccccacccggacatccagttccatttcctgccatcccaagtgattgaccacgggcgggtccccacccagcaggaggcttaccaggtacatgtggggcccatgcggggcacgagtgtgggctggctcaaactgagaagtgccaatccccaagaccaccctgtgatccagcccaactacttgtcaacagaaactgatattgaggatttccgtctgtgtgtgaagctcaccagagaaatttttgcacaggaagccctggctccgttccgagggaaagagctccagccaggaagccacattcagtcagataaagagatagatgcctttgtgcgggcaaaagccgacagcgcctaccacccctcgtgcacctgtaagatgggccagccctccgatcccactgccgtggtggatccgcagacaagggtcctcggggtggaaaacctcagggtcgtcgatgcctccatcatgcctagcatggtcagcggcaacctgaacgcccccacaatcatgatcgcagagaaggcagctgacattatcaaggggcagcctgcactctgggacaaagatgtccctgtctacaagcccaggacgctggccacccagcgctaagacagttgctgctggaggatgaccagggaagccccctgataagccaagagggccagcacagcccttgctcccaggctcctgcctgaaactatctagcacactaggacccaggtggtaccctactcagtggctgagaattggataaagtcttgggaaatgagacaagtactgggcagtgaatccagctccttttccccagcctttccctgtgggccatttggggaaggccagcattcagcctgagatgttcctccctgcctcctgga

SEQ ID NO: 470 - protein, 584 aa, Homo sapiens; identical to SEQ ID NO: 468

SEQ ID NO: 471 - DNA, 21586 bp, Mus musculus
  misc_feature (1)...(21586): n = A,T,C or G
atatcagtcattcataccaaggtccggggaccaagaactggcagcctgttccgtaaagaccttttcattgttgtgtgaagacaattaaaacatcatccttagatcactaacatgtttaattagcattctgattacctttaatacgacaagcactgtgctacaatgtgtatatattggaaagtctacccctcacacccacacaccttgcttcaaataatattgattgattatgtggcaagcactgtgtaataaatttatgctgatctgagctggaagtgagaaagaaccagtggacacttgagagggagaatggatacttctcaaattggttccaaggtgaatttttttaactaagcagagaaagcccttagtctcgcaactgtcaggtattcaaggaaagcccactattctcaccaaaataagcaaggacaccaacagaaagaatcatctcatctttggcaccaaaagatcaggacctccatgtggcattttacttgtagatagtattaggacaaatctcttagcaaacctgggaagataaaaggcaaatctagggggctgacgagacggctcagtggttaagagcactgactgctattcccaaggtcctgagttcaaatcccagcaaccacatggtggctcgcaaccacccgtaatgagatctgacaccctcttctggtgtgtctgaagacaactacagtgtacttacatgtaataaataaataaattttaaaactttaaaaagaaaagaaaaagtggggagtggtggcgcatgcctttaaaaaaaaaaaagacaaatctaatatatatacacaatgcaggtcaccagataactgtgctggcctgggaagtatttgaaggtcacagagatgcatcaccagaaaaactaggcaaactaacacattccacaaatcacagttcagaaggagttccctaactttcgtacaagccatgtaggaaaagctatggcaagcagctgaggttttttgcagatggcccatcatttgcatggctgccatgggtgtgcgtgagaccaggaccccggagacttcatcccaggattgcctctgtatgcctttcctaccactgttatatagcctaataattcctgggcattagcccaccctactgggcagatttcctgaagatcaatatgaagatgtactttcagataataataatgtttagatgaattaatgactttatagaattagtgatttgattcaagaaaatatagaaagaaaggtttaggagatggttttagttgttttgctagaaaaatataataaaatcagaatcaagaatagaatgtgccccctcctcatagaatagtgagtaaaggctgcataatagagagtacaaagagctttcataaattacactgagaggagaaattggcttggaacaattaatgatcaaagaaaaacattcattcaaggtcagatccaaggatgaagctgatggtatgcaccacgtagcgatgtgaaactttttctttgaacttataatgagcttatagaatgaaactgctttgaacttaccatgacattttccataaatcccttttctgtgaggtaatttcataaagaacttctgtctaagaaagtataaaaggctgagacaaaatataaattgtggctgttggggcactgctacatttatcaaatgtatgtgtgtcatgtgccatatgtatatatgtatgtgtgtgtgtatttatgtaaacatatacatatgtaggtatatgtgtatgtatataagcatgcatgtgcaattgtgaaattgatgaaccaggtgtgtactggctagttttatgtcaacttgacacagctggagttatcacagagaaaggagcttcagttgaggaaatgcctccatgagatccaactgtaaggcattttctcaattagtgatcaagggggaaaggccccttgtaggtgggatcatctctgggctggtagtcttggttctataagagagcaggctgagcaagctaggggaggcaagccagtaaagaacatccctccatggcctctgcatcagctcctgctccctgacctgcttgagttccagtcctgacttcctttggtgatgaacagcagcatggaagtgtaagccaaataaaccctttcctccccaacttgcttcttggtcatgatgtttgtgcaggaatagaaaccctgactaagacaaggtggttaggtccagccaagtgtgtgtgtgtgcgcgtgcacccacatgactttctatccttttctatttcaccagcctcaggttttgcccttcctttgtgttgtcaggtcagggtcttaggcagaaccctactgctgagggacaacaccatcactgagaagaagagctttagaagaagaaaaccttggagctgagagtgtagctcagcaaaggaggctcagataaggttacatcagaaagcagacagacactcaaacaagacaaaaacaaaccaaaacaaaaacaaaagccgggcgtggtgatgcacgcctttaatcccagcactcaggaggcagaggcaggtggatttctgagttcgaggccagcctggtctacaaagtgagttccaggacagccagggctatacagagaaaccctgtctcgaaaaacaaaaaaaacaaaaaacatttagagtaaccttaagagattgtctgccttcagtgtgtgtaggaagacagcatagtgtggatgattagctgaatggtagcacactgacttgcagaagacaagatgaagtcacagagaggacattgacttgctcatgtcactacaagacctctgacaaaggccgtgtgagccagtttgctctgtgagggaaataatgagcgccctgctgagctgtgctttcccagtcctctgtgagattagaaataaatccaggatgaagaaagagacagagagtgaggaagggcatgtgggtgggagtgggtgtaagagacactaactattagtgtattttaacaaacactgttaaacttaccttaatgacaaaggaattcatttttaattttccccagctttaaagactttaatgtatataccctcccccactttcgtttacctaaagggccagctgcagtctcagaatttaaactactgaaaaagctggctccttcccccctttccttcattttctttgtgcagatgaggcttttagaactagttaatgtgagaatgaactgcagctgcctggtgtgctcgctcctcagagctcactctcttgattaggagaaaagttttcccttgtccagaaatttcagttagagtgggggtctcttttattgtgacatcaaacttattggtttgtagcagggtggagggaacagagagatttggagactcttcttagacagaagcagtaagccacagagcagctaaggactggcttttctggaaaagtgagagtcatcttcaagggacagaaacaaggaaaggtatcaggactctaaagcccaaagcaggtctgggcacagatggccaagactgaagttattggttaatagaaggatccatgttctccaaaggagccaggctgagctctctgtgcttctgcattgagcccctcaggtggctgcagcctcaagtgacttccattccatttgcaagaagctcttctgtgctgccatggtgctaatggtgaactgaaggaatgcagaagatggagggtgtgtggtgactaggggttgcccactgtcctccagatcaggcttcctggatggaactgtcctgccaagcctcctggaaggaaagaggtgtgcttgaagaagttgtcttcctagggcttccttccttcctgtttttttcctttcctttttccttccttccttttctttcttccttctttgctttctttctcactacctttttatttcttctctctctctcctctctctctctctcttctctcgctctctctctctctgtatgtatgtatgtgtacatgttttctatggaagtgtgagaagcatttctgcacctctaaaaactccttggggagacttgatgagtctgagtgaggcagagggataaaggcaactgcatgctgtgggcaggtgagaagccaggagatggatctcagtgggtctgaaaggagcaaacaacctacttcaaagtcatggcggccatcattcctcttgatcacgcccatcgagtaaggctccccacctctcctttcgcccctctccacccctacatcaactctgagaagagatctttccaacatccaagccctgggttgagatcaagcaggcacacagtccccttttccagatggtcgacctgacttgcctgtgagttcagcaggtgcagtcacagccctatctccagaacacacagaccttatctcctaccccacctcagactactgacactatcagttttcttccatttcaaggaaagaggctcattcaccagatgccctttcccactttatcagttctaagtcttcctaaatggatcagacgttgaccagccttttagaagaaagacatgtggcactcgccccctttctctctgtgtgtatggtattagtgttgttgtcattacagcagaccaaattctcttccaacctggttgttcccaggtctctttcagtcactttagggaaattttacctatctctggcagcatttccctccagagcaggcaccagtatccccaacccaaagctgaggggccactcacttgtccaccccagctcattctctgcagctcacctcccagggtttctttctttttttaaatatttttattaggtattttcctcatttacatttccaatgctatcccaaaagtcccccataccatcccccccactcccctacccacccactcccactttttggccctggcattcccctgaactggggcatataaagtttgcaagtccaatgggcctctctttccagtgatggacgactagggcatcttttgatacagatgcacctagagacacgagctccagggtactggttagttcatattgttgttccacctatagggttgcagaccccttcagctccttgggtgctttctctagctcctccattgggggccctgtgatccatccaatagctgactgtgagcatccacttctgtgtttgctaggcccggcatagtctcacaagagacagctatatctgggtcctttcagcaaaatcttgctagtgtatgcaatggtgtcagcttttggaagctgattatgggatggatccctggatatggcagtctctagatggtccatcctttcgtcacagctctaaactttgtctctataactccttccatgggtgttttgttcccaattctaagaaggggcaaagtgtccacactttggtcttcgttcttcttgagtttcatgagtttagcaaactgtatcttatatcttgggtatcctaagtttctgggctaatatccacttatcagtgagtacatattgtgtgagttcttttgtgattgggttacctcactcaggatgatgccctccaggaccatccatttgcctaggaatttcataaagtcattctttttaatagctgagtagtactccattgtgtaaatacctcccagggtttctgtgtgaaaggaccccttgttatgagaaagcaggaggagggagaaaactggcagttggaacggctcttaaaaagcaggagagccagtgaagcaggggaatgtttagagcaaattgtgctgaggagaatttcatggaaaaagaaacatacccatacacttaaaataaaatttagtgaaaagaccagaaaatgtggacagaaaacacttagaaggagaagcactcacactgggcactgtacacttaccacatatcaagtgtctgtatgtgaccaagatgaatgttaatgacaaaggaaaaaggaaatttagtccagtgaagggatgtcatgactgccaaaaacaaacaaacaaacaaaaaacttcaacatgaaaaagacaaacaaacattgacttttaaatttgggcaacaaaacctcttcccacacaagggtcagacaggcttggcagcagaagcagaagccagccttgggcacacacagctactcagctttgggcacacacagcttgtcacaacactgggcacctctttcctcagaactgaagaaaactgatagtgtcagtagtatgaagtggggtaggagataaggcttgtgttctggagacaggactgttgactgcacctgctgaactcacaggaaagtcaggtcggccatctggaaaaggggactgtgtgcctgcttgatctcaacccagagcttggatgtttgaaccatctcttctcagagttgatgtaggggtggagaggggcgaaaggagaggtggggagtcttactcgatgggtgtgatcaagaggaatgatggccgccatactttaaaataggttgtttgcttctttcaggcccaatgaggtccatctcctggcttctcacctgcccacaagcatgcagtccccttcatccccctgcctcacacagactcatcaagtctccccaggaagtttttagaggtgcagaaatgcttctcacacttccacagaaattggcccatctctattcttcttagtgactcaaagtcttcaatagtaggtaaaacatgccattctacccttggaagcaagaatcagaacgaatattcaagttggctgggctacaaaccatctggacttttaaaaaggaagagtaagagagaaggagagagagaaagggggaagggaagataagaagagcaagactatttgcacaacgtgcagaagaaaggagaaaagagtaaagttcagagaggagaaaccgagccctcaggagaaagcccagcctgtggagggtgatgatgaccatcttctctaggacaacggaactcctcagcctctctccctatctctatccaatcaacaagcatctccccctctcccctccagtcctccattccccaccatccaatgaggggacaggtctgagtactggcctgtgagtccctaatttgaaaaatctattctacaaccattaaatcgttttaatgcttatttcattttaatctcatgatttcttggcttacatagacgtaagtgagtaaactactggaacatgaaagctaaccttgtgccacattaggtctttgtcacccgtactgccacagcatcctcgttcatcctagggatgctgattttatttgggcaccacatgataagcaatcttaaatttcttccttgaagagctttttcttctgctcctgcgaaagtagttggtagggctcttgcttgcctcacatgcacgaagccctggcttacaccccaagcacctcataaaacgaggtgtggtgtgcatggttgttatcttcaagctcagaggtgggggcaggatgagcaaagatcagagtagttacagaaagcaggcttctgccgagaacaaccttcagccccaaagtgaggcagggtatgggtttcaaagtcctaaatgctgtcattgtttcacatcaggtacaggctaagggagtcatctcacactcccagtgtcctccttgtttacaagggatcacttcccagctgcgaaagaggaaccctttgatctgtcaactttataagcaccataagaaactctttgtttataggtcaggatggggctccctaggagaggtgtacagtcagggtaatctggcctcccctaagctatttcattgtgtattttctccagaaaatgtttgtggttttggtttatctttagctctgtcttactaccttgaatactccagaccaggcacagaagatggtggaaagtggccagcagtggtagagctcactctggaggtctcctctctgggcaggtatcttctctgtcttctccaaacctcctataactattctgaaagatactcttaaaaaaaagacagctgtaccccactcctcggctaccagactactgagacattgggtccggtcttagagttactattactgcgaccaaacaccatgaccaaaaaataaggtggggaggaaagggcttctttggcttatacttccatatcactgttcatcgttgaaggaactctggacaggaactcaacagggtgaaaacctggaggcaggagctgatgcagagggcgtggggccaggggtgggggtgctttttactgacttgctccccatggattgctctaccggctttcttgtagaacccaggatccccatctcagggatggctttatccacaatgagctggtcccttccctcttgatcataaagaaagtacccttcagttggatatgatggaggcattttctcaattgagtttccctcctcagatagctggagcttgtgtcaagttgacataaaactatgcagtacagacctcagtggatgacagttcccgaggcatcccacagctgccgccaacatgctagacttcaaggaagctaagatgcctttggatgaggccctcacttcacacagagactagtaccacactggcagtcctcatagtcacaggaccctctgagctctcctgcatctgctctctctcatcctgcctggtgatgaggtgacagtcacaggataagatcaacagccccccttattaaagcagctagttgaaccgttctggtctggcttgtttgcaaaggccctggccaaggtcaacatgaagtttcatctgcaatgtagggactggtaggctgttcctgccccctccaccactgctgccacttcagagaagaaagtggaagcaaagaaggaagaaactgggagtcggatgatggatgatgacatgggctttcgtcctcttggataagcctcttttgttaacatgcttaactaaaggctgaacctgttgaaaagaaacaaccgcgaacaacaagaagaatttccccaggagtctcatgctagggaaagaaagactgtgaggggccttgtgctagtcagagagggaattgtgtcttagaaagagctttcataccagtctgacaacttgtctgaccaccttgtaggacagactggagtcaagccagggatgagtcagtgatgggtggggccaaactttgatcctgattgattatttatataataaatgccttttgtcatccacttaagcctaaagctcatgtcaggacccttcacaggacttttggacacctgcctctgccccccaagtgttgggattaaaggcatgagacaccactgcccagcttttttttttttaatttttttctttttcagatttatttatttattttatgtatatgagtacactgtcactgtccttagacacacaccagaagccaccatgaggttgctgggaattgaactcgggacctctggaagagtagtctgtgctcttaactactgagccatctctccagccccttcactggactctctttactccctttcccaattagccacattgaatgcactgtatttttccacttttttgatattatttgtcgataattggtctattgaggatgagtggctgagtttggcttggcaagtctgccacaacccagactttcaccctaccaactccactagtagggaacccttcaagctgcagacaggacggcctcttattttctccccaagagaagcacggctgggagatctggaattctgactaccatcaatttgattcaaatagagaaggagggcttccctcttccatgattcccaggatctctgtgtgtcctttgttaacctccaggttgtatatgatgcaaacagcatgctcataaattacaaggctttgtgaaagactgtgaagtgtatgtgccattgtccctgtggctagctctgctgccccttgggaatcagcacaggaggcacaaaaggtgttttctctttcctggcagccttctggggatttcctttccaaggtttcaatgcccttgtttttattattcagataagattgacccagatttactccgcccattttttcttagaagccaaccccttggaatccttttaaactccacatcacagagactgtgtgactgaagaaactgacttccaattcgtcttggagttcaaactaaaattttaggtaagtggcctcagtaactatttctgcttgagagttagaactgagagagtccaggccaggcactcttgactgacaccaactccagaaaagctgagcccagcaaacagctggaggcaggggtggaggcatggcacagtcagatataaagaacgagtgggtcggggaggatggagctcccaagctggggaagggagcacgtgtctttagactaaaacccaaaccctgtatactgccagagtcaggcactagaccaagttcccctatgtcataagataatgagactacagccacagtcctggatgtcagtaaagacccagaaatacaacttagcttaaggcgtcttccaaatgaccttctgacgaggtatttggacactatttacaaatgtgctctagttttcaaatgtattttatatgaggaaaaaaaaacccaaccgtattgagcattttgccaagagtttaggagacacagcccaccacctagagaaaagaatggcttctcttcagtaggtaatgaagaaaaactgtctcacttgcaggatctctcagcagagggaaatctttctggctcacctaaagaatgggacagtcttgagattggggcgtatgctggtggctgcagggactagggtagtggtggagggggtgctggggagtctggggagattgtgctggggaggctgggggtgttaatgtgtaaggaagctgaggtgggagagtcttctgtggagacagaggtgggtgctgcagctcttctgagcatttgtcctttttttctcttcctttcctttcaggcttttccgagcagccaagccaccatgggtctggagaagtccctcattctgtttccattgtttttcctgctgcttggatgggtccagccttccctgggcagggaatctgcagcacagaagtttcagcggcagcacatggatccagatggttcctccatcaacagccccacctactgcaaccaaatgatgaaacgccgggatatgacaaatgggtcatgcaagcccgtgaacaccttcgtgcatgagcccttggcagatgtccaggccgtctgctcccaggaaaatgtcacctgcaagaacaggaagagcaactgctacaagagcagctctgccctgcacatcactgactgccacctgaagggcaactccaagtatcccaactgtgactacaagaccactcaataccagaagcacatcattgtggcctgtgaagggaacccctacgtaccagtccactttgatgctactgtgtagggctccacataggccaaaccagtgagatgtctatgtctcccaacctcatcacctgtctcccctctgtctaccattctttctctgaaagaagtaagtcatgttaggacttccatatgacaaaacatgcgttcctgtcctgtgtcatgctcccagatccctctcttgctgtagacaaatgaagcaagatggccctcaccagaacatgtcccttcaaccttagactttcttgactttagaaaacaaccaaataaaattctgttcatcataaattgtgcatttagggcagttcgaagtggagtaaggacaatgggcaagtcacctcattcattggtccagaatttcctcactcctgactactttaactacactattgaaactagacttttctgcctctctgctgatcattcattcttcgcatatacaataaagtctaacatctatttcagcactcagtagccatagctcccaagtccatctgctcctcataccaatacagatcagtcacatctactgaagagagttcttccattaagagagtagaagatggttacctttgcctctgcctttcagctatcttcttccatccatgtttcactttgtactttctttctcattgtaagtgaaaagcagcatccagtcttgccttccaggggctgcttcctactctcctgcctccttaccttgactcagacctcatggaacaaataggaatgtggagggtagggggtggggaggcttcagttttaacaaccacagtggaaatccaatttcgatgatgcttttgggaaacagtcacatgcacagccttgcctacggatgatccaggattcaaggcgcggttctccatggaaggtgtagagtggaggtatgtttctataagaaccagccaccagcactcctggaacaaactgtagagttcctctgcagattagtcaatagttttaggtatattggggttttcctttaacaatttgagtagcacagagtgtcctgaagcttagtatgtaaccagtgttggccttgaactcttgcttctgcttccccaacctctcaagtactgggctcttaggtgtgtgccactgtgccccagctatttttggtgggaaagaacttcttccaagtaggtaggtcagtgtctaaatgcactgactgctttctcagaggccccagatttgttgtcagtacccacatgacagctcacagtcacctgtaactccatttccaaaggttctgaggcttttctggcctctgggcatttgcacatatgtggtgcacataaactcatgcaggcgtgtaagtacagataacagagacaggctttatctcgcagaacagttttaggttcacatgctatttctagccatggctgtcttcataactaaacagaagctcaggactccagctgtttcctgagcatcgttaacctgagtgcccatgttttctgtaatataggaccagtcttggcatcaaagggtgtttaattgtgcctgtttctctctactgcttgtgacattctgctatgtctaggaaagtgtttctgtctccaagacttctgaagaactaaaagataacctgtgtgtaggcttaggtttttttcaaaaccactttaataagggttcataaaagctttatcttctcttctagcccaccacccatcagaggtagtggaaaggaaaggttaataaggcaaagggggatgtggacctgtctaaaaatagttctttggggaatttcaatcttcactgtcaggatatcagcagttcattttgcatgaatcactatcagtagtttggtctattggcaaacaccatttatggatcagtaatagcagtttgacacagaagaaactttgaggctctgccaattttggcctgagtctgcagaagtggcaagaagccacagaagaccagcaaagagtggtaaagtgagccaatgccacactgccttccattgtttgttgggttatatttatactcgtgccaaacatcacgagtcctctcaggcatctgttccagtgaaacatcacatgccccctttccaggcagctcccagaaaaacaccacatgtctgttttcagcaaaacaccctgcctgccttagtaaaacattctctcatatgacagtttccagaaaaacatcacatgacacaactgtgtctccaaagaaaccagaaatgtccacttcacctgtgatcttcccagaggtttaatactgtgttgctaaactctctttaacaccagaaactgagttcaacagactgtatgtggtaactattccttcacgtcccaacatcagatgggtaaacagaagatgagtccagtgaatccttaaactgtctcatggcaaaagaccggatagaaaaaaaataatgtttcacctaaaaggctcattttattttctctaattttttaattgaaaaatgagggggttttccctaaaatatactctaatcatgttttcttttgtcttcatataatctctaggagaaaaaaaaaaccctcatattatctcagtaggaaagatcactgttgtcaaaatagtaacaataataacaataataataaaccaagaaatcaaacaaggcagtgacagacgatatttattatcagcttggcaagatgtagaatcaactgagaagcctctgggtgtgtttctagactgggttaagtgagatagaagagtcccactgaatgtgagtaaccctacaggctaaacagagaggagccaaccaatggagtgccagcattcttcactctgctttctgactgcagactccacgttacctcaggaacttgctgtcatgttttccttgcaccatagactatgcccttcttaaacctttcctccatacattgtttcttattaggtacttggtcacggccacgagaaaagcaactaacacagtaggcatactataatgctccgaattaacctgtaggttccacctgcccaggaaacaggtaacttcctggaatgctggaagttgtagttcttggaagataacaaaattgagggggcagtggaccctgtcaggaatcttggtaaggtttagcgggttggaagcctcagaaccttataccagagaacggtaggagcttcacctgcctctgaccaggcccctgtcacttgatcacactgcctacatagataggaacgtgacctatggtcacatagatcagaaaagagttctctactctaatgatgtggatgggccctgagggtttagccaataagtgtcccttctcagacattccttcctgcaaaaggtatttaatctctggtccaccctgagaaaacagtttggaaccaaagactgtctcgtttatgaagagccactgtggggagcatggagaaagcctataggtttgtccttatgcaacaatggtttgggatccagcttggatattccaggcaatgtgtactggctagttttgtgtcaacttgacacagatggagttatcacagagaaaggagctttagttgaggaaatgcctccatgagatccaactgtaaggcattctttagtgatcaagggggaaagaccccttgtgggtgggaccatctctgggctggtagtcttgggttctataagagagcaggctgagcaagccaggggaagcaagccagtaaagaacatccatccctccatggcctctgcatcagctcctgcctcctgacctgtgtgagttccagtcctgacttccttggtgatgaacagcagtatggaagtgtaagccaaataaaccctttccttcccaacttgtttcttgatcatgatgtttctgcaggaatagaaaccctgactaagacacaatggttctaaccaaagtctatctcttggttagaatttaatatttaataaagcttacttgaaatttggcccaaaattgtagagttggtttttctggaaaatgtcaaaatgaacaatacctgttgatcaaacttataattgcagcacaagcatgttaagtgctcttgactaatcctagttgtgttcttcccagagctaggaaaaaagaaagaaagtgggcaagtgagtgaggcacctgaaatctcagcactcgaagtggagtcaagggctagaaattcaagatcagttcaactcatagtgcattctgggtcaccctgaggtcctgtcttaagagaagggggcatgggaaggagataaaatttaacctagaacaaactgaaaaagttaataaaattagcatataaatcaatgaaataagataaaataatattttaaaattttgttttatatgcatgggtggtttgcctgtacaaaggtctatgcaccatggacatgtctagtactcttggaggccagaaaaggttggcaaatcccttatagctagagtttcgggtgcttatgaatgctgagaattaaacctaggccttcttgaggagcagtcagggctcttaatcactgagccatctctctagccccaaacaataaattttacaaaactaatggctgagggctagaaaggagtctcagttgggggcaaatttgctgcccccccccacacacacacataccagacccattgtttttagcacaagacaccctacttcctaaatgcaccttggaaagaaatagttagacctcggagcctagaagtttttactttaggattatctgtattagatctactaggaggttcctttattcatgatcatttacaatttgccagtagcagcccatattagatatgttctccctgccctgcagtatttattgcttgatgctattcagggtcatgggcagatgattcagacagacagatttctcgtaccaaaggttatagggaccagtctatgtttagacaacaagaagttcatgtagatatctggaatgagtcagctaaaacaaagcagacaatggccatctggggaacaacaaagcaatacaaaacaaggttcctgggaatctcaaagtaaacaatgatgcaatctgtaatgtaactatttttggcagtgtgccacctttgtgtggcttctttgtgttgctgtgagaaaacactgtttccaaaagcaagtagggaagtagagggcttatttcatcttataccacatagtcatatagcacatattcctgccgggatgtgatgtccctgacgacatctgggcaggagctcacagcaggaacctggaggtagaaactgttacagctcttagaaaggttgtgttgcttgctggttttctcttcatagactcttatagcagccaggatatcagtgggtggcgcggcccacagttagccaggcccttccatatcagttaccaattaagaaaatgcttcaaggcctcaggatccacggaagccatcttggttccgggactccacagaaagtagtctgcacaggtgagagtgtggactacagaagctaacagcttctgtgacaggcaggagacacagagcttctgaggcagcacccttttccagctccagacatccggccatcttcccgcccagaggacagctgtctgcctggcctgggaagcttttgcctcaggaatccttgggagccatcttggttccaggacttcgcccaaagtagtctccacaggcagagagtgtgaactacagaagctaacagcttctgtgacaggccaaaccaacacagcttctgtgacaggccaaaccaaccacagcttctgagaaaggtcctgttttgggacttcatctgcggccaggaggaggttcaaacgccagatatcagtgcaccttccctgtaagaggagagcttgcctgcacagactgctctgaccactgaaactcagaggagagagctagtctcccaggtctgctgatagagggtaacagaatcaccagaggaacaatctctaaacagagacaactataacaactaactccagagattaccagagggagaaaggtaaacggaagaatcttactaacagaaaacaagaccattcaccatcatcagaacccagcacgcccacttcacccagtccagggcaccccaacacaccagaaaagctagacctggatttaaaagcatatctcatgatgacgatagaggacatcaagaaggactttaataactcacttaaaaaaatacaggagaaaactgctaaacaggtagaagacattgaagaggaagcacaaaaatcacttaaagaattacaggaaaacacaaccaaacgggtgatggaattgaataaaaccatcaaagacctaaaaagggaagtagacacaataaagaaaacccaaagtgaggcaacactggagatagaaaccataggaaagaaatctggaaccatagatgcgagcatcagcaacagaatacaggagatggaagagagaatctaaggtgcagaagattccattgagaacatcagcacaacaatcaaagaaaatgcaaaaagatcctaactcaaaacatccaggaaatccaggacacaatgagaagaccaaacctacggataataggagtagatgagaatgaagattttcaactcaaaggaccagccattatcttcaacaaaattatagaagaaaactacctaaatctaaagaaagagatgcccatgaacatacaaaaagcctacagaactccaaatagacatgaccaaaaaagaaattcctcccgacacataataatcagaacaacaaatgcactaaataaagagagaatactaaaagcagtaagggaaaaagatcaagtaacatataaacatgagcctattagaattacaccagatttttcatcagagactatgaaagccagaagagcctggacagatgttatacagacactaagagaacacaaattccagcccaggctactgtactcagccaaactctcaattaccatagatggagaaaccaaagtattacataacaaaaccaaattcacacaatatctttccacgaatccaacccttcaaaggataataacagaaaaaaaaccaatgcaaggatggaaaccacaccctagaaaaagcaagaaggtaatccctcaacaaacctaaaagaagacagccacaannnnnnnnnnnnnnnnnnnnaatgccaactttaacaacaaaaataacagggaagcaacaatttcttttccttcatatctcttaatatcaatggactcaattctccaataaaaagacatagactaacagactggctacacaaacaggacccaacattttgctgcttactggaaactcatctcagagaaaaagatagacactacctcagaatggaaggctggaaaacaattttccaagcaaatggtatgaagaaacaagctggtttcatcccagggatgcagggatggttcaatatacggaaatccatcaacgtaatccagtatataaacaaacttacagaacacaatgaaagcatttctaagaggaaaactcatagctctgagtgcctccaaaaagaaactagagagagcatacattagcagcttgacaacacacctaaaagctctagaacaaaaggaagcaaattcacccaagaggagtagacagcaggaaataatcaaactcaggggcgaaatcaaccaagtggaaacaagaagaactattcagagaatcaaccaatcgaagagctggttctttgagaaaatcaacaagatagacaaacccttagccagactcactacagggcacagggaaaccattctaattaacaaaatcagaaatgaaaagggagacataacaacagatcccgaagaaatccaaaacaccatcagatccttctacaaaaggctatactcaacaaaactggagaacctggatgaaatggagaagtttctagacagataccaggtaccaaagttgaatcaagatcaggttaatgatctaaacagcctgatatcccccaaagaaatagaagcagtcattaatagtctcccaaccaaaaaaagcacagaactagatgggtttactgcagagttctatcagaccttcaaagaagatctaatcccagttcttcacaaactgttccacaaaatagaaacagaaggtactctacccaactcattctatgaagccacaattatctgatacctaaaccacaaaaagaccccacaaagatagagaatttcagaccaatatcccttatgaatattgatgcaaaaatcctcaataaagttcttgctaaccgaatccaagaacacatcaaaacaatcatccatcctgaccaagtaggtttcatcctagggatgcagagatggttcaatatacggaaatccatcaacgtaattcagtatataaacaaactcaaagacaaaaaccacatgatcatctcgttagatgctgagaaagcatttgacaaaatccaacacccattcatgataaaagtcttggaaagatcaggaattcaaggcccatacctaaacatgataaaagcagtctacagcaaaccagtagccagcatcaaagtaaatggtgagaagctggaagcaatcccactaaaatcagggactagacaaggctgtccactctctccctacctattcaacattgtacttgaaatcctagccagagcaattagacaacaaaaggagatcaaggggatacaaattggaaaggaagaagccaaattatcattttttgcagatgataggatagtatatataagtgaccctaaaaattccaccagagaactcctaaacctgataaacagcttcaatgaagtagatggataaaaaattaactcaaacaagtcaatggcctttctctacacaaaggacaaacaggctgagaaaaaaattagggaaacaacacccttctcaatagccacaaataatataaaatacctaggcgtgactctaacaaaggaagtgaaagatctgtatgacaagaacttcaagtctctgaagaaaaaaattaaagaagatctcagaaaatggaaagatctcccatgctcatggattggcaggatcaacattgtaaaaatggctatcttgccaaaagcaatctacagattcaatgcaatccccatcaaaattccaactcaattcttcaacgaattagaaagggcaattagcagattcatctggaataacaaaaaacctaggatagcaaaaactcttctcaaggataaaagaacctctggtggaatcaccatgcccaacctaaagatgtactacagagcaattgtgataaaaactgcatggtactggtatagcgacagacaagtagaccaatggaacagaattgaagacccagagatgaacccacacacctatggtcacttgatctttgacaagggagctaaaaccatccagtggataaaagacagcattttcaacaaatggtgctggcacaactggctgttatcatgtagaagattgcaaattgatccattactatctccttgtactaaggtcaaatctaaatggattaaggatctccacataaaaccagagacactgaaacttatagaggagaaagtagggaaaagcctagaagatatgggtacaggggaaaaattcctgaatagaagagcaatggcttgtgctgtaagatcgagaatcgataaatgggacctcataaaattgcaaagcttctgcaaggcaaaagacaccgtcaataagacaaaaagaccaccaacagattgggaaaggatctttacctatcccaaatcggacagggaactaatatccaatatatataaagaactcaagaaggtagacgccataaaatcaaataaccccattaaaaaatggggctcagaactgaacaaagatttctcaccggaggaataccgaatggcagggaaccccatgaaaaaatgttcaacatccttaatcatcagggaaatgcaaatcaaaacaaccctgagattccaccttacaccagtcagaatggctaagatgaaaaattcaggtgacagaagatgctggcgaggatgtggagaaagaggaacactcttccattgttggtgggattgcaagcttgtacaaccactctggaaatcagtctggcggttcctcagaaaattggacatagtactaccggcagatccagcaatacctcttctgggcatatatccagaagatggctcaaccggtaagaaggacacatgctccactatgttcatagcagcgttatttataatagccagaagctggaaagaacccagatgcccctcaacagaggaatggatacagaaaatgtggtacatttacacaatggagtactactcagctattaaaaagaatgaatttatgaaattcctaggcaaatggatggacctggagggcatcatcctgagtgaggtaacccaatca

SEQ ID NO: 472 - DNA, 793 bp, Mus musculus
gactgaagaaactgacttccaattcgtcttggagttcaaactaaaattttaggcttttccgagcagccaagccaccatgggtctggagaagtccctcattctgtttccattgtttttcctgctgcttggatgggtccagccttccctgggcagggaatctgcagcacagaagtttcagcggcagcacatggatccagatggttcctccatcaacagccccacctactgcaaccaaatgatgaaacgccgggatatgacaaatgggtcatgcaagcccgtgaacaccttcgtgcatgagcccttggcagatgtccaggccgtctgctcccaggaaaatgtcacctgcaagaacaggaagagcaactgctacaagagcagctctgccctgcacatcactgactgccacctgaagggcaactccaagtatcccaactgtgactacaagaccactcaataccagaagcacatcattgtggcctgtgaagggaacccctacgtaccagtccactttgatgctactgtgtagggctccacataggccaaaccagtgagatgtctatgtctcccaacctcatcacctgtctcccctctgtctaccattctttctctgaaagaagtaagtcatgttaggacttccatatgacaaaacatgcgttcctgtcctgtgtcatgctcccagatccctctcttgctgtagacaaatgaagcaagatggccctcaccagaacatgtcccttcaaccttagactttcttgactttagaaaacaaccaaataaaattctgttcatcata

SEQ ID NO: 473 - protein, 157 aa, Mus musculus
AFPSSQATMGLEKSLILFPLFFLLLGWVQPSLGRESAAQKFQRQHMDPDGSSINSPTYCNQMMKRRDMTNGSCKPVNTFVHEPLADVQAVCSQENVTCKNRKSNCYKSSSALHITDCHLKGNSKYPNCDYKTTQYQKHIIVACEGNPYVPVHFDATV

SEQ ID NO: 474 - DNA, 21850 bp, Homo sapiens
tgacgacctcagcaataagctcttagaggggctggggcaggtgggctgtcccttagggaagggatgagaggcactggtgcctgatctagaggtgaatggtggtgttgggttgagtcagggataggaaaagttctcagaaaatggatgaagtcaagagaccactgaacaacccaggctgaaagggaatcaggtcttctgtaatcaggaaccagagataacgaagtctctatctttctatagacaccctggcaacatttgatttccattttaaaagaccagggctggtctgtggggtgggaagggacctatggagagtgaggaaaactggtagtgtcaggaggctgggatggtggcaccagaggaggtggaggccccctgtgtgttctggagaccagattgttgactgcacctggtgtgctcacaggccagtcagagccactgtctgggaaagtagaacctgtgcttggtgggcctcagccaagggctcaggcatcagaacctctttctctcccagttcatactgtggggtgggggtggggtgggattgggggtgggagtggaagcctaatggacagagaggtggagagtcttataaaaggggaataaacacaggaatgatagccagcacagccacggttgccttttccccttcagtaattggtttgtcacatgaggcaaaacgttgcaatgtggacgggagacagaaattaggaaaaacttgcataatgtttcactggggagggggtttctcagttgaggcccataaatgcttagttttggattgggcttgaggggctatactgtctcctaagagactctttagcccataggatcataaaatctcccaagctcctgcagttcaaattgacctttgctccagtcaggaaaactgtgtagattgggacgggggcagatgtgtttcctgagagaacatgggaggggtgggccttcccacagcctgtctctgaggaggttccttggggccctgagcccttgggtgtggtgtagctctaaccgtctagggctgcctttggctttaggaggatttcagggattcatttccaggcactctgtgaaaagggcaaaaatgtacttcccttcatatcctcaccgaagcctggcagcaggccagtcactggtgcggtttcctgacatgactgtggtctggggagaccaccttgaactctgaagtttgtcctcccttcaaaaattcaaacttgggacctggatagcccagtcatgctcagtgacagagaagttggcattttgggaaaagtactaagaaatctgatgtcttcactgcagagtcactttctaaggaggagactcaggctcccaagaacatgaggtaggccagttgcactcataccttctggagcccaccagactccagctccttgtttctcaccttcctgcaattggatgtttccccctcacaccattccttcacactcaggcttatcacaagtttctgcaaagagattttggggagccagcagatgctctcccgaagaaaatgattcagctatatccaccctcactgagtgaagtccttttaaataggagctacatttttttttttttttttttgagacagtgtcgctctgtcacccaggctggagtgtagtggtgtgatttcggctcactgcaacttctgcctccccagttcaagcgattctcctgcctcagcctcctgagttgctgggattacaggcatgcaccactatgcctggctaatttttgtatttttggtagagacgggggtttcaccatgttggccaggctggtcttgaactcctgacctcatgatctgcccacctcagcctcccaaagtgctgggattacaggcgtgagccaccgtgcctggccctgactgggttctaaatgattctggattcttaagaataaaagacagacagacagacagtctctgtgtagatgtgtggaagaagccagacagggaaggagctcaggaaggagaggctgagaactgaagacgaagcacagcttttctgaagctgcattcctgcccctcacataccttcaaacgccctcagactcagacatacttcctcagacatggctgagaatgaactcttaaatgtatctgtcccaaattctttaatgtctgaggccactgagagacagaagagagaaagagtccccagacggagggaacttaagatggaggtctctgactctgccacttccactgtagcctcttgcccagttctgctccttgatccatcataggtcagcattagccagtaagtggcctaagcgcacacgattcagggaagaggactctgcaggccagaaatgagcttcctacaaaagaggaagagttggttgggtgtgatggctcacacctgtaatcccagcactttgggaggccaaggcgggcggatcgcttgaggtcgggagttcaagacgagctgggccaacatggcgaaaccccatctctactaaaaagaaaaccccacaaaaattagccaggcatggtggcaggtgcctgtaatctcagctactcaggaggctgaggcaggagaattgcttgaacccgggaggcagacgtttcagtgagctgagatgggcaacagctgtctcaaaaataaaaaataaaaaaataaaaaataaagggaatgagttgagggatgtcatcttggctgttatcctactttatcttcatgggcatctgggttgtaggcaatgggtgagaggcgtgggacagcacgggcttcggatctcttttagctggttcttgcattctttcccctcacttccttcaactttcaaacaccactccgctccctttgtctgcccccactgttccgtcttttcctgttctaattttcctttgccttctcactttctggggttcaaaaggaatcccggaatatcatctattgtatgtgtgtgtgcatattgtatgtacgtgcatgcagggtgtgtgtgtgctcgtacatgtgtatttggggggctgtgctgagcttttgtagccagcctaatgataggacatccttcagattatctgagcttttcttgtaaaaacgtccttaccctgtacatacccacttccttattcttctaaagagcttgtggaaatgagcacagccacccaaatgagaataagcaaaggctgtttattcagagttggccacagatggcaggtaaccaccatcacttgcatttggcagacactcacagtaggcaggagagtgggaatcttcacaatggaaaacaggaaaggcttcagggatgctctggttgcaggctgcggcatgcagaagctgtaagtgggctactggaagcagggcatcctatgtgttggattagggatgcatattggctttctctgattggtcctaatttggggaagcggaaataaatattagggaacttttcagttattaatcaagtccataaagagagactttcaagcaaggaaaaaattaagaaataaaataggggtaatcaagtcctagctgtttggggccaattgctataggagttgtttggcttcctggattgtttgctgtatatagtgggttggcttctcatacttattgctggagactacaggtcagagttccatctttatatatggtctggtcattgttcatttgtatggtcagtctttcagtccctccttttggtcattctctgacttctgagaagttgaccaactcagagaaagttagaatttcacatcttcaccaatcataaattgttcagtcatcttcatagtgacctggattgtaagatcttcttgatctttctattgtatcattatggcaatcatctgatgacagagtggctgctagaagcatttaaaactctggataaaacggaacagactagcatcatgaccactatcagaaaaataagaaacaattgatagtccctctgagatgctttagaaccaggaactccaattgcttaacctaggccaagaaaacaaatcccataagccatgaggaccttagagatccaaatattaataggtttttttttgaagcaatatagtcttttttttttttaaccttgcctgtgtccttgacctaagtatcacaagaagcactggcaatggtgcagacaaaatcgaagtggccttccaactgtgtggaattttgaatctcttcttcagttgtgaaacatgaacccaaaggttggctccttggagtttcactgctgtatctattgttaacagtatctgataagatctcttccttttgaatgaagttcaaaagcagttattctctgatttttcttccagtagacaaatccactagttgaggatcatggagaggttgtttaggaagattttgtaggaaggggaccttaacctgttggtgataggaccacgtacaatacatgagtcccttgcagtatcttgtcatgtctgcatggagtaggacagactctagtattggaggtgaaatctctaaatgcatggaccttcccggtatcaactcatagggggataacctatgtgtctccaagaaagtggcctgtatatccgtaaaggatagtggatatactcttggtcaagggagctcaagggtttctgaaattgttgcttattttaatgtaaggatgccatgggtcgtttttgtgggtggtaaggatggtgtagtttttgagtaagagttcttttataaaggtcgccttaaagtgtgtgcctcagtcacttgatataaaaggtgggatgccccagattgaaaacataaaatcaagcagcttgttcacggctgtaagggctgtagcattttggcaaagaaattcttcaactcatcctgaaaacagacatacaatatctaaaacatattcaaatcccagggagagtgaaagccggtgaagtgtcttgtgaaataaaatttaagcaaggccattgatttggactgggctcctgcactaagcctaacagatcaaacagatacggtgtgttgtttgatctgttaggcttagttgtttacaggcttacaatatgttgcagctgagctttaactaattgcaggagactctgtaaccaattaaccaattaagctgcctctgtaccatgcttcttttgtctcctataaatgctatcagattatgtcattggttggagttctctgaatttcctctagttccaaatcgtgcctgatttttgaactgcttttttttgttttgtttttgctttgtttgctttgttttgttctgcttttctttgctcaaataaactcagctaaaatgtacacttgtctaaggttttattccatgtaacagtccgaaggtgtccaaagaggctttggtttctggccatgtcccaactttacagtttttccagagttatatttttgacaggtgacacatgacccaaaagtaagctcagttgccttttcaaagttttcctaccaatgtttacttaagatagtaaccaatttgtctatgccataatgggtgtttcatggagaaatccagataatgtaggggaggaaatatctttcttatttgtcttaagttctaaggcggggctctgtaacagaaggcagattaaaaagtgaaaagcatacacatttatttaatgtaagttttacatggcatggaagccttctggaaatgaaccagtctgagtggatgcttatatactaagttagacaaagaacagtaaattgtgaaaacaagtcaaagggatatgggctagggctgttaatcgtggagaagtggctagggagataagggctagtttaacaaggtttatttgtagttttctctcaacctcagctgcccccatctctggtaataagaatgtcttccttcttccacggagggtccctgttacgtgggagcattgtctcctgcttttagaaagatcagagtgcccttcttgcatctgctgtttttcaagagcttttaattcaaaataatccatatgccagaaaggcatattttggggtggtatgttttgaactcctttagaaatatctacttgagatcatctggtgtcaccaagcagcaccaggaattatctgagtgaagagtacaattagatgttttccattctttttcaaaatcaggggctaaatgtcaatattttataatggcctctttgaatcccccagagatttatcctttaaaggtatagatagagtcataagcttggttaaagtagcttctttggcataatgatctgctagagaatttcctttagtttccatattgtctctttttatatggacctctacctatataatagccacttctctaggaagtgggggtgcatctgaaagttccttaacttgctgtccatttctaatgcctattttcttttcttttcttttctttttgagacggagtttttgctcttgttgcccaggctggagtacaatggcacgatctcggctcaccgcaacctctgcctcctgggttcaagcgattctcctgcctcagccttcctgagtggctgggattacaggcatgtgccaccatgcccggctaattttgtatgtttaatagagacagggtttctccatgctggtcaggttggtctcgaactcccaacctcaggtgatccacccgcctcagcctcccaaagtgctgggattacaggtacgagccaccatgcctggtcttctaatgcctattttcaaagcatctcaaaatcatatgctatttcaaaagcatacctgcagtctgtatatatgtttgctctctggtctttgtttaggtgacaaattctagtaaatgcaatacattttgctatctgggctgattttactgcaggtagtagactttttcttaagaagagtttaaaataggggtagcatagcctattaataatgtagggaaccagaatatgccagctcaataattttgagttgattattttgaaaaacagtaaatgcaggaaaaactcaaaaaacagggctcatcatttccacagctgcctctcccctcttccttccctgctgtgaaagaactataaatgtccttttttttttttttaaacagtgtctctctctgtcacccaggctggagtacagtggtacaatcacgactcactgcagcctccatctccagtgttcttccacctcatccccctgagtagctgagactacaggagcatgccaccatgcatggctagttttgtatattttgtagaaaaagggtttcgccaccttgcccaggctggtctcaaactcctaaactcaagcaatctgcctgccttggcctcccacagggctgggattacaggagtgagccactatgcctagccaagtttcccttttgtaagagaaatttccatttatattcccatttgtatggatgtctccctttcctgtgctaggaagaggaggacttaatcacggaggacttatcaatggagaagacaaccaacttgaatttgcttaacaaactttactaaacaacccttatatactatacatttcctagtccgcttgtcgcaacctccccagaaactcaaaatccctttcctatgtgcagagacaaaagtgactccatcttgaatgctaatctaccatgttgacgtctgattaaccatgtcccgggaatgcctcctgatttctactttatttactgtctctagtgtagaaacatgtattcactagaaatcctgcctttagatcaaaacaaccttaacgttatcatgcaaattatgggctatgacaaacacagcattcttgcctgttctgaagagttgcctttcattgtctctatatagcacgtaccccttttccctatggtatataagctctgggtctggggaataacagtgctgagatttacatgtcttgctgctgcccaagacgacacttctggctataagttccccaatagaataaaacacgctttactgacaaactgaatttgtctgcctttctttagtttctaggctccttcagcatttggggccacttcacatatgtggccctttcatggaacactgtcttgtcacttctgcacaattttctttgtcaaaatggcctataaactctcaggtttaattgcttctttgagtcttcacttctttttttatgaagacttccatattcatgtagaatattaatattaaattaaatttttatgccttttctcctgttaaatctgtcttttgtcattttaatttacagggcccccagccctctaggagggtaaaggaagaattgatttttctttcctcagtgtactaacttcaagtttcaattctggggtatgttccatcaataaatcatattaggtccgggttctcaataggagttgctaataaatctgactgacatgcagaatgtttcctactgaggtaagacaatcaagaggctccccttctggtagggacagagggtggcagaattcagtgtgttgcagagatgagtagtaatttatgagagggagagagggatagaatcttataagaggttaatcggctgcctgaagtgtgcagtgagttctcagtcaggtgtaatgcctgtgctgcgtgagaaaccaggaggtcaagcagggagtctagaacaagttcagcagaagcaacaacaaatgttgccatggcatctactgccctaagacaagcggggctatgcctctgcaactgggtcaaggataaggctgcagtaagggcttctgatggttccccattgaagtgcaattaaagctccaagggcttgtctagattgctatgcataaatagacaaaatggcttcctgtagtttcaggattcctagggccaggggctgttgaagagccttattatagttacagaagatctgttcacatctgaactgtggttctgaaatcatcttgctgggtggaggccacttttgtgcagccacgcccagtgccttagtggggtccacctgactaaccaaaccatcccaccaggcgcccttcaggtgagtcctgtgccttatttatgtctgtatcccacagtctaatgaatgaatgaacacattctaacttgactattcaagagaataaaagtattattaaagactcagaaaaataaaatacaggtgggggctgggggagtaaggaaactgtaggggccaaggaaaaattcccctttcaccctccaaaggtttgctgaaaatcaactgacaaaagacagattgataggaaaaaacgcatagaaattgatttgatcgtagttttacacgacacgggagccttcagaagacccaaagataacaggggaaagtgggcattcttacacttggatatcaacaaagtatgaacagctgtgtagaaatatgactggacaacagggcgatctaatgaaaatagactgagtggggaaacccagcaaggcctccctgtctagattcttcttggcctctctgagcattcgtcctttttttctgggtatggggggcaggacgctctctggaatgaggatcttacgacctacaatcacacaaggtaggtcagataatttcactatggccactttttacacagaaaggctgaaacaatctgaatacacagcacgaagggatattttgataattcttagaggtatccaaattgttactcagcaaaaaaacaggtctctttctaggagggcattctgctgctaataaatatgatattctttgtattttttccccaaaaagaatttgagatttgggatttaagtttatctttagttcctctactcaattccgacctacagggtcagtggttactgtagataagaacagccccatcctctcgatgcccccagagcaggggtggagggtgggtgggaagtggccagaactgggtgagcgcaccctagaggcctcctcctcctccctattcagttactccccctttcttctccagatctgggaagccttccagctgggggcagcaggacagcctccattccccccgaccccgcctcccatccccgggagaggtagcgttgggagaatgccctcctagaaagagacttgggttttgctccctaggagccctggaatagctttggccagaattccctatctcccattagaacctctcctttgcgtcctttgttaacctccaagtctacttggtgaaaacgcccacgaagaagtaacaaggactttgttcctagtgtgccaggtttgggcaccagtgctgtagtggctttctctgctgctccttgtgcatcagcagacagatgtggttcacataggaagaaagactaacgtaggcaaagatttgctctttcttcagcagccctagaaagacggcggcctgggtgattcaccactccttcctcacgtccttgattttatttgaactgagctccagatgctcctcccacccttttcctcttggaagccaaacccctttgtaatctgtataaggtccacaccccgggagctgagtgattgcagaaactggccttccatctctctcagacaccaagctgcagatccaggtaagcagcccaagaggtgttctcaggtgccgcttctgcttcagggttgcagaagagggagctagggccagtccacagcactgagaaagattgggtgatgctagcgctgaaaaaatgtggcccaggcaaacatcagctgggggcagaggggtcagggtggaacgtgcaggctgcagagcatccatgggactggagaagaaggagcctccaaattgggggaggccagcgtttctctctggaatacaatggaatcttttatgatgccagtgtcaggcactggcctgagttcccttatgctccaagacaacaaggctctgtcacccatggccctggatgtcggggatacaatttggttcatgatttattcaaactgatgtttcgatgagccatttgagcactgggtacaaatgtattttggatcaaagaaactccagtattcaaagataggaactgacaggattttaggtcactttgtaggtcaccacctagaggggaggaagacctcgctttggagagtgggaataaaacgctcgtggaaaagggtacacgtgagtgtctcattacacgaaaaacctcaggaagtaggatggacgtctttctggctgacctgaaacagaaagtgtaaaccaggcaagccataggtgggagctggagttctttttctaagagggctcttttccttctctctccttttctcaattaggcttttctgggaaagtgaggccaccatggctctggagaagtctcttgtccggctccttctgcttgtcctgatactgctggtgctgggctgggtccagccttccctgggcaaggaatcccgggccaagaaattccagcggcagcatatggactcagacagttcccccagcagcagctccacctactgtaaccaaatgatgaggcgccggaatatgacacaggggcggtgcaaaccagtgaacacctttgtgcacgagcccctggtagatgtccagaatgtctgtttccaggaaaaggtcacctgcaagaacgggcagggcaactgctacaagagcaactccagcatgcacatcacagactgccgcctgacaaacggctccaggtaccccaactgtgcataccggaccagcccgaaggagagacacatcattgtggcctgtgaagggagcccatatgtgccagtccactttgatgcttctgtggaggactctacctaaggtcagagcagcgagataccccacctccctcaacctcatcctctccacagctgcctcttccctcttccttccctgctgtgaaagaagtaactacagttagggctcctattcaacacacacatgcttccctttcctgagtcccatccctgcgtgattttgggggtgaagagtgggttgtgaggtgggccccatgttaacccctccactctttctttcaataaaacgcagttgcaaacacctgatttctgaagcggttctgtctaggtactgtttctggcattgccttccagcaaggggtaagaactgtaaatctgattcactttggagaacggtgaatggagtaattaaatgccttcccttctgacttggattttagtggcttgagaaaattcctttccttgtagattccctgatgccaaacataaaactgttaagtgtgggctgttttagacaaaagggagctacagcctgggacactgccatgcagggtgaactgacagaggggtgaagctcaaatacaatcattctctggcacagaaggaaggcaagtgtgacctcaggaagatcctgcttagcctcagggtggggaagaggactcaatgaaattatgatcctaaatttccattttccttttttttttttgagtgagctattactaaatcagaaaaatgggcacctcttagttggaaagccagaaccttacattttagagccagaagtgactttggagagcacggaattgagggatagcaagtagatttcagtttgtgtaccaactctaattggaagtgccggtcgggcgtggtggctcacacctataattccagcactttgggaggttgaggcaggtggatcacctgaggtcaggagttcaagaccagcctgaccagtatggtgaaaccccctctctactaaaaatacaaaaagtagtggggcgtggtggcgggtgcctgtaatccagctactagggaggctgaggcaggagaatcacttgaacctgggaggcggaggttgcagtgagctgagatggtgccacttcactccagcctgggcaataagagtgaaactctgtttcaaaaaaaaaaaaaaggaagtgcctacccaaaatgctgtagcaaaaaattctggacagtggtgtggttgaacaacagcctctatcgaaggcacgagagggggaagggtgtgtgtgccacacatttgccatccctgaccaaatgtgacccctgcctttccggtgacttgcacatggcttgttgctagttagtggcacagccgggactacaccctaggtttcctgacttccaagccattgttctaactcaggaagccattgctctaactcaggaagaaagctcccctcctcagtaagtgctgtggagcggtagctctctcccagagcttgctggtgggctctcacaggctcccagtgttcttagcctgtgagtccactccactcttggcaacccttcctgacagccactgaaagactacctttggcatctgtcaacacttaacctgggaggcagaggttgcagtgagccgacatcgcgccactgcattccagcctgagtgacagagcaagattccatctcacagggtggggggtggggaagcttgccatataaagaatactttctgcagggcctgtgcggagatccactgtcttgtggctgcctgagacatggcttctatttgtaagtccctattaaatgtttctttctgagaaactgaacttgtcatgaagtgggatttaaggaaccagagagaccagatggcgtgcaggagggtgtttattttaaggtgtacactggcccagcggacttgtgtcctaaaaggctgagcccaagaacaaagaaaatgagtcccttttaagcattttgaggcaggaactaagtgaagcaggcttacagaagtgagaacaaaaggctgctgtgacacttttggaacatgtcttacatctctgtgagaacttggtttgcagcttatgcttatctgtcttgtgaccttgcagctgtgcagggaagaaagaaacaggagtttacagagcctacaaaatatgtggaggatagatatggttaacgtttcttgggacagacagttaatattctcttctaactttaacttcaggggggctacttaaattcttttcagccttggttaatacagcaattcattctatgagctattgttatttctcttattattattacgtatgctattatttgttattttcttagtttcctacttcagtcaagccctttctttggcctctcatctccctcagcccttgggggtacattggcatagacctgctcactgcagaacaaggaaggaggaagcaggagaaaccaaacctgccataccgtgttcttgaacttctggcctccagtgagaaaatgaatttctggctgggcatgctgcctcacgcctgtaaccccagcactttgggaggctgaggcaggaggattgcttgagctcaggagttcaagagcagcctgggcaacatagtgagacccccgtctctacaaaaaaatattaaaaaattagccaggcaaggttgcaaacacctatagtcccagctactcgggaggctgagatggaggatcacttgagccttgggggtcgaggctgcgctccagcctgggcaacaatgagaccctgtctcaaaattttaaaaaataaataaataaataaatgcatttctatcgtttgagccgcccattttgttatggcagccctaggaaatgaatacaccctttaaccaattcttccacttctcttggattgcatccgtagctgccctgacacatccctatggcgggctggtctaaattagatgccacggtggtggggatggggtggctgtggggtgaatagaagtgtctgtggggacaaatgaacatctacttcttcctgggacagctggatggagtggagggactttagaaaccgttaacaggtcttagggaactggccctgcgtcccttctgaggctgctgtaaggggaaaagaaaaagtaggggcatgaaagcccttggcaagatgtgaagcgaggcagccttcgtgcatgcttggtcagttgtgtacctccagctagttagtgtgcaacagccctcacgcttcctctgcaacttctcccctgccatcagctgagctttcatgttctcagttcatgttctcggttcatgagtgttcatgttctcagttactcttggaatatggttcaattcagaaattcccaatgcactattaatgaacatagagagacggatatactattctaccaaaaaaaaaatctgcccttttaaaatccagggaatgtctggacatacacattcttaagtcaaaggaacatttttctagcatttgtgaaagaaggagtgaatgaatggaggttggaaggagtgcagtagttacaaagattggcttattttttatgggtctagcctggattttaaaaacctgagacaggataacaactccaagtgcctgtgggacttctgtaaaatggaaatattcataacacttaattagaagtactgtggtaaagatgacattcagagaaagcgtagtgttcagcgttctgtggacactcagaaagttagccactatcaccgaggcatggggtatggtgtttcagagccttggctctggagtgaaacagacctgtttcacactccactgtgccttttgggagtagtgtggccgcaggcagggaacgtaacttttttaacatcaggttccctatgtaaaatatcatgataaacatggtatcaacttcagagatttgttgaggattagttgaggtcacatataaaaaatatttaggacaatgtctgtccataataaaagctattactcttagaatcaagaatcatacatcctattctatcacttgcatgcaaccaatcaagactggggacagaattgacaatgtctcactacagttttctgtatttataattcaaggtgccaacatatgatttttgtttgtttgagggcctcagatgaaagaggggccaggaacattagtactggaactcacaggagtatgaattctatcatcccaagagaggggataaccagagatctagaaagcacagaagatcaggcagagacagtagaaaggcctaaacttgatttcaagaaccgactctcaaaagagtgagtataaaaccagtgtatacaccaagtacagtcatgtgttgctgaatgatggggatacaatgtgtcattgagtgacttcatcattgttgggaaccttacagactatattacctaaaactaggcagtatagcttgctctacatctaggctatatggtataacctattgctcctaggttacaaacctgttcagcagtttactgtactgaatactataggcaattgtaacacaatggtaaatatttgtgtacataaacatagataagttacagtaaaaatatggtataaaaggtaagaaatggtacacctctgtaagacacttatgtgtggagcttatagaattagaagctacggccaggtgcagtggctcacgcctgtaatcccagcactttgggaggccgaggcgggtggatcatgaggtcaggagttcgaaaccagcctggacaacatggcaaaaccccgtctctactaaaaatacaaaaattagccaggcatggtggcatgtgcctgtaatcccagctactcaggaggctggggcaggagaatcacttgaacctgggaggcagaggttgcagtgagccgagatcgtgccactgcactccagcctgggtgacagagcaagattcggtctcaaaaaaaaaaaaaaaaattaaaagttgctctgggtgagtcagtgggtgagtggtgagtgattgtgcaggcctaggacattgctgtgcactactgtagactttataaacactgtatcattagggcacactgaacttatgaaaaaattttctttcttcaataataaattaaccttagcttactttaacttttaaactttatacatttttaaataaaaaaaattttgactcttttataataacacgtagcttaaaacacattatacagctgtacaaaaatgttttctttgtatccttattctatagcttttttcttcttcttcttttttttttttttgagacaggatctcgctctcttgcccaggctggagagcagtggcacaatcttggctcacggcaacctctgcctccccacctcagcctcctgagtagctggaactacaggcatgtgtcaccatgccagctaagttttgtatattttgtagagacagggtctcaccatgttgctcaggcttatctgttttttttttctatttaaaaaaatttttaaacttttttgttaaaactaagatacaggctgggtatggtggctcacacctgtaatcccagcactttgggaggccgaggcaggtggatcacctgaggtcaggagcttgagaccagcctgaccaacatggcaaaaccccgtctttattaaaaatacaaaaattagctgggcgtggtggcacatgcctgtaatctcagttacttgggaggctgaggcaggagaattgcttgaacccaggaggcagaggttgcagtgagctgagattgcgccattgccactatatatatatgtatatatatattgtatatatacacatatatgtatgtatgtgtgtatgtgtgtatatgtgtgtgtatatatatacacacacatatattaataatatatattatattatatatattatattatatatgtgtgtgtatatatacacacgtgtatatatatacacacgtgagtatatatacacgtgcgtatatatacacatgaaatgtaacataacattttcttttttttttttgagttgctctgtctctcaggctggggtgcagtggcatgatgttggctcactgtaacctccacctcctggattcaagagattctcctgcctcagcctcctgagtagctgggactacaggcacacaccactatgcccagctaatttttgtggttttagtagagatggagtttcaccaagttggccaggctggtctcaaactcctgacctcaggtgatccacccgccttagcctcccaaaatgctgggattataggtgcgaagtactgcgcccagcctaacataacattttctaagtaacatttgggtcaaagaagaaatcaaaagaaaaaaattaaaatatatacaatatataaaaaaattgggtgatgataagaaagtacaattaagagaaagttttgtgaaagttgtcagaatcaaaacggagtcactaatgttaaagaaaccctgacaagcctgggtgcagtggctcacgcctgtaatctaaacactttgggtggccaaggtgggcggatcacttgaggccaggagttccacaccagcctagacaaaatggtgaaaccccgtctctactaaaaaaaaaaaaaaaaaaaaaaaaattagctgggtttggtggcacagctgtaatcccagccacttgggaagctgaggcacaagaatcacttaaacccaggaggcagagattgcagtgagtcaagattgcacagctgcactccagcccgggtgacagagtgagactctatctcagaaaaacaaacaaacaacaacaacaacaaaaatcctgacaatagagctggggaaagctaagaagggagaattcttatgcttgtatgcctgataactatcacaaaagacctcaaaaaccaccatcttgcataaaggccattgcaacatcatctaaaaatatttctgcaaggatttttactcaacaactgcctatccaacctcaaattggtgtcatccttgttagtgatctttgtagccaaggataatcatttcaaaacaattttgtaatcctcttcgtttttcttttgaaaacctttgtctccctttacctccctgaatatgcacatagtttactatggcacgtgtattcccattgcaatactttattcccaaataaatacctttttcttttaaagaccctctctctgtttgttacttaggttaaaaggttttatcgctaaatacctatattagaaaagtggaagaatctcaaattatgatcttaggatcctccttaagaaaatagaaaaagataaaatttaacccaaaggaagcagaaagaaatcaataaaggtcagggcagaaatcaatgaaataaaaaacagaaaaatgagagaggaatttaataaaaccaaatcctgtttcgttgagaagatcaacaacattgctaaacctctcattaagctgaggaggagaaaagatgtcacaaacaaccaatatcagaaatgagagatgacttcctcagagattacacagatagcaaaaagataataggagaatatgatgaacaactttatgtcaataaatttaaaaacttcaataaaatggaaaagtaattaagagacacaaatttccaaagctcacttaaaaaataggtaacctgaatagccatagatctatttaagcaattaaatttgcagttaaaaacctttccacaaagaaaactttatgcttgactggtgaagtttattaaacatttaagaaagccatgttaattctatacaaactactccagaagaaaaggttttccaactaattctccgatgtcattcaagacaaattatccagagacatttagaagaaaactacagaccaatagttctcataaatgtaactctaaacaaaattttagcagtttgaacctaacaatgtataaaaagaataatatatcactaccaagtggggtttattccaggaacaaatgttgatgtaatttttcatgtcaatcaatataattcatcatactaacaaacttaaaaaaaaaccatttgatgttctcagcagacacataaagagcatttgacaaaaccccacattcatttctgataaaagctgtcagcacactaataatggaagggaaattctcaacctttagggtatttgctatgggctaaatgtttatatcattccaaagtttacatatgtaaactctgacccccagtgtgttaatacttggagatggggcctttgggcagtaattaggtcataagaatagagctctcctcatgagattagtgccctgataaaaagagacatgagggagaagaccattatccctctgaaatgtggggagagagcaaggtgtcccactgcaaaccagggagtgggtcttcaccaggagccaaactggctgatgtcttgatcttgaacttcatagccttcaggactttgagaaataaatgtttgttgtctaaaccacccagtctatggtatttttgttacagcagcctgaactgaataagacatcatctacagaaaccctacagttaacattatactcaatctttgttttcctatcagacccctaaggagctgtcttagtctagttcatgctactataacaggatgctggccaggtgcagtggctcacgcctgtaatcccagcactttgggaggccgaggcgggcggatcacctgaggttgggagtttgagaccagcctgaccgacatggagaaaccctgtctctactaaaaaacaaaattagccgggcgaggtggtgcatgcctgtgatcccagctactggggaggctgagacaggagaatcgcttgaacccaggaagtggaggttgcggtgagctgagatcgtgccattgcactccagcctgggtaacaagagtgaaactctgtctcaaaacaaaacaaaacaaaacaaaacaaaacaaaacaaaacaaaaacaggaagccacaaactgagtaattaataataaacagaactttattgactcacagttctggatgctgggaagtccaacatcaaagtgccagcatctagcacgggccttcttgctgcatcatcgcatggtggaagggcaaagggagagcaagagagagataaaagggggctgaacttgtccttttgtaaagaacccactcctgcaataatagcattaatctattcagggctgagccctcatggcctaatcacctcttaaagatcccacctcttaatacttttacactggcaattacctttcaacatgaactggggagtggacaaatacataggaggagaccttttagatatttttcttcctaaccactccacccgtcctatgaaattaaatactatgaaatgagttttgttgagtagggttgattttgaaggacgacaaaccattgtaatatctatgatttttttacccctcaagaaataatttttttttttaagacagatctcactctgttgcccagcttggagggcagtgatgcgatctccgctcactgcaacctccgtctcctggattcaggcaattctcctatctcagccttctgagtagctgggattacaggtgcccgccagcatacttggctcatttttgtatttttagtagagacggggtttcacaatgtttgccaggctggtcttgaactcatgacctcagatgatctgcccgcctcggcctcccaaagtgttgtgattacaggcacgagtcactgtgcctggccaaaaaataatttttgccctctcaggggcactatcgcttccatagaaaaagcctgtactaaataatcctcaaaccccacctccaaggagattttcttgtttattttgactacatatcttcaccacaaaatagtcaactgcttccttttgccaacaggagaaattttgaatgcctgggcctaataattaatgatactgtttgaaagagaagtcaagttaaaaatacatcagttacgttttgcaaaatacctcatcaattctccacaaagttgtcacggtcatcaaaaaaagtttagtttgagaaactgtcatagccaaagaagcctaaggaaacatcacaattaaatgtaatgtggtgtcctgaatagaattctggaacagaaaaaagacattaggtaaaaactaaggaaatctgaataaagtaaggactctagttaataacaataatttaaagaaaacacccaaaccctccccctcctcactttgtccttggtagtgaaccctccgggactttctcagggagcgcacctttgattaaaatcgtagctggaacacagcattagtgggattccgacaccttgagcaagaccctgtcctgagaccttggcttaacttatcaactgcaactgttgttaagtgctataaaacatgaccatgagaagaagaagaaaaaagaacatttccgcatttgtggtgaaaactgtaagtgggacca

SEQ ID NO: 475 - DNA, 1157 bp, Homo sapiens
tcctttgcgtcctttgttaacctccaagtctacttggtgaaaacgcccacgaagaagtaacaaggactttgttcctagtgtgccaggtttgggcaccagtgctgtagtggctttctctgctgctccttgtgcatcagcagacagatgtggttcacataggaagaaagactaacgtaggcaaagatttgctctttcttcagcagccctagaaagacggcggcctgggtgattcaccactccttcctcacgtccttgattttatttgaactgagctccagatgctcctcccacccttttcctcttggaagccaaacccctttgtaatctgtataaggtccacaccccgggagctgagtgattgcagaaactggccttccatctctctcagacaccaagctgcagatccaggtcaccacctagaggggaggaagacctcgctttggagagtgggaataaaacgctcgtggaaaagggcttttctgggaaagtgaggccaccatggctctggagaagtctcttgtccggctccttctgcttgtcctgatactgctggtgctgggctgggtccagccttccctgggcaaggaatcccgggccaagaaattccagcggcagcatatggactcagacagttcccccagcagcagctccacctactgtaaccaaatgatgaggcgccggaatatgacacaggggcggtgcaaaccagtgaacacctttgtgcacgagcccctggtagatgtccagaatgtctgtttccacatgcacatcacagactgccgcctgacaaacggctccaggtaccccaactgtgcataccggaccagcccgaaggagagacacatcattgtggcctgtgaagggagcccatatgtgccagtccactttgatgcttctgtggaggactctacctaaggtcagagcagcgagataccccacctccctcaacctcatcctctccacagctgcctcttccctcttccttccctgctgtgaaagaagtaactacagttagggctcctattcaacacacacatgcttccctttcctgagtcccatccctgcgtgattttgggggtgaagagtgggttgtgaggtgggccccatgttaacccctccactctttctttcaataaaacgcagttgcaaacacctga

SEQ ID NO: 476 - protein, 138 aa, Homo sapiens
MALEKSLVRLLLLVLILLVLGWVQPSLGKESRAKKFQRQHMDSDSSPSSSSTYCNQMMRRRNMTQGRCKPVNTFVHEPLVDVQNVCFHMHITDCRLTNGSRYPNCAYRTSPKERHIIVACEGSPYVPVHFDASVEDST

SEQ ID NO: 477 - DNA, 1147 bp, Homo sapiens
tcctttgcgtcctttgttaacctccaagtctacttggtgaaaacgcccacgaagaagtaacaaggactttgttcctagtgtgccaggtttgggcaccagtgctgtagtggctttctctgctgctccttgtgcatcagcagacagatgtggttcacataggaagaaagactaacgtaggcaaagatttgctctttcttcagcagccctagaaagacggcggcctgggtgattcaccactccttcctcacgtccttgattttatttgaactgagctccagatgctcctcccacccttttcctcttggaagccaaacccctttgtaatctgtataaggtccacaccccgggagctgagtgattgcagaaactggccttccatctctctcagacaccaagctgcagatccaggcttttctgggaaagtgaggccaccatggctctggagaagtctcttgtccggctccttctgcttgtcctgatactgctggtgctgggctgggtccagccttccctgggcaaggaatcccgggccaagaaattccagcggcagcatatggactcagacagttcccccagcagcagctccacctactgtaaccaaatgatgaggcgccggaatatgacacaggggcggtgcaaaccagtgaacacctttgtgcacgagcccctggtagatgtccagaatgtctgtttccaggaaaaggtcacctgcaagaacgggcagggcaactgctacaagagcaactccagcatgcacatcacagactgccgcctgacaaacggctccaggtaccccaactgtgcataccggaccagcccgaaggagagacacatcattgtggcctgtgaagggagcccatatgtgccagtccactttgatgcttctgtggaggactctacctaaggtcagagcagcgagataccccacctccctcaacctcatcctctccacagctgcctcttccctcttccttccctgctgtgaaagaagtaactacagttagggctcctattcaacacacacatgcttccctttcctgagtcccatccctgcgtgattttgggggtgaagagtgggttgtgaggtgggccccatgttaacccctccactctttctttcaataaaacgcagttgcaaacacctgat

SEQ ID NO: 478 - protein, 156 aa, Homo sapiens
MALEKSLVRLLLLVLILLVLGWVQPSLGKESRAKKFQRQHMDSDSSPSSSSTYCNQMMRRRNMTQGRCKPVNTFVHEPLVDVQNVCFQEKVTCKNGQGNCYKSNSSMHITDCRLTNGSRYPNCAYRTSPKERHIIVACEGSPYVPVHFDASVEDST

SEQ ID NO: 479 - DNA, 1089 bp, Homo sapiens
tcctttgcgtcctttgttaacctccaagtctacttggtgaaaacgcccacgaagaagtaacaaggactttgttcctagtgtgccaggtttgggcaccagtgctgtagtggctttctctgctgctccttgtgcatcagcagacagatgtggttcacataggaagaaagactaacgtaggcaaagatttgctctttcttcagcagccctagaaagacggcggcctgggtgattcaccactccttcctcacgtccttgattttatttgaactgagctccagatgctcctcccacccttttcctcttggaagccaaacccctttgtaatctgtataaggtccacaccccgggagctgagtgattgcagaaactggccttccatctctctcagacaccaagctgcagatccaggtcactttgtaggtcaccacctagaggggaggaagacctcgctttggagagtgggaataaaacgctcgtggaaaagggtacacgcttttctgggaaagtgaggccaccatggctctggagaagtctcttgtccggctccttctgcttgtcctgatactgctggtgctgggctgggtccagccttccctgggcaaggaatcccgggccaagaaattccagcggcagcatatggactcagacagttcccccagcagcagctccacctactgtaaccaaatgatgaggcgccggaatatgacacaggggcggtgcaaaccagtgaacacctttgtgcacgagcccctggtagatgtccagaatgtctgtttccaggaaaaggtcacctgcaagaacgggcagggcaactgctacaagagcaactccagcatgcacatcacagactgccgcctgacaaacggctccaggtaccccaactcatcctctccacagctgcctcttccctcttccttccctgctgtgaaagaagtaactacagttagggctcctattcaacacacacatgcttccctttcctgagtcccatccctgcgtgattttgggggtgaagagtgggttgtgaggtgggccccatgttaacccctccactctttctttcaataaaacgcagttgcaaacacctga

SEQ ID NO: 480 - protein, 155 aa, Homo sapiens
MALEKSLVRLLLLVLILLVLGWVQPSLGKESRAKKFQRQHMDSDSSPSSSSTYCNQMMRRRNMTQGRCKPVNTFVHEPLVDVQNVCFQEKVTCKNGQGNCYKSNSSMHITDCRLTNGSRYPNSSSPQLPLPSSFPAVKEVTTVRAPIQHTHASLS

SEQ ID NO: 481 - DNA, 1229 bp, Homo sapiens
cctttgcgtcctttgttaacctccaagtctacttggtgaaaacgcccacgaagaagtaacaaggactttgttcctagtgtgccaggtttgggcaccagtgctgtagtggctttctctgctgctccttgtgcatcagcagacagatgtggttcacataggaagaaagactaacgtaggcaaagatttgctctttcttcagcagccctagaaagacggcggcctgggtgattcaccactccttcctcacgtccttgattttatttgaactgagctccagatgctcctcccacccttttcctcttggaagccaaacccctttgtaatctgtataaggtccacaccccgggagctgagtgattgcagaaactggccttccatctctctcagacaccaagctgcagatccaggtcactttgtaggtcaccacctagaggggaggaagacctcgctttggagagtgggaataaaacgctcgtggaaaagggtacacgcttttctgggaaagtgaggccaccatggctctggagaagtctcttgtccggctccttctgcttgtcctgatactgctggtgctgggctgggtccagccttccctgggcaaggaatcccgggccaagaaattccagcggcagcatatggactcagacagttcccccagcagcagctccacctactgtaaccaaatgatgaggcgccggaatatgacacaggggcggtgcaaaccagtgaacacctttgtgcacgagcccctggtagatgtccagaatgtctgtttccaggaaaaggtcacctgcaagaacgggcagggcaactgctacaagagcaactccagcatgcacatcacagactgccgcctgacaaacggctccaggtaccccaactgtgcataccggaccagcccgaaggagagacacatcattgtggcctgtgaagggagcccatatgtgccagtccactttgatgcttctgtggaggactctacctaaggtcagagcagcgagataccccacctccctcaacctcatcctctccacagctgcctcttccctcttccttccctgctgtgaaagaagtaactacagttagggctcctattcaacacacacatgcttccctttcctgagtcccatccctgcgtgattttgggggtgaagagtgggttgtgaggtgggccccatgttaacccctccactctttctttcaataaaacgcagttgcaaacacctgat

SEQ ID NO: 482 - protein, 156 aa, Homo sapiens; identical to SEQ ID NO: 478

SEQ ID NO: 483 - DNA, 79329 bp, Mus musculus
  misc_feature (1)...(79329): n = A,T,C or G
gacaagccaggctcagcactctggagcagacatttagaaggaaagggtgcagaagggaggctgccagtggacaggagctaaagaccgagcctgagggagaagaacatcgaagagctggccacacaccctggctgtgaacgcctgctgtgtgctggttgtttgtttactacaaagccatcactatcctccaatgagggtgaggagccagctgttatcatggcggcccttgtaaagctaggctagagggaagcactgaatttgaggtcagcctgggctacagggtgaagctctaacctggggctgaccggtcccttccataggctgctgtgaggttggcccaggctgtctggttcctccacacaggctgctgtgaaggtaagcaaggtatcacaggtgtttagcacacccgacttcccgtgtctctccgaggcttgcttgcctaggacgatgccaggtgactaaactgctgtgcttggggagctgcagatgggctagcgagacgggagaaacggttggccaataggtctggatatggttaggaagggcctgccttggagctgtggacttggacctcaccctgtaggcattgaggggctagggagagtatgagcaggtgtagcaggggggcccccttgaagtcagggttgactggtccagtcttggagaggagctgtagccttcctgagtctattccacaggtcacaaggtcgnnnnnnnnnnnnnnnnnnnnnnnnnnnnnnnnnnnnnnnnnnnnnnnnnnnnnnnnnnnnnnnnnnnnnnnnnnnnnnnnnnnnnnnnnnnnnnnnnnnnnnnnnnnnnnnnnnnnnnnnnnnnnnnnnnnnnnnnnnnnnnnnnnnnnnnnnnnnnnnnnnnnnnnnnnnnnnnnnnnnnnnnnnnnnnnnnnnnnnnnnnnnnnnnnnnnnnnnnnnnnnnnnnnnnnnnncccacacacacacacactcagagcaatagagacgtcctgcagggagacagtaagttcgggccagttttcagcttgagtgaatgactccatgggcttctgctgctgctgcttctgtgccgttcagtggaggtgcaggagaccctggcatggtttaggtacctggcaagtcctgaggtgttgcttctgggaggttttgatggcttagacattaggtattaggttttaatggcttagacgcagccattcctataaccaggaagttgatgttacatctacagaagtgtagctgggtgtgttgaagctctgggttcaatccccagcacccataaaccaagcctggaggtacatgcctgtaattccatcacatgggaggtgatctgttgctgcgtagtgcgttcaagacctgcctggactatataagactccataaaaaggaaggaaggcaggcaggtaggctggctggctggtgagaatgctcaataggtgtaggcatatgtcatgaagcctgacatcctgggttctaacccccagaaccctcatggtagaaagagagaaccaatttccactattcctctgacctctactctggccatagcactcatgtacataacacatgtatgaacaataaacaaacaaacaaataaataaaatccatgtttcaagaaagggagggatgtagtcatttcagaaaattagttcaagattaagggcttccccacaccttcccccaggcctccttagagtcagtgtatgcttgcagcccagaaggggcacctgctggttgcctttggatctctgtgcggctgtagttcattgccttagccactgatcaaaacagctactgtaggtttgctgttaggttttcttttctttttttgttttgtttttcatccaaggcttcaccaggtagcctgagctagaacttgatatgtatatcaggttagccttgaacttacagatagccaccaggttttgccttcctagtgcagggattaaaggcatgtgccaccatgccaggctgtgctttttagtgaacgtttggcgattcttgtaaatctgtgggctaagggagcaatcatgtgatatgttatcttctgaaaccaacgtttttcgatggcagattgtcctcagtgttgacatgtgtcatagcagctttcatgttttaattctttattcctttttatctaaatagtagatagatcaaatcttgttgatgcatttgtggtcacacgctagtgaggcagaagtaagaggatgtcggtaatgtattcaaatttgcaattaaaacaagcaaaagtattggacttttagaaaggtgcagaaccagcagggacttggaagagatgtactctggaatggctgcttcagggatggaggtgggcggagtctcgccatctgccgtggcaggatggcgacccagcaggctactgatggcatctcagtgtaagtttgaaggcctgagaacagaacagagatgcgaaagctgctgtcagtcctgggttgatgagccaaggccgcatcagatatgagattaatagccctactcagtgaggagtccggcatccctgagctctctgtggaatagatggagttggcctatgtcgagtcacggtgagagtggatctttttacccatgctgactggaaacatcctcacagaaacacccagaaacaatgctttattgactactgggcacccccagcccaatcaaaaggacatagactgttaggcatcgtagatgattgcagagagttgttcctgctctgccctgtctcattgctcatcgtgccttccaaagtattaaaatctcatgcttctctcctccccgttctgaacattgagcccaggcctctgagaatgctaagcgagccctttcactgcgctccacccacaggcaagctccctcaggttgttgtgttctggcttaggagaaagcccctctgcgtaactcaggccggccacaaactcagtcctcctgccccagcttgctgagagccaggatgactgctatacactatcacatctaccttggatgcggtttctttttttaaaagggtgttggatgtgtaccacagcgtgcttgtggtgctcagagaacagcctgtggggaactgaacctggccgtgcatgcctgcaaccccagcgccccaggctgaggcatgaagacggccatacatttgaggacagcctggtgtgtacatgaagactctgctgtttggtttctatccccaaaccccaccccacccccaaagaaggaaaagggaagaaaacaagaaaagggttgtttgcagaaacatgattagacattcagaccttgagtccttgtgaagtggccccttatttgtatagtggagtcattttccaactcagtcttttcaaaagttgtttccatccgctctgagcagctcgttccccgttattccacacaaaggctatttttttatggtgatagttttcctagcgttctcatggactcctagggtctgacaggatggacctccatgaacttagcaacacttctgggcgtgatgacacgggcaagaggttcgtgggaagccagcctgggctatatagtgccaggccagcctgagctacacatgagaccttgtctcaggggagaaaaaaaataaaaagccttttaagattctctctaaaagctgaaatctgaagaaaagtgcacgtgtttgtcagggctcctctggcttatatctaggccaatttgcggctgctgaaatgtcatcagagaggatttgcctcttgaaaagtccaggggcaaggcctgtggtgagcacctgtagtttccgaacttgggaagacaaggcaggaggatcatttgagtccatgtgtcctaggccaagtgcaaagcacagggaagaccttagttcttaaaacaaacaaacaaacaaacaaacaaacaaacagtaggggagaagaaccaaaatcacagctgctttccggagcagagcctcattcccacctcttagccttttctggacacttgcttactgagtaaatgttttaatttggtgcgtggaagcagtgtaataatcatagcgagatgacaagctgtgtccatagtctctcattatctgtttcattttgtggggcagggtccttgaagtcctgatcctcctgacaccacacactcctttttggagggagaaggggagaatgttcgctatgctgctgaggctggccgcaagctcttgattcgcctctggactaacagggacacttttgactactccaggcccagagcactagacccagcctaagaagcagttaattattcatccttggatttttttttaattaagatacttctttactttgcaggcaaatggacggcattaaaaggtatttttatcattgaatggagttactatattttcttgccaatctgggggatagaattaaaggccaatcaaaagccatgattcttccccagtgtatcctattaatgttaagagtagcactaataaactttctggtacctattattaataaactgttaaccattctttttttcttttattgggtattttatttatttacatttcaaatattatccccttactgttaaacatcctacatttatgagagactgatatttgagtgctttgtctaacacatgcaagaacctcagcactgaatatataagataatcacgttagtgtgaaccatcgtgtgtgtgtgtgtgtgtgtgtgtgtgtgtgtgtatgtgtgtgtgtatatatatatatatatatatgtatatatgtatgtgtatatatatatgtatgtatgtatgtatgtatcaaaagatacatcgtcgtagtatttaacagcttgtttaatatggggctagaaagtcataataagcctttactgaaatcctaaaatgagaaaagtcaatttctgtattcttttctaagggaaattctagctgctggctaagaaatgttctagcatgtatatttttgtggccatttttttctttctaagcttttcctgtgataacatcagagtggggattcttttctggctggcagggtgacagatgtccatctgcctatgtcggctgtggttatcagacaatatcaggcagtttattaagttttttgtttgtttgtttttgagagagagagagagtcattctgagtagcccaggtcggccttgtcctctccactttcctgtctctacctggtgggtcataagtcctacttatgtgtctgcccttgctttgaactctgaaaaactgtcattcctctgggatgtttagagttcttatttaatatcctaggacatatatgtaaaactcccacaaatgcacaccaacacatgttgctcaggctggcttcaaacaccttgttgatcgtgacagcagttaccatcccatgagtctggaagcctcaagttcaaagtcagtgtgtcagaatccaggctctgcaaggctgtcctttctccagcttctggtagaagtgacatctgtcaagccttgttcatgtgtcactttttgtctgggaatagaactcagttgttagaacactgattacactgcctgtgtagtcccccagattgggaagtggaagcagaaatatcaaagttcaagatcaccctcagctaaggtcaagactgaagctaacttggcctacataaaaccctgcgtccaggtagataaatcaacaccagtctctattccatccacgagtagcttgcttcctttgtgtttgtatccacattttccttagcatataaagtcagccactggtttagaacccacataatccagggtgagcccattagaaggtgaccactctgcaaagcacactggcagaccctcacagtggttaggagtccatctgtctgggggcagttgccagctagccctgtgtgcacttactgcttctgaagagatgctatcataccaggttcttgtaagcatttatttttaatctccagttaataattcgtagaaatgcctttcacagaaacctttcaaggaagcagtttctattagtttgtataagtctttcatttttggagcttttgaaaaaaaagagatcctgtataggaagaaaatacggctcactgaccaggaaagccactttacaagagttcagaaaagcaagagttaaaagggcagtccccagagtgcaaggtctgtttacaaaggtttatgacttgggtgtgacttagtggttcaagcttcagggacctggagacacgtgagttgagcctgctggactggaccaggcagagctctgcatcgctgctgctgcgtagggccctgaccacagcttttaagagacctgaacaactctggaactcatggatgtggtcaactgcctgttcttccagtgtgtttgtgggccgcccctgcccatggctaaatctcaggtaggttctctggctggagtatatgtttaaagttctaagaacgggcctcttaatctatagtctttgcagtgaacctggacagtattttagaagtacaaaaactttgctgaaaataattttaaaaaagatgtagtttagaatggtgcacctatgagcagagagagtccttgcctggcttgcctgggtccgtccatagccaggtccccattggctttggaagggacctgtctttttgactgaggagcagcatttgaatgtgagctccaacccctaaaatgatcaacttcacttgatgttttatgattagattttgagatccctaagccattttggtgccctttagggtaccgcctctggcatcttcaggggaactgcaaacactgaagtccggttagggtggatttcactcttgctgcctgtattcagacagtaagtggctggcacagaggcccagcaggaacacatgcagggctgctttgcctgtgcctaccttgcccagcccctgtcacttcctggtatatttcttatttttggcatcagtaagaaaatacaagcagcatgttgcataagcacaaagcagcttctagctaataaaaaaaaaactgtgggtgggttgttttgttgttgtttttcttttttttaatgtttgtgagtagttagaccaccctatgcctctggttttgttctgcacacttctgttttttctagcaagttgtctctgtcacttttaagtgactttatataaatagatttatgcttactgtgtatttgagttgcctatgtcattcaagttagtaatttgtttcagtcccccataataatccgattttcataaattataataactttatgatctttctctttatcccatggtgatgttaggtaggatagaaacatatatattgcctcctgagtgtgcgcagttcacagaagaattcctctgatgggtggtggggatctgaagtaggagggaaggaagttgagtgggaatgagtcttttataaggaataggccggtaggagagtaacccaggaaaaccagggctctttccccctccccagcagtcagtgtaagaaaataggactgggagggggcctgaggaccatgggatttatcggggagaccgttgcagccaggtcagaatgaagaagctgattagagtgtctctcaattccagtatagtaaaactttctcaaacaagccagtggcataattaataacacgagacttctgttatagtttaaagcttaggtcttttgcttggacagtctcccagctaccttagctaacttaccctgactgtctagcccacagcctgccatgtggctagctctgtcccattctctgctctgctccaatacacgtctgttcttttccatgttagctgttgagtctcccacttctctttctttgccctgcgtccttctctctctggaagttctgccccctacttcctgcccaagcttttggctgtcagctctttattgtatccagtcagtagcgagacaacctctgatatgttatagatacattacatcacctgttctaggcagataaggaaggccaagcacttgcatatagaaaacctggtgacaggccacaggaatggcaatatcagaatcctgccagcacttttgaacatacactggagcgccttcacgcagagcaagaaaaggtcactcctagcattctagccgctgtgttagcacaggtctagttggctgatgagctgtacttatttatggggtttagaattttaatttaatacacgtatgctatatctttttttcttttgagttgtgagtctcactgtgtgactcagaccggccttaaactctgctataatcttagtgaacactcaaacatgccagactggaaattaaacaagccttctttttaggactctgtttttactggcatgaagtttctcttcccgggcctccaccatttaacttccttctggcccagaatctctcctggacagagtagggccagactgcctcggattactgtgtcatcctttggccacctgcctttgacagccacccacactgcctgctctgctgccatctctggcttcctgtgtaggctttttctgcctactcagcgtatcccagcaccctcccccaacctgtggcttcataccctgtttgacttgtgtttttaaaaacatgaatagagacaagccagatggtagcacttgcctgtaatctcagcacttggaggtctggggcaggaagattgcctcaagacagacaaacagacacacacacacacagacagacacacacatacacacattattgggctgggaacttgaagttcaggcttggcgcagagtagctgttgtgcctgatgctgacaactatggccagtctctggaccagcccagtccttcctgcgtccagattttggggtctgtcaagtagacgggtacctattttccaggcagggcaagccctgaggatgctctgtggctggctatctttgtagagtgatgactgagtttacctgctaaggcctatcctgcctatcttcctaacaggcatttcggtcacttgcctgaggttactcatccagcccctggccctcacagggatggatatggaagtctgcctaattccaaactgcatgttttcctgattgcttttgagacggtatatgagcctgggtgggccttgtggcccacaactgcttacacagggatggcagggaataggttagagttcagagccagtctgggatccatagcaaaattctggcctccttccttccactaaagatggaaaacttatttgaagaattagaggtggtgggagtctagcttggtggtaacacttggtggagtgcttgctcagcacacagaaggcgttagctttgattccgggatctctatcaaaaaagtgttgcctcttttagagtcacagaatccactgtcctcttgtctctgtctcccaagcaccgagattgctgcatggaccaccgtgctcagctgagggtcatagaatatgggattgtgtaatttatccagtctgagagccaaggttagccttgacttgtccaagcctacacagtgtttgtagtctgatagttcaggaactctacctagctcagggtactcccatcagactggctgtggtgatggtggtggtcagggtgtcctcaaatgttgagcctctcagccctggatataatctcattgtaccttctaagtgtcactagcatccacactgaaagaagatgtagatcttgttacacatttaacttattatatggtcacttctggctgctgtggctaacctcctgctccgaagcatatttggggaacgtctaccttagtcgtatattcatttttattattgtagacctgctggcattcttaatgtctcactgtaacttgtcttggtcccccaaagatctctgaaactgcagagttaattcagtctggagtaaagttcggctcatttaatccacggttgattgtgtcctcgctgtctatagctctgcagagtgggaggggacagcaggcatctgctccgttgtcacacctgcctggatctctgagctcactcagcctgttcatttgcaaaggtcctggtgactgaggatgactggccgcagggctcagccctggaggaggagcagaatgaggcgcctcgaatctccaggaggaggtggggctcgggacgccgcacccggccacgaccactgtctgactatggccagctggccggcagaagcttgtccattcctgaagatgccattgctgcagaccctccagatgaggaccacgtggacaggatgcacccagcaagtgtgactaccaccagccaggatccatgcgccccctcaggctcttgcaggggaggccggagaaggcgacctatatctgtgattggaggggtcagcttctatggcaacacccaggtagaggatgtggagaacctcttggtccaagtaagagctggtttcttcaaccatggccagcagagacgctcagctccctgcctctgtcctccctgcagactaaactggacactgcttttccttctggagggggacatacctcctcactccttttcttcctgactttgaaacctacttggatccacactaacagtccgctctctcatcatctgctttctattctcctttcctggagcctcagctcacagcacagacttgccattagtctgaaaagccctgagacctgagccggggggggccatagcctggctttatctggtttacttcctgaggggagtgattttcgaaagacttaagtggtccgttattagaatgcaaacataggaacaaagtaaagatgaaagagaagggactggggtggggggttggcggggtggatgtagctcagtgatagcatttgtcttcatgcaggaagacctgtgttcctcccatccatcccccaaaacaaagcagaggaccatgagaggagaactaacttctctgtcttctaaaatcacgtctgtccccagtgattaatcaccaaccattcctagaacggacccaggctcggaacatcctgggcgagctctctaccataaagcaacaccaccttgccttgttctgcttttgggttgcaggttagaccatcaacaccattggcccccagcacatctggcaaggatttcttaagtgcctagtgagcactttaaggttatggaatattcatgtaaaggctctatcttggtgaaagtcaaactttctgttgcttagctgtgccaactaacctcatgagcatactcatacggtcatggaatagtttatataataacttatatgctcagtttcatattgaaaacctgcgaggtgctttcttaaattacctgtaaaattctctggggcgggggtggggggagaaattctatattgggcttgggctgtgtgttaaagtttttcctgccaagctcagcacaatgtcctgcttgtagcaaacactctaaaacccttgcttaagtcagttgagttgaattcttcaagtaaagttataaggccagtgtggtggcacacagctgtgaccccagctcttgtgagaaggaagtggggggggggtgaggaattcaagtccgttcagccaagggagactattgtgggttatgagaccatgcctcagagacaagcaaaagacacaagcaaaagtgaagttaaagatatgacaaggtctttaagatccttttgttttcaggtgctccacttgttgggaaatatttctaactaaactaaagcaaactgtaatgtatctaaatgcaaggcacagttgaggcaaggatagtcagagatacttagaacacactttgtttcggatcgtcaaaatagtattgtgccccagacatggtgcttgtgcctataattctagaattcaggatgctgaggcagagaacttgggggattgaggccagcctggtctacaaagtgagaccctagtatacaccctaaaaagcccaggaggggagacagctcattagtaggggagacagttcttattcctcttatagaacacccatatgaagcagctcacttacacctttaactgcagtacaaagggatcagacaccctctttgggcctctgcaggtacccactcatatgtctgtctgtctctgtctctctgtctctctctccccctctctctcatacacccaaactatgtaagataaaaaacaattttagtgaattatttattttaactttatgagcattggtgttttgcttgcatgtatgccagtgtgagggtgtcagatcccctgggactggagttacaaatagttgtgagctgccatgtaggtgctaggaattaaatccaggtcctctggtagaacagctagcactcttaatcctgagcctcctctccagcctcctaaataagttctttttaaataaaagctgtcactggagatctgtgaccatgcctgtgtgctgtggtcctgcccttgcatcctcggatgctgctatggtcaccgtgctttcctaactgtcgctcacagctctgctgctgcctcagccttcctctccctcagaggcctctctttctctccctgttccccaccggcatgtctctcacaagtaggaagaagtgtgacagagccagctttgaagctgcctgttggaactttagaacagcctattgctacagagcttggtgcagcatacagctgctggcgggggtttgaagaagacactccacatctgccagtggcttcaaggcgagaacacagaactgttttgtggctcgcaggagctgagacttcctggcaccttctcacagcttctcacttcctttcacagccagcagccaggcctcctgtgcctgcacaccaagttccaccctacaaggctgtgtctgcccgcctccggcccttcaccttctctcagagcactcccatcgggctggaccgcgtggggcggcgacggcagatgaaaacatccaatggtgagtcttggggcttcctggaatcttttgtctgggaccagggagcctgaggcaccaagggattctgcacttttcccatcttgtggccagggcagtgtggaagttattatctgggttactcaggatttcaaactcctgtcaagtctgcatgtctcttgagttgctgcagagccatgccagggtaaaccgatgaccaggctagagacctaaggttctggtgtggagggtagttttttggttttttgaggatgcaggaatggggagctgaacctcgcctggcttctgccagcctcagggctccctggctggcccatgcagcctgtctccacctgcacactctgtgacattcgccctgttgcaaatgtgccttcttttgtaaggacatccgtctcaagtgggccccttccccaccccaaggccctcatcctaactcgccacctgcaaagaccgtgtttccatctaggtcacaattaggggtctggagcagggatgccaccatcatttgggggttcaggtcaatcaaaagtgctttagcgaattgtcccgatgtctatcatgcctgcatgtgctcagataccaacaaggatcagaaaggcatggaaaacactaggttatgaggaacagagggggtctctcctcagccttcacatacagccaagaagcctgtttcatggtctatgtgactttttttttttaatttataaagaaaaacagagacaaacctcttagggttctttgtttgaaaacagtaaaactaactgactagtttaagaaaaaagggtgttggggtgcattcatttggtggggtgctggcccagcactcacaaagccctgagcttaaaccctaatgtaaaacggcgcagagtggaacatgccgggagtctcagtacttgggagatggaagcaggaaaaccagaagttcagggtcctcctcagttacaagtgtggggctaacttgggctacgtgagactctgaattgaaaggaaaaagaaaagatggcgtggtggtacacgcctttaaccccaacacttagacagatctttgagtttatggccggtctgatctatagagctagttctagaacagccggggctatacagaaaagcctcatctagaaaaaccatagagggagagagggagaaaaaaaggggggaatgaattaggaaggtgttgggtgctcccatataaaacattgaggataatacgatagctcctggtagtcacagaaggttgggcatggttccaccaggagaaggggaaaggctagcctgccctactctactctccagttgtacttgcaagagtcaggatcccaggagggaatctccagccacttgagcccagtggcctgttcatggtgtaggtggtggggcaaggtcaaggtctgggagtccgtttgtgggctccgcatttggacaggggtttagccccctgccgtcagtgttagtacaggagaagggtaggcctcgctcccagaggtgacacccagaggtgacagagctcctccatcccttaaagctctgtgagaggggaatgattggcagggaactgttggctaggacaggggcatcgtgaaggagaagacagcaaggtggggtatgcccatggccaaacctacactgctatacctataccatttacacagttaatccactggaaatagtgagaagagttatatcttcaatgaatatgcccagactcctctccgttgagcatgaacccagggtctcacatgctccgtgttccagctccacccttttcatgacctacgcactagacttgagcaagtgtgcacatgctgtttacattgtacaagttttgtgagtcatctagagatgattgcgagtattcaggagaatgtatatgttatgtgttaaggcaactattttaagtaaaggggcttgagtatccacagaggagcttgtcatccaaaggaccctcggatacagaggggtactgtacactccagcatttgaatggcttcctggtaggattccctaagtcactagtgctcgcaagaaaatgaggaggggtgggggaggacaggaaggggcaggagtgaccctgagtagtcaccagaacctgggtgatgaggaagagtgagtgaggtcccctggagcagcagcagatgttccaccaaggttagcaaggagatcagagtgactgtgctcaggagacatggacagaagagggcactgtggtcaggggtagtagctaaatggaaggcaactcattcctgaggaccagggcttctgagtacgatgtggacccattgccaattggaaaatggtgggttcaagtttgtgctccaattaaaaacaagacagagctggatgtggtagaacacccctttaatcccagccctaggaaggcagaggcaggtggatcggagcttggggacaccctggtgtacagagcaagttccaggacagccaggacaacacagagaaatcctgtcttgaaaaacaaaagaaaagcaaaacctctttgtgtgtgtgtgtgtgtgtgtgtgtgtgtgtgtgtgtgtgttgagcgtctgagggcacagatatgtcataggatgtctagggcggtggctcctgatttgtgctttggaagggagaatggcctatgtatgtggtggtgcaatgtctgtaatctcaggaggccaagttagccaaattagcttgggcctcactgtgatttccaggttcgcctgaaaatcctaaagatgaataaaaaagattaaaatcagagagaacgaaggaacaaagcacgtatagtagcttggagtaaggcaaacaaagagaagatggatatgaggctgctctatgagtcctaccgagtatcctcagtgttagtgaccacaaaggccacccacagttcccacgggtgttcatttccctgacgcaagaggaactcgaaatgactagctccggctttgtctgactctgtggctagaactgggatgtgccatggaaggacttcttttggagatgaaattccgttttgccagagcagtgcttctgggaggaaaatgttttgcaagtgcgctgtggagtaagagagtagctgcttctgtgtttacccatggtttccagctgtggcttagcatccctcggtgacatgagtcacaggttcacagcatgtgcccctgcagggtatcatggcagcaccagggtgtgtccccgggtttcctaggcaattgagttacattgaggtggtgttagatgtgacccagtcactgggaagttctaggtggcatctaggagatgccatggctgtctgggagcctctggtgaggccagagaggggcatgaataatctgtgtccagcacaagtggctttttcagggaggacaaatcattgcccacttcttttataaaaatgtccattgtaataagcttaccacaagtagctatctggttcctacagagaactgtatcattaaccctgatgagggcaggccctgtggtctagctcagactggacatcctttctgcagccatggcctggtgggtgttttgtttcatcctgagtccactgcatcaagataagtagagaaggggctgcagagatggctcagcggttaagagcactgactactcttccaaaggtcctgagttcaattcccagcaaccacatggtgactcacaaccatctgtaatgggatctgatgccctcttctggagtgcatggagacagctacagtgtacttacatataataaataaataagtctttttttaaaaagtacagaagatgagccaatgtgtgcaccgtgagcatcatgcccatgtggctattaagcagcatcttttgcatttcactttgtaagcttttcagggtcttctgatatgtctttcatacccttggccccataccaaggcatagtcaccttctgctctcccctccttcctctagctatccagtcaagccatcggctctccagcatgcatgcttgcaagctcactctctctaaagagttaaaaagcaattcttccacagagagtgactctgtcctgggtggaggtaaatgagagaagcctgtcagcagcaaaaggactagagtttctgtgcaaagatgacctgctccttctcgatgcaggagtctgggtttccctgtcacaatggctgatgcacagattttctgcttcattagtcaaatgatctcttaatgttagggaccccaagatcagggaggcataaccagagacttcatgggtcaggttatgaccttcctgcccaacacagcaactacctaacaggtgcttgcttcacttgcatagccttttgggtctccatggcaactaaagcatctctggtttaaatgcctaatggtccatagcttctagaagctgccaacatgctcacttgctgacttgtggctcctgatagaccatttcctacctcactgcctagttagagaacctttctttctagatgctaagatgttatattagttacttttatgatgcaatgataaaataagcaatttatggaagtttgttatggcttactgttctagagggataagagtccagcctgagagatgtgggagattgggggttgggggcaagcttggcagcaagcagcatccatggcagcaggagcaggaagctgacagctcagatcttcaaacacaaagtagagtgaattggaactggggcaaggcagttaactcaggctttgcccatgctgtacttcctcgaacaaggctacaccatcttctcaaatagtacgaccaactgggcaccaagttcttcaagaacatgagcctatgagtgaacactgtccattctaaccactacattccactacctggcccctgtagactcacaatcatatcaaatgcaaaatgcgtatggccccaaagtcctttagtctaagcactgtttaaaagtccaagttcaaagtctctttggggagtcaagggttttgggttttttgttgttgttgttttgttttttgtttttttcaagacagggattctctgggtagtcctggaacttactctgtagaccatacagagatccagctgcccctgcctccaagtgttggggttaaaggtatgtgccatcaccacttggcttcaaggtaatctctttatgtgatttttaaaaaatatttctttattattatatctaagtacactgtagctatcttcagacacaccagaagagggcatcagatctcattatggatggttgtgagccaccatgtggttgctgggatttgaactcaggaccttcggaagagcagtcagtgctcttaacccctgagccatctctccagccctcaaggtaatctcttaactgtgaccttacacacacacacacacacacacacacacacacacacacacacacacacacaagcaaagtagacagtttcaacagatagtggcacagaaggtccattctgtgctggttagttttgccagcttgacacaaacctagacatagctgggaagaggaattgagaaaatgcctccgtaagattcacctgcaggcaagtctgtaaggtattcactgtaggcaatgctgtccctgtgcaggtcctagatggtataaggaagcaggctgagcaaactctaaggagcaaaccagtaagcagcaccctccatggcctctgccagttccttcttccaagttccttccttgacttctctggctgatgggctagaaactataagacgaaataaatcctttcctcctcaagttgcttttggtcatgatgttttatcacggcaatagaaaccctaatgaaggcaaatgtccattccaggaggaaggatttggggatagagggaactcctggactgcttaggatgacttaccgtcttcactttgctgctgtggcatactgttgggcagaatcctctcccttgcgtgcagctctccttgggtgatggatgcctcatactctggcatcgccaacatctggaggtctccacagcaacctagtcttcaccatcccagcgtcacccagtggcctctcacagcctccctccttctcagttacttcacgcagggactccctgccacacacagcctggcttcagtggtcctctgaagctggggaggaagactctgtgaccctcttcacacttgcattccccactcctcaaaatccagcactgtgtgggcagcaccttcaggttcctgtcagcttgggatggagcctggccccctcaagccacttttgcagatggctttgctttattgttcctttttaggaacaggaaaaaaaacggtttaggtctttctctttcccttgttggtagctttcagacagtgatgtcttgccttgagggcacagctctctgcattccagtgaggagcctgagggctctcctgggtggagctaatctccgtaagagtcccagtctctcttagcttgagcctagctcgcaaccttaaacctaaccagtgtttccctcttcagacttcatttgatgtatttctgtcacacttgctccttcttcattgtaggctgcacgtgcattagtcgtgctaaccacaccacagactctatgttacgtcgtcttgaaattttctccagcaaataaacgagtccattacgtttaaatttaccctcaggcaaattcttaggaccagagtagaaggcagccatgtttgttgttcatatcgatgaaaagcctctagttcagttgctgttaaagttcttgctgctctctgagaccacgtgagctgagcttctatgtcctctttgatgtcagcactcctatgaggacagaccaccaagctctgcctgctgcatccaatgcttttctagtccagagtcttctcatgtcttaccctacaccccaagtccacatgctcaggttctctagaatccccccattcttggtatcaagttctgtttctgggataaaataccatgaccaacagcaacttacagaagaaagctatacaagatgcagagacacatggacttgtgtcagatcttgggggagggctgggccatctaaatgccttctaagaaacagttagaggttaacgtctaggtatggcttctcttagtggaagagttggagagagaaggcaacagagtgtgatgggcaacggatgatgagaaagcttgtttacagtcctgtgtgaaatgnnnnnnnnnnnnnnnnnnnncaattctttacttgggttctgcgagtctgactcaggtcccaaggcttctcagttaagaactttactgactgagatgtcccccagaagctcctagtttaagtcattgtgtatatgtgtgtgtatgtgtatgtatgtatgtgtgtgtgtatatatgtatatataaatacatattttttccataaagttaaataaaagatttgtttttatatgctccagaaaagttgatgagaaacagttgagataaaatttaagaaatattctcctctgtgaatgcttaaatttcctcctccctggttgagtgtgtcagaatctgcagaagaagaggtagccatgctcagtggtagagcatatacttagggtatgcgaggcttcatcccagtcaccaaggaaaagagaaaagagtatctgcctatggctgcagttttctcaagatctagagatgtgaatgctattattccacttttctctttcctgttgttgctgttgttggacgtggttttgtttgaacctaagctgttctcaacctcgcgatccttctctttgtgcctctcaagggctgggattataactgtgcatgactacacccagctaacgaactcactttcattcttcctttctttttctttcaagagacatctgtgcagagcgggagagatggcttaggggtttagagcactggttgctcttccagaggtcctgagttcaattcccacaaccatctgtaatgagatctggtgcccttttctggcatgcaggcataacactgtgtacataaataagtcttagaagaaagaaagacgcatctgtgctttcttagtgaaatggtctcttttctcaagtttgccatagtgtgctctgcgtgtgaaggaaagccatgtgggcagtcctgagaaccgcctttagtaacttgggtgtggtgttggtgataactgaggaaggctgataatcactgtggcacttaccagtgtctttataaaagtccattggcaaaacgttgtgggcagctgggtgtggtagtgcaagcctgcaattgagcatttaggaggctaaggtatgagtttaaggaatttaaggctggtgtgagccaaagagttacgctaagttccaggccttgagcgtgcttcttaggcagtgctctgtcacggaccgacattcccaaccctttaattaactaattttcactttgagtgtctccctaagttttctagtgtagaaattattcctggttctgcctcccagccccatgctcccagaattaagactcagactcaacatagatttaccaataccgtggccatatagctaggctctactctgactagatataactagagataacccatttactttaacctacattctgccatgtggacagtaccatgcgtccatctcatcacatcttcctggtgaatcttaccaccctggctctatcccagaatcctttctctctcctggatgtcccacctccatttcctgcctaagccatgggccgtaggcattttaaattgacaggtgatccatacaatacacaagatattctctctctatcctaggctagccttgaactcactgtgtatcctggacaggctttaaatttaacatcatcttgcttcagagttctaattgctaagatatagccatatgnnnnnnnnnnnnnnnnnnnngggttctgtcctcagatcactctaattaagtaagtcagtaaagcttcagttagtcagtacagtgtgttaaggcactactccttagtaataacaagaagtaacaagaagacagggatgagcttggttagctacaataacaacaactagagaaaaacatctctcctggaggcgagtacaacttttgtccattttctcacttgtctgtgtggttaccagggattgaactcggttgtcaggcttgacggcaagtgtgtttacctgttgagataggcctctctctctctctctctgtgtagcccaggccttctcaaactatatagctcagattggcctcagattgacaacaatcctcctgctttaacgtcccatcccaaatgatggaattacaggtgtgagccacacacccactgtgaattgactttttatggttttataaaatccttctaacatacttgaataattgctcattacttaattacatttgtgtgtgtgtgtgtgtgtgtgtgtgtgtgtgtgtgtgtgtgtgtgtgtgtctaccatcactccaagttaagaaagaacatcaaatcaactttgtctagattcctagtgtaccactctggacccgtcagtcttcttcagaagaccacgaatttctaacaatgttgtcatcaccatccaaatagaagcaactgcaatttcattcgtcccctgccacaacccctgcccaggttccaaaccagggccttgcctatcccatggctgtaccactgagccatgtccagcctttcaactccagtgcttccaaggcctgatacagataaagaacaactttatctacaaaggatacgtgggtaagatcacagctgtccttccttacctgtgtgatccacacttgcagaacaaatctcaggtaaaaatatttggaagaaaaattgcagaaactcagtagattgaatataaactttgccctcgttaccctgcacatagcccagcgtgacgtcatttcacaccgtgtttacatggttttgnnnnnnnnnnnnnnnnnnnnctgtagctgtcttcagatgcaccagaagagggcgtcagatctcattatggatggttgtgagccaccatgtggttgctgggatttgaactcaggaccttcggaagagcagtcggtgctcttaaccatctctctagcccctgggaattctttacataggttctgcgagtctgactcaggtctcaaggcttcccagttaaaaactttactgactgagatgtcccccagaagctcctagtttaagtcattgtatatatgtgtgtgtatgtgtatgtatgtgtgtgtgtgtatgtatatataaataaatatttttccataaagttaaataaaagatttgtttttatatactccggaaaagttgatgagaaacagttgagataaaatttaagaaatactctcctctgtgaatgcttaaatttcctcctccctggttgagtgtgtcagaatctgcagaagaagaggtagccatgctcagtggtagagcagatacttagggtgtgcgaggcttcatcccagtcaccaaggaaaagagaaaagaatatctgcctatggctgcagttttttcaagatctagagatgtgaatgctattattccacttttctctttcctgttgttgctgttgttggacgtggttttgtttgaacctaagctgatctcaaccccgagatccttctctttgtgcctctcaagggctgggattataactgtgcatgactacacccagctaacgaactcactttcattcttcctttctttttctttcaagagacatctgtgcagagcaggagagatggcttaggggtttagagcactggttgctcttccagaggtcctgagttcaattcctagcaaccacatggtggcccacaaccatctgtaatgagatctggtgcccttttctggcatgcaggcatataggcaggcatagcactgtgtacataaataagtcttagaagaaagaaagacgcatctgtgctttcttagtgaaatggtctcttttctcaagtttgccatagtgtgctgtgctatctggatagatgacagtctgcgtgtgaaggaaagccatgtgggcagtcctgagaaccgcctttagtaacttgggtgtggtgttggtgataactgaggaaggctgataatcactgtggcacttaccagtgtctttataaaagtccattggcaaaacgatgtgggcagctgggtgtggtagtgcaagcctgcaattgagcatttaggaggctaaggtatgagtttaaggaatttaaggctggtgtgagccaaagagttacgctaagttccaggccttgagcgtgcttcttaggcagtgctctgtcacggaccgacattcccaaccctttaattaactaattttcactttgagtgtctccctaagttttctagtgtagaaattattcctggttctgcctcccagccccatgctcccagaattaagactcagactcaacatagatttaccaataccgtggccatatagctaggctctactctgactagatataactagagataacccatttactttaacctacattctgccatgtggatgcttacctgtgctcagtaccatgcgtccatctcatcacatcttcctggtgaatcttcccaccctggctctatcccagaatcctttctctctcctggatgtcccacctccatttcctgcctaagccatgggccgtaggcattttaaattgacaggtgatgcatccatacaatacacaagatattctctctctatcctaggctagccttgaactcactgtgtatcctggacagnnnnnnnnnnnnnnnnnnnnaaatcaactttgtctagattcctagtgtaccactctggacccgtcagtcttcttcagaagaccacgaatttctaacaatgttgtcatcaccatccaaatagaagcaactgcaatttcattcgtcccctgccacaacccctgcccaggttccaaaccagggccttgcctatcccatggctgtaccactgagccatgtccagcctttcaactccagtgcttccaaggcctgatacagataaagaacaactttatctacaaaggatacgtgggtaagatcacagctgtccttccttacctgtgtgatccacacttgcagaacaaatctcaggtaaaaatatttggaagaaaaattgcagaaactcagtagattgaatataaactttgccctcgttaccctgcacatagcccagcgtgacgtcatttcacaccgtgtttacatggttttgggtcttgcaagtgtactaagaatgattaaaatctgggagagaaagtgtatttgtataacttctgtcttagggatttgggcatcccagggggctggaaatcagcccaaggcagatgtggagggagctggccaactgtcagtgaggcacaccagcacagccaatgactggtgcgaaggatggagctttggaaacctgctctgaagttttcacacacacacacacacacacacacacacacacacacacacacacacacaaatcccagccacatggtagctcataactatctgtaatgagacctgactcttctgctgtgtctgaagacagcgacagtgtacccacatacatgaaataaataaatctttaaaaaaaaaagatttacgggggctggtgagatggctcagcgggtaagagcacccgactgctcttccgaaggtcaggagttcaaatcccagcaaccacatggtggctcacaaccatccgtaacgagatctgactccctcttctggagtgtctgaagacagctacagtgtacttacatataataaataaataaatttaaaaaaaaaaaaaaaagatttacattctcaacataaagttctttattctattgttttggttggttggttggttggtttagatttttttgaggcagcatctctggagcccaactagcctagaactcaggccagcctgggatttaaggcaaccttccagcttctcccttctgagtgcgggaattatgactgtgtaactcacattgctcagtgatttaaaaagagaaagtaaaaaagaagagtgtgtaagaactgtttttaaatttatttttttctttattttcttttcattttatgtgtatatgtgtgtatgcacctgtgtgtatgcacatgtgtgcatatatgtatgtatgtgcacatatgcatatgggcatgtgcgtgtgattgcaggtacccgaggaggccaaaggcatgtggcctcttagaactggagttgtgggcaagcagttctgagccttgggacatagttgctgagtatcatatcaggtccttggcaagagcagtacactgtaggagctcaagggatgaaagtcacccgatgggggcacttaggggggtctgaaaacactagcattccctcaggggttccactggctaactacctagtcaactttccagcctttggggagcgttttaaaaaaacatgctgcttttcgtacagttgacgcagcggtttccccactataataacctatgtgggaaaacttgccaggagcatttgtcagggccaagaggatggtcagaagaggtagctgggaggtcctgtgccatctttctatgtgggccctgtggatgggtcaaagtggtcctgggcgtggcttctggccagcagctagagtctggcttggagctcctcccaaactgccgggagccgaaatcttggggtggggtgctctgcagggctgcgtaggcttagagccacccaactagtgggcactctgaaaacactagcttccctttgggggttctcctgttccctccctgtcctgcctctccctgggccccgcccccccgcccacctggccctacccccacacagctgccaagcatctgcccagcgcctcccttgtttgcatcatctgctaaacatttacttcgcagattaaagcctggtgtatctaagtaagaaaatgtaccgagtccttcccagagtttaagggccaatagtttcaaaattcaatcgaataaacacagggacactcccagacttcctcatttgatagtgaaatgtacacctaactcagaagcacaaagatttacgaacatatttactttcttctccctaacaaggagctggtatcagttgtaagaacaccttcatattagttcagtgtttgggttgtttgttgtgttttttgaggtggggtctcactatgctgccctggcacagcttggtgcctggcactggttttcggtttgctatgattaattggtaggtttggaacttttaggagctgctgtctgactgtctgtgaaggcctttctgttgtcgtctctgcaagtgccctggctgttctaagactgtctgggttgaactggtttattctattttgtggtgtaacggtcttctgcttcctgtagctggggaggaacaccaagccatactcaaggggcctgggatagagatcagggataggcctttagttttgtttgtttctccatctgtcttacttggatgccattttcttcctttctcttttgttttgtttgttcataagttagactttaaatgtgcagtggctttaaagaaacttctttaaaaaaaaaataatgaggcatggtgatacacacctgtagcctagcaattgggaactagaaccaggaagatgagggattctaaggtatccttggctacagagcctgagactacatcaggcaatgtatgacctgccccaagtacatatagggaagatacatcatatacatctatgacattatcaaagaataatcaaatattaacagaatgaataaaagcaggcatgattgcttatatctgtaatctcagcactgggagattacagctgtaatcaccacctgaggcagggagattgtaatgggttcaaatggacctgggctacaaagtgagtttcaggctaattccagggacagtataagactctggaggtgggggagcctggggagatggctaagtgggtaaagtgcttgctgaggaaatacgaggatctgaatttcaaattcctagaatcactgtaacatttggggagtggtgtcacacacacacacacacacacacacctctgaccccagtgctcctacgggaagataggaaatggaacaggagagaccccgaaagcttatgggtcagttgtcctggcctccatggagggaaaacaagagaacctgtcactaaaccaggtgtaagggtggaagtgacacccagagtttcctctgacctttgtccacattggtactttgtcatgtacagtgtgtgtgtgtgtgtgtgtgtgtgtgtgtgtgtgtgtgtgtgaaagagaggcagagagagagagagagagagagagagagagagagagagagatttttaaactctgtccctactctaaatgagatcccttgtcataggtagttcgttttgtgtctatgtgataaaaaacaaaaccaaaagtgtgtgtgtgtgtgtgtgtggggggggggtgacgagtaattggatgccatggtcctgagcagaaattagagtgttttggttaagtgttttaagaagatgggtgggtcaggaaaagggggtggatctgggaggagttggagagggagtgtgatcaaacccgcgtgtaagagtctccaagagctactataaaaatgagaagaagagggagaaaatcgggtgtctgtacttgagtggccgcaccagtgtctctggattcactgctgtgctaaggcgccagaacttcaagtcataactgacccatcatggtgtggattgggcaagaaggcttgtgcacaggaagagctctgtcctttgtcaccggtgtggatgaaggtgaacagctgcaccttgactgttcgcagctgagccacttatgatgcaagtctgtgtgggtcagtgtctgtgacttcctcctggaaggtgggaggttaggtatcccaaattgttcctggtgggaagagctgagtttaaatagccctgaggctttgtcagggggaggcgcttagaggccggggtaaacctgagattcaggtaccagaggagggagggactgggcagcctggaactgctctggggttggagctggagtgaggcagtcagatttgcgtctctgctgtcctggggcaaggttgtggagtgaaaagtgttcccttactaggttgccttatagctcaaaagtaggaaagatggaagtaggactgccgggagtgaagagcgggaagtctagcaaattgcctggatgctgttggcaagggaggagtccatgatgacagtgatgccagggtgacagggagcaggttcccagccctgtgggcggaactggggccctcagctccgactttattaagccccagatcacaaggctgtggagggagagagggacccgggctaaaggtaaggattttctggactgggtttgggggtgaaggaggggggcaggaaaagacagtcacaaagatagcaaatagttgggataagtagatctctaggagcttggaggagctccttggtgcaaaggagattgagcccccgttcccagtgcctgtagtttccaggtactcaaaaggctgaggcgggaagatggctggaacccaggcattgacacaccacagggaaactgcatttcaagaaaaaggtcgtctacaaagtgagttccaggacagccagggctatacagagaaaccctgtcttgaaaaaaccgaaaaaaaaaaaaagaagggagaaagaaaaaagaaagaagaaagaaaaaagaaaaaggaaaggtcaaatgctgacaaactggccagaataaaaacctgcacttatgtggctcagggtctggagcagcttggtgacctgagtaaaaagaacctttgggttctgcaggagagcaggacactgcagccagggaggggtcaggatgtcgccatcgcactagttgatatgatttgctgaacccatgtgatggtctcctcatcttatagctgaaaataccctataagtgccaagaatccatttgcaatgattaaagaaacttctaacccgtgggactgcatctgagagctcattaatgtgaacgtgctgatgttcacccttgctaaatggttttggtgcaagtaacagcatgcgcacgtatgagtccccgaggagagctgacccgggatgcccacggtcctagcttccctcctcagcaccaccaaatagaggcatgccttgatttagagttatgatgtaatctcctgataccctgagacatcatctccctggtctgtatttccataagatgtttatatattgattggccatttggcagacatgtccacttgagatttttgcctagttttcattttgtccgtgtgatattttttgttgctgaattgtgtgaatttagaaaataatatactctgggtattaatgcagctccccgtcttcccctaaaatgatgggatttactcagaggaacttgttccttgtgtcatgtttttatttgatttttttaatcttttttaaaaagatttatttattattatatctaagtacactgtagctatcttcagatgcaccagaaaagggcatcagatctcattacagatggttgtgagtcaccatgtggtcgctgggatttgaactcaggacctttggaagagcagtcagtgctcttaaccgctgagccatctctccagcccttatttaatttttcagttcaataaattgatatgtgagcgggtatagaagcatatttctttgcaaaggggtgtgtgtgtgtgtttgcgtgtgtgttactggggaccaaacactgcgtcctggccatgcttggcaaagcactcttcctgctgtgttacacccccccccccccacttcctgcaaagttctgtagcactggtggtccgcatccaggcactcaggaggctgaggcaggaggatcaggagttgaagggcagctggggctacctagcaagaccttctaaaacccaaagttaaatttagtacaagtctttggaaatatttttattacatttctttctctattttgtgtgcatgtgtcacggcatgcaggtggaggacagaggtgcaggagcctacctcgtaggtctcggaacccaagcaccttgagtcttgtgagcccttgaagttgttgggcaacacaatgatcatttgcccgccgttgccttagcggtgtgtgtatgttcaaaaatctgcttctagtattttgaaagtaatggatttatatattagttttcgtttttgttttttgttttagaaaacaggccacgtgtttctgtttttctttggtacagttagcagaatgaagcaatgcagttggggaggagaggagacttgcacggctgatctagcatcattctgacctaacctctgttggaacgattttctggtgaacagactgttgtctcaaaaagccaacataggatccccctcttccactgagtcctcctggccagggccaagttacttatctcagagtcttaaaccatccgtaaagagaactgacttaatctctgactcagagccagaaacctggcctggcacagtgtgagtaactatggtgatgacctaggaacatcccacaggggcgtgagcagtgagcctttcagcagcttattcgaccacacctgccagtggcccattctggacaagctgccctctctacagagtggcttagagctctgggtacgacactcagatatagctggagctaatttaaaatacgtatactcaggttattaggggaaatcttcactgaatcttttcctttgattcttgtgacccaaaacctgagtaaccacataattggccatgaatcacctaaaattttattatcccgagactccatttggcattttattagaacgaagggcaaaagagaaaggctgtgtccagtgcttgtggtgtgggtctcacatgtgtgggcagattcaggtaagtatgaaacacctttgtgactcctccaagtcatagctgttggcaaggcattgggatgcatgactgactgtcttagtatgccagagattatgagtttgagaccagcctgggctgaaaaatggttgcctagcatggctccgggaaatccttttggcttgatctgtaatatcattattattcaaggcgtgcgtgcttttatttctttctttgttgttttttaaagtatttgtatgttgtgagcatacacctggaggtaagggcagaatgtgtgggatcctgggtctcatatggcttccagagatcaaatcaggaggccaggccctgtggtaggtgactttacccagtgagccagccgtcttgccagcctcatttgctgtcttgaggcagtctcactatgtatgaccccaggatggccctgaagttgccctcctgtctccaactcctaagccctagggttacagcgtgcccctccatacccaccctgctggagttacagcctgcctctcttggcacagcctgctcctgcactccctttatgctgctttttcaaaaattttcctggacagtcctagccagacagggtggtttacacctataatcccagacattagaacaccatgacagaactgccacaaattcaaagctagcccagactacagagtcaggtgggtgtgtcgggtgtgggagggggaggaaataggaaatctgatctgagttgcttaagcatctgaagagggtggcagtaactaggctgtaaggacagttggttaaggctgcgggtgaccccagctttgtcaggtgtagaggtcacgtgtcctagcccatcatccctttccctgccggccttatactgcataccaagggattatgtgtggtattggctgtacttaacttgtaaaagaggatgaatccgattgcttatctgcaggcacatccttgctgttagtgctttgctggctgctaagactggatagtagaatgctgtccccagttgggagatagtgtggattccacagagtcctaggaatccagaaattgtgctgcttcctttcaaagagaggattaggaacaggccataactgcctgaagcctgctgcctctaggctgagattctgtgggctctagtagccactcctagctggtatttcgtggcttatcgttgcccataatcaagggttttaaaaaggaacagagtgttctctctctgtctcagaaaaacatgataaagattttaactttttattatttttataaggtacagggtcttgcttttttatgtaacccaggccggcctgaaccctcactcctgcatcagcctccccagtgctggggttataaacatgcgctgctgtgtccagcccggaatttaaccctttgcagcaaactcatccatagcttcccatcttctagcacttcaaacagtctctgttttatgtctagtgtttgttccagtcactgtaaagtcgaatcgaaaaggagaaccatctcagaagaccgtgtgtttgatttccaagtttcggaaagtgacttttaaagaacagagaagattaaacaccctaggaaggacacacacacacacacagtcatggtccccatgactggattgatcttacagagaaggaacgggaggcctgagtgtgtgtgcttagggacttctgcctagctcagctgttccactgaagaagtctggagtagagcttgctggcacttaatccagatcacataggcatagggttttaagtaactggagagacactgaaaagaagataaagaagtcaagtgtatccttcatctgtaactggaggcagtccccctgcctcagatttctcttgtgctggaatgataggtgagagctactttaagccggcagatgctggcttacaattttactttcatttatttattttgaatgaatttgggctggtatttaaatgcctgagcccctgggagacatttcttattttaaccactatgttccactccctcacccctataatcatataatgcaatgtgctttcaatccaacttcaaggtctctcactgtctttcacaatctcagagctttttaaaagtccaaagtctcctctgagactgaagccatctcataaatacaccctctactaagatcaaaaaggaaattacatacttcaacatataatgaatgccacaaaatatatattaccattccaaaagggaggaatggggacatcgagggcaaagaatagaccatagcaagactgaaatccagcaaaacaaataccaaactctgtagctccatgtctggtgtcaaaggctttagatgtctgtacccctctagctacctacagtctctgtctcctcgtctcctcatacttccctcttcctctctcttcctttttctctcattctggctggtttcaccccctgtgtgtagctctcccccgcagatgtctcacaactctggcatcttcaacatctggagtctccgctgcacaccaggcttcatttcctcagcttcatacaatagcctctcacagcttcccaccctctcagccttcacgcagaggcctgtcttacatggctctctgaaactgaggaggaagaatgaatggccttcactcttaaacccttcatgcctctaaagccaccaccatgtggacaacactgccaagtttggctgccacttggaatggaccctgccccacttgaatctcattagcagcgactttttacacttttagtctcgaagagagctattttctatctttcagtttggctctcttaggctctctttcagtttggaaatttagttggatggggtcttgcctgaggacaccttttcctcttcccattgaggcgccttaggcttcttgttcatgctgttaacctaagattgcagccttatgctttggaaatgtctctccaaactgtagattgtgtaattttttttttattgtggatcttcataagcattctttaaaaagtaactctactacaaactcgatattaaacagtcttgacatgtccttcaccagagaaatagtccattacttttttaacttaacccagggaagttctcaggtcacaggcaaaagtcagccagattctttgccaaatgtcctatgagtagcttctagcccagttgatggtatctttcccctctgaagcatcttgcactgggctccatcatccatgtagctctcagcactgctgtctttctgctgagcatggctcacggcattcaaccacttttttagttcaacatcttccagaaaataacgtggctagcttcttcctcacatcagcagccctctttctggtcccactttctatattagttcattttctgttactcaataacacaaggcaacttagtgggaagaatttatttggcttatggtgccagaggggtgagtccagtcactgtggagagacatcgcctcaagcacggggcaggtcagtaggagtaggaggctgaagtaccacgtctccaaacacaaacacgaagcagagagagccaactggaaacaaacaggtgagactctgtactctgagagcccacccgcagtgacacattccatcagaaggatggcacctactaaaccttcctgaaaagcacctccaactagtgacccgagccttgaaatgcctgaatctctggggaatgtttctccttcaaaccttcaaacaagacctgtgccaccatgcctggctgactttcttttagtgtttgctatcagtatgtgagagatagatagatagatagatagatagatagatagatagatagatagatagataggtatgggtatgggtatgggtatgggtatggtatggtatgatatggatatggatatagatatagatatagatatagatatagatatagatatagtatgtgaatacattgtagctgcattcagacacaccagaagagggcatcggtcccattacagatggttgtgagccaccatatgggttctgagaactgaactcaggacctctggaaacgcagaaggacaagactttaattttcaccctgcttgagggttccccacccccgtcatccaccggcaaatgtaggctgtaatcctcatgtttttaaaaagccctaaagtcaaaccactttgttctgtgatcgcttcttcccctcagcctgtgtaggtgtgcacacacctgcgcaagtgtgtgtgcatgtggggaggccagaaaccaacactggatttcttcctcattctcttcactttatttttgagacggcatctctcattgcttggtctaggcctcacacatgcaaagcaagttcaccatccctgagccacactccttccagtcatacggcgtcttttaaaggaaagatttgaaactgacttggtcttgctttgcctttattttaggttgtttattttgttttgttttgttttaatgtgtatggctattttgcctgcatacatgtatgttaaccacatgtgcccatgatatccaagaggacatcagatccctgatcctggagttatagatggttgtgagacaccgtgtggatgctgggaattatacctggttatcagggaaagcaaccagttctctggaccactgagccaggtctcaagccccttgtctggttatttttttccttgtctggtttttaactaaatgaaatttatttccagttgttctggaggccaggagtttcagtgccaagctgccagcaccaagtgagggctctcctgctctcctgattgtatgatgaaatgtatcatgtgaccagagcaatggcctgtgtgatatgggatttttttttttggttgatatttgtttgagtttaacaatttcttatttatttgtgtacattggtgttttgcctgcatgtatgtccgtgtgagggtgtaagatcccctggaactggaattgcacacagttgtgagttgccatgtggtgctggaaattgaactcaggtccttttgggagaacagccagtgctcttaactgctgagccatctctccagccctatttacttatttttgaggcagggattctatcagtccaggctggtgtctaaatcactatgtgtctgaagatgaccctggtcttcctgcctcagcctactaaagtgagccatgactctgcccccctccagtccacctcccttgtgtgtgtgtgtgtgtgtgtgtgtgtgtgtgtgtattttactggtgattaaccccactttgcactgagctgtaccctaagctttggttccgttggactgatttattttgaggtaagctctcactaccacagatgcaggctagctttggactcactgttctccggagtgcagggtttatagacatgcaccacctgatctagcttgatgctgtgattctgcagggaacttgatgattctagggtccccagtattcacaagctgctgtggcccaggacagctaacctttatcagtgaccagggagatggcccaggtactgccaacactgggtcaaatctttcagacaaccaggggagggtcctgagtgcccagccgcccctccttagcatgtgaggaagcagaagccaggtggaaacttgctctagtctagtgaagacagcagcagtgtagtggttccctccggttttgaagcacaagctcacaattgccgttgtattttaccagctgcctttataaaaccctttttaacccatatgttgaggatggtcacgggaccggtggttttgtgcatattaactcgttattcataaagtttaaaagacagtgacttcctgtctagaagagatgaaggaagcacactgttgacagctgtgtggaaatgtaaaagagtagcctgctgattgcttatttgggaaatacagaaaagcatggcggaattaaaagtaactcacaccaatatttaagggaactgtttttacaacaaagcccatattttacctagtagtggatacaagtattactttcacaaagcatacacatacttgttatgtgtgtgtcttcatcggcttgcagtttttacacatatattttttttaaacaaaagtcccttctttagtgactccataaattatagttagttaacactatagtagcatcataactcagatttttggcattctatgctgtgaaatcctaaccccatctccaaacccagcaactctgtgctttcttctctgaaaccaacagctttgggaaagtgctctgcagggcgagagcagccccgggggctggagtgaggagtggcacttttccatcaccagggctgagctgccggcgcgctcagtggatttgtgttcgtttagaatttcctcccaaaagtcagcgcgtggtgatgtcgctggagtgactagacgaagcctgagtcacgggcgggcgggcagcaggctgttagtttctgggcagctctggccaggagagcacacagcagtcaagagttcccacagctgctagcctgaaccgcgggccaccctccaggatgagctgaagcccggcttccttggtcacaccctcaacctgctgtgtgtgtttaaacagaaggatggtagctagaggagaaatagcaagattttggagtctggaaagccttcacatgggtatgtgtgcgattctcctgtgggcagccttgctgactactctctttctacattcttcttcctcttctgccccccccccaaatctggtgtgagtggtgtggaggaaaagggggaatttcacttctcccatgagagggtccatcagagaaattgatcttgggtatgacagggcagtcagaataaatggtgtaaggagcaggtgaggaccgtctcttgtgagtgttgggatcgggtgtttgctactgtgattgttacaggggctgtttatgtttggtgaaatccctttctctaaaaaggagataacttgtgagcctgtgagtaggggtatacaagcgctcccttctgctctagggggagggggaagggctaaagctgaagaattggttttaaattcttactgtttggaaagtaatctggcctagttcagtttgtgcattgcgttcatctcactttactgatatttctttcattggtaattggaccagactctaaatgtgcaagaactgatcttctaggaagttacaaactataatccatgcactcctaaggaaataagagggggaggggaacttcacaggaagaattacccccctcctgcagatgctctaaaaacagatcttgtctttggtcttgccttaaatagatgccagaaccttgtgctgggatgaatgggaattgtagttgacagcttgaaggaaggcccagccggctgctgctttcttccttgtttggatagctttgctagctgagacaggacagggatatagatatggcttctgtctctggcaaactatccagcaagactagtgtgagtgaagggctcagtcacagcgctatcagacgtgacacagcagagtaaatccaggagggaggcacggggagactaagggatggtggtcctatcttcccgcagcctccttcaccttgccttgcctgttaagaagagtgctctccccatactaccccatgcgtagtactccagagtttttcatgaaggtttgccctttgggggaatgaatggatgggcacctagcctctgccgtgccactgtggagggacggatcgccagccagcctgcttcacttccttctcctgtgactccactcgagccatgagctcccaagaactgtttcagagtcttggcatactgtgtataagcacaagcaaaatcgtggcaagtggtatgatgccttgtcataataactgtccaaaataacggaagcccctgttggcaggttcctgcacagggcattctgagagggcaggagaggggtatgaaccccagggtcagctgctggatgcttatgccattcaggagcagtagatgtgacccccatgttttaattttcaggggtttttttgtctttttttaagattttatttatttatttattttatgtatatgatcatacactgtatctgtacagatagttgtgagccttcatctggttgttgggatttgaatttaggacctttgcttgctcaggtcagcccaactcgctccggcccaaagatttattattataattaagtacactgtagctgtcttcagatgtaccagaataggatgttgtgggtggttgtgagccaccatgtgtttgctgggatttgaactcaggacctttggaaaagcagtcagtgctcttacccgctgagccatctctccagccccccccccttctttaaggtgagatctcttagtccagtcagtctggtcctgaactcgggatcctcctgtctaaccctcctgaggcctgctggacttagaggcgtgggacaccaccacagctagttgacaccagcctgcagcaaggctggctgtagttgctgctttcttctcctggataaaagagtggagctgatgataattcaggacacttattagtgttgaataccatgcaggatacagctgagcaacccagcgtccctgagagattcctccagccagcaaggtggcaggaggacctggtcaggaagtagagggaatgcaggagggatgtaacccctcaagtgtcagtcagcaaggatggatgtggccagccgccaccaaaaccaggaaagtacagtggtggaacagctgactgaggagaccaggacatgccataggtaaagctaggagcttgcttgctacagggcagagagcagccagattcctcctggctgctggcccagggatgggcaccccggggtgccagctgcctaggcttcccatcccaactcctcctgtctggtcagtttacagatgagcgcagtgatccttagtgagcatggcagaactccaggcaagctgactacactgaggggagaatactcattggtagctttgatgacactgaaggcttactgagccgtctgtagaaaaatgaagccacttctagaagtttgtaatgattaggctcgattgtgatgcctctccctccagccagacacatgtcgagtgctcgtgagagctgcaggtggagaattgttctttttaaagaaccttagacattatagaggataatcaacaagggtgactatttctagggtctgtttgagtcttgttgttggtctgtagatgcaaagagaactatttttgaagaatggatttcaaggcagcaggacatgatactttacagtttatattccactgtgaacggtgtctcgtgcttcatttagttcagtctgcagcacacagtggctcacaaatgagttcctgtcttaacgtctgtgggacatagtcgtggacataactaaccgaaatagaatagcagtaatacggtttagaatgataaataaaccagttgtgtacatgtggacagtattttaaaagaggataagccaatgtaattgaggaaaatgcgtaataaattaaaaaaaaagagaggataagcctgtgcttctagcacgtggttatcgtaggggatcgaagcatagataagagacagttaggaaatcagggaaccatctactaacaagagacagttggcctttaagaatgatgcagaacgctgagctcttggggaaggagggagggagcaaaatgtctcccttcagaacaggaaccaggagcagtcctcagcagcagagccttccattgctgtataacctgtggtgtggtgtgtgtggtgtggtatgtgtgtgtgtggtgtgcagcgtcaggccatagacacacattgtagagcaggtccgtgggtgtgctgctgtgtgaggttaacctgaaggcccactgcctcaattctgtctgactccaaagccatctgagagacgtttggaaacacctctcagctcagtcctggctcagtggccggtaataaggtgagattttcacttttctaagccttctccaatgtggcagggagccatgcccttgagtgttgggggaccactggagaagagtggataaggcatgcctgcagctgtgtgggcattgctggttccctctgtggggaaggaggtggcctgagggtggctctctgggctgaggggctgggcccaccatcatctgtaaccacagctgccagactgtgaggccatttccgcttttgaggaggggaagctggaatagtttttctcagcctggaggaagtatagtgagcggcaggaaggtttctgaaatgtatgtttttaacagactgctctaagcaagggaatttcccccaaacaaagccttggggaaatccccacccggagggagggagctgccaggcagggaaagggcactgtgcattagcaagtctgtgggtgacagcctagcccttcccagctgtgccacctcctggcccagccctgaacactagctgaaaggctgggttcttctcaccttgctccacatccgcctcagacagtggggggtcaggggtgtttttctcagttacacaagagaaagcaaaggctcagagatcatggctttcccaaggtggcctctctgggactctgcagttcagtgcttttaagccctgtcactttgccacaataagccagccagaaagagactggtttgtttggagaagaaagccgcagcggacgtggggggtgggggtggggcagggtgggggaggggacaggacacttgtttttcagagaatagccaggaagggggtacaaagcatggctccggtactgatgcagtgtgaggtcatttcttgttgtcaaactcacctttagaatcagatgctccctcagaactgtgacgtctgagttcagagaagatggtctgctgatttcagtgttcctaaccgtcctgctagcctaggcattggcccattctccataggtagcacacggccctctgcacccattcctggggtcggtcctggtcctggctggctggctggagtttcacttctagaggccattgtgaaaggaacaggggaattgaacatgcagctgttgcccaaagggtggtggcttaccatggtggtccaacccggagcgtgctgaacccactgtgttgtgtatctgaaactggtgggctcttgaaaagtgttcttccagcattgtctctagctgacctcagcacacagatctgacagagggtaagggtagggactctcttagcttactcaaggccctgagttcaatccccacctgttcaaaatactgaaaagagaaaataaggggagtccttcctgattttggctaaagcttttagttagcaagtacttaggaatataattcgtctgctcttgtagtggatgggatcttagagtctgggatcttaaagtgactttggttttgagcagccccctctccatgtgtacaggattattttgctgagagagggagaattagtcttccccagggatgagctctgaaatgattatacaataccaggctgacagccctgtggtcagtgcacaggaacaacactaaacagactcagcaggttgtatttatatatttattcgtgtgtttgtgtgtgtgtgtgtgtgtgtgtgtgtgtgtgtgtgtgtaataataattaaagaaggccatgcgtttgagaggaagttggggcctgggaaggattaaagggcgtgggaagtgatgtaactatgtttttaattaacaaaaaagaatgtcacaaagagaaaaggtgtcttttccatacttggaattgtcaaccaaagaaaccctataggtagctgggcccttgtgcgttggcggtggggtaataaaatgctgtgtccaccttgaaaacaatatggaaactcccaaaatcttacaacagaacgagcaacatcaccactatcctgatcgagttcagaacccaaagaaccgaaagcggggcttctaagatgtggtgagcacactcgtgcagatggctgagaggtgggagcacctggtgtgctcagcacatggaagggggaacagagagggcggcacacgcagcctcaaggcagagggaactctgacttgggcagcatggaaggaccatgagcatactgtgcccagtgaaacacttgtcacagcaaggctgagactacatggtctggacaccaaccgtctgaaatgcttacagaaacaggaaatagagacgtggttggcaaggagtaggcaggggagagaagaaggaaaggaagttagtgtttgttcagggtttcggttttgcaagataaaagagttctgaaggtccaagcccagctgtggagcaaacctaatactactcaactgtgctttaaaaaggacttccgctggggttttaaaaaattagaataaaaagaaaaaattacacgtttggctgtttatggagatatatacacataatcccagctttggagagaaagggtgagatagaaggagggagcctgggctacatagtgagactgtctcaaaacaaccaattcgctttttacatatatacttatttctcttgggtttgtggaagtacattttgagaagttatattagttctttattactcaaaatcactgtaggttaacaagttgcttttattaaactcccatggatagcagaggaaattggagtcttttgcagctggtaggaagtggctgcagaggaccgggcctcatggaagagggtacccacccccccannnnnnnnnnnnnnnnnnnnnnnnnnnnnnnnnnnnnnnnnnnnnnnnnnnnnnnnnnnnnnnnnnnnnnnnnnnnnnnnnnnnnnnnnnnnnnnnnnnnnnnnnnnnnnnnnnnnnnnnnnnnnnnnnnnnnnnnnnnnnnnnnnnnnnnnnnnnnnnnnnnnnnnnnnnnnnnnnnnnnnnnnnnnnnnnnnnnnnnnnnnnnnnnnnnnnnnnnnnnnnnnnnnnnnnnnnnnnnnnnnnnnnnnnnnnnnnnnnnnnnnnnnnnnnnnnnnnnnnnnnnnnnnnnnntttgtaaaaccccaagaccaggattctgaatttctgtggaagcagcgcagcatagggcacggctggggagtgagatgcgggattttctagccataatctgaggtgggtgccgggatttgcgctaaggagacctggtgtccatcctggcctggcctggcctggcatggtgttacgtggttatgtaactccttcgaatcttgcttccctgctggcagttcctgtcctctttgcaaagcactgagtgtgttctctgcagcaggtgtttacgtggggtgctgagcatgcaggaacaaagcatccatctctcacccctgggacggggaactgggagtccttaggtttggggggaacttaaaatcgtagatagctttaaggtcacagaaggcaaagaatggagacaggcttgggaggccgttagacctcgctgggagaggcaaagcctgcaaggaacaggggcctagcagttactgccactcccagaacagcctgttaccagcccgtgtttcctgtattgcacacagattttctgtcttgttacctgtaattggcattacagagatggccagtgctgccctgaaatggagggagacgaatattctattgaggtccccacttcacagcacccagtaaaagaatagtctgcacttatatacgttttttttaaaaaaatcattttatttgttatttaagcatgttcatctggaggtcaggggacagctagtgggaatcggttctctgtttctgccatgtgagacctggggatagaatgcaagtcctcaggcctgactgtggacgtctttaccactgagccgtcttgctagcccccactttccttttagaatgcatttagttatttagattgattgattgagacagggtctctacacatagcccatgtgtgattgcccttgaacttactgcaattctcttgcctctttctgaagatgtggcttttaaatggaatggtcgagaagcatgagtcttgtctgaggaagggtgtcatgtaggagcagcaggacaccatcagaaccagggtgaggtggcgtgtagaggatctcggggctttggctctcccctgaggctgatgagcagtgatgcagtttgaattaggagtgatgtaatagctgcctaggtacatacaaaccataggtattgggtggggtgaggcaggaaggacaacaaggagtagctgagtggacctgttaggggggcccaggcttaagtgttgagagataggtgggaactggctgggttcttatcctctttggaagagaaagtatagttcaggtcggccttgaaacgccagggaggaagaataaccttgagtataggaaacatgaaaacctgttcctattacagttggcagggcgaacttgaaaggggtcaggtgcctttgcccaggcttctttagccagaaagtgaagccagtacagcaacctgggaattaatgacatacactcacgcctgtcttgcagcttgcacttggcacctgtgtcgtgatcgatgcaggaaggttggtgtggtcctcatgtcatctttatgctagctgtctttatgccagccatttcttcaggctgcaagtcttctgcccctagccacgcccaccccagttagccggtggggcgctgagtcagtgtacctgggctaatggaagccactcagcaagagctcactgtggtattgaatctgtcccatgtcccacctcgttcttgtaagcatttacagcaccagctcaggtcacttgtcatttgtccttgtcactttgcaaccccatcccgtgaggtctggcactttcccagtgaattctttatatttcactaatgtaaattatggattgtagataactactgtctttttaaaaaaaaaggctgcttttcccagcaatgggcagatcaggtggcagggtcctcactaggccaacattgttcagtggttctttgagggaaaagtgtcattttcagggttttgctctcagaggccccaatgcttttcttttctttcaatctggctcagccatagctgaaatgtgataaggagaaatgccagtggtactgggcagtgccaggtcgctgctggccgacatccaaagattcctgcagctctgggtcccagccagacccagggtctgtctagtctctactcccccacgatcattagaaccttttagctgtaaacccaggcaggccaccaggcctcactcaggctgctgtttcccctacaagcctcccccagttcacaaaggcttttatctttagtgcttttcctggtgcctgagacagccaacttatgcatacagaatatctcttatttcctgaagacttcctccgtcaacatcccgtacacataccctgggaatgtgtcatagaccatgtacgtaataagtagccttcagttctgcacctgcaaggcctgtgaccacagaaggggcatggaagctacgatttaaaggaagagacggtaccgtaattctcagactgctgaggcctagcttcctcaagacctcacatcctccagccctgcatccctgaaaagtgggggaggggaagcttgtaggtgctgatgactgctagcacacgcgtacacatgtatggctgcccctgcccacctggctgccctttcctgagagactcagaaagataccagattcaggacatcagaggagctcctgagagtgttcctgtgcatctgggctttgggttcaagttcaggagtggcttggctcactccctgaggcacttccaaagcagctcactacattgtagccagagcttgcctgattgcagttagggatgggagctgaggcttggggtgggagaagggactgaacactgcaggcacccagcagcctctgtggagttccagcccagctgcatctcgtgcatttgtccaagattcatgggcacgtcggtatccagagccttgacaacactggtatacagccgggcacgggagtgtgttctcaagagcgacaggagagctctgaaagcagtgttgctacaacaatcctgtgaggcttgcaggggtcagggaaccccagccccagaggacaagacaagaagacatgggcttatgagtgtacccagccagctctcacatgccactggaagaaactgagtggagcttaggcccatgggatggggcagcccagggtgggtatctatggcagaggagcctccaggtcaccccactgcttcctcctgtgctgtcccttttaccagtccctccagaaccttgctgagctcatccagttcccagcctgaggatgacgtacgtcatcagtcacccgtggactatcgttctgctcagctttcaagggtgggaccttgttgcccgttcactgcagcaaccccgtctccacacagcccaccacttcccttcttgttgtaacagagtccttcagtcctgccctgtcacattctgcaaatgttattttctggaacctacagtgtaaggggaccctggattacaaactcattacaccctgatttcaaactcagaagccaattggtatcacattcctgtgacctagcccttggccgtggcacagggatgtgaattctagatcagcctggactatgtagtgagactggtcataaaaaaaaaaaaaacacacacacacacacacagaaagagcagtcatggctttctatggccatgggagtctcctgcctcccttcccatcctcaccccatgcccagaagcgccctagccacaggagattcatttatggatatgtgaaacctcaggtcaaacctgacatgtactattatcttcctatttgtgcatacctctggtaatgttgaatttgtagactacacacaaggttcagatgaacaataataataataaaatataacagtaataaaaacatattccgtagggctcaaggctacttgcctagtaggcataaagccctgggtctatctgtagcaccgtaaatataaaccagcaggcagacataggaactgtttgtttctgggaagttcaatttaaatttttttcaaccactgttgtaagttcatggaaacctttggaggtgaagctttgtgttataaaggggtcatggagtcacatgtgatgaatgcttcagattttgctacccttggctcttggtccagggctagctcggtgtcatggccgaggtggaccctccctcccaccccaccccacccccgcccccaagagcggtattctttcctctctagaggcagcgtgtgttagacactgagcccctttgctcccctcaaagctccagctcaccagccgctggtcttggctccgtgaggcagatgagcatcccccccgccccagttccccatgtgcccccacccagcactcagcagacctcctgctggagaaaatggtgctggaaatgtcgtccctgctcctgtagcagagggaggctaaatcagtatgtctccagcactcagcaatgctgagaggagccatcattctaaaagaacatctgtgtactgtgatgttctaaacaaactgccagtccccacatttttaattaattattttttgagagtgtttcagttcccttccctttgccctcccatataccctttccactccttcagatgtatgactttttcattaatcgttacatacatacatacatacatacatacatacatacatacatacgtgtgtgtgtctgtgtctgtgtctgtgtcctgtgtctgtgtccctaaatacataactgcagtctgttcagtctgtacatggtactggtgtgtgtgttttaaggtctgaccatttggtattggataatccccctcttagcatccctcggttgcctttagttcttctgtgtagtgtacagctcatgggtttcccttcccatccacgttcacttatccgttcttttgtccttttcggcttgttgtttgggactttatgtgtagctttggttattgttaggagtctcagtctcacagcagcctcccaatcctctgtctcttatgatccttctgacccctcttccagaatgttctctgagtcttaggtgtgggagtaatttatagactggaactctaagactctgtgtttctattggttgtggtttctgtcatgggcctgtgtgacgagaagtttccttgatgaagggtgaggactacatttatgtgtgggtatagggccagtatttacgatgtagttagggattatgctggtttagtagagtggaggttttagggtcttaaagatccatgccctcactaaccctggttaagccctcatctttgaaactcctttctgtttggtaaagatgcccacagtttcctgttgtgatgctgagccaccgttccttgtggatgggtggactgagaggaggagtggcccatctgaccacatggagacctcctgacctcagctgcacagctattcccacacagactgcagaagagtgtttcaagttgcagttctccgactcttcacttcctcgaggatatcaacacattgctcgaaaacattactctgttcctgtccctttgccttttaaacaaagtcttatttagtaacttaggttggcctctaagctgtggcgatgctcctgcctcagcccaggttcaggaatcatagctgtgaacccctatatttgtttgcattttttacatccactctggggtggatttcctactaaatcataaataatcccctctcccttgactcacaaagtaacaccgtcagcaatatctgaaatgctctacatcagaggcacagggacattggacgcctgctgctgctggcaccggctgccacctcagagttagagtgttagattagagtggagattgcgaaacacttccctactctgggtgagataaaataaccatttccttgaggagtgttgcctcttgttttgccatatagattggtggcagtggttgttagcttagctgtgtcctattctgtaaccctggatggtctggaactcactgtgtaactaacccatgtctgcctcagatttgtgtgctctgcctcttgagtgccgagattacaggtgtgaactaccgtgccctcgtcttttaaaaacatgctctctctggctttttcccttgcagtctcttcagatggaggtgcggagtcttcggccttagtggatgataatggtagtgaggaagacttcagctatgaggagctctgccaggccaaccctcggtacctgcagccaggaggggaacagctggccatcaatgaggtactcggatcccacatgtgccagatccttggttctcagggctgtggctgtctagttagtccctacctggcatttcctgaagcctgcgactctgctggctgcttttcaacactgagtttccgtcatcgtccaggaccatgactgtaactgagctttgcaggtttctgacagttgtccccataagcacttagctaagcaggtactggtcttctccacatcttgacactctggagtggaacgtgacctcaccagggtgtcacttaaccacatctagtgtggtggctcagaagacatttgaaaagtgacgattccaaacactgagtttgttaggtgactgtccctgcttcagactcctgacttctccacggcatgaaagctagatgccggtgtaggtttggatcattttcggattgtggtgtggagtgaccgttctgttctccttcgctcagtgacttaggtgacacaaggcatcccatcatgtgatgcacttcagatgcgctcttcggcccatcctgggtgccactagaaaaggctgagtcagcgcagtgcacagtgactaggtgtaggaatgcatgctgggatggtttatgatgacttagcatgctatgactccattgtgagccaagaggcgcctgcacaacccagactagccttgaacttgtgagcccctgcctcaaactcctcccacatggcaggatgacaggtgtgtgttaccacatccagcatgtatgcacaccttttaaaagatgactcgagtggccctttaagagcaggttacagtcacctacctaagactgtttcccaccgttgatttcagacaaccagtttacctcggtagcacagatttttgcagacagtgcactgagcccgtggctcctttccgtctgcccactttgctggatgctaagcatgctcttctgtctccatcccagctcatcagcgatggcagcgtggtctgtgcagaagcactgtgggaccatgtgaccatggacgaccaggagctgggcttcaaggctggggatgtcatccaagttctggaagcttctaacaaggactggtggtggggccggaatgaagacaaagaggcctggttccctgcaagctttgttagggtaagtgtggtcctctgagctgtccaggggatgttcatgggcagggtattgcaacagagtttcagcagatctcagtcttcacccaggtccagttcttctgtcattgtgtttaatacacataagccagacctgtaggaaataaggctagttggagtagatatctttttggtttttttcttaaagatttatttattttttgtatatgagtatactgtagctagttgtcttaaaacacagcagaaaaaggcatcagatctcattacagatggttgtgaaccaccatatggttgctgggatttgaactcaggacgtctagaaaagcagacagtgctcttaaccactgagccagccctccagcccccaaaatcttaataatcataaatagaagccaataagctacttggcattgcttctgcccatgaacacatattgagggcgctgtggttttataactcggcacagagagagaggccagggaagtctctgccttggtcctgctaccacttcctctcccctaagctccctgcctcctgtgtgtggcctgcagcttcgagtcaatcaggaggagctgcccgagaactgcagcagctcccatggggaagagcaggatgaggacaccagcaaagcccgccacaagcacccagagagccagcagcagatgcggaccaacgtcatccaggagataatgaacaccgagcgagtgtatatcaagcacctgaaggacatctgcgaggtcagtgccagtcaagggctgccaccgcctctgacccagtgtgtctgtctcatcggattctccggcaagatgctgggtgattgccgcacaggggaaaatatggtcctacctggcgatgttgccatggtcctttcagtgatagtcggtagtctctttacagtggggagtcgggggaaagacagtgtgtgacggtgtaacaattgccgggattatggatgctggctaccacgcccagcttgttattcagtagtctcatctgcttttggagaaccaaacattagcagaagggggctgaaaggctgcttcctcccaagctggttatcattttgtagatcatgtgagctgcgtagctctgggtggtgatggcagcactgctcattcagctgtgagcacccagtgctagcgacaggcttgtgtcagggcagcctgttcttgcatgggtgagcatggcctgctgctgctcatctctctgctccacaagtgtgtggtctttagagtcagtttctggctgagcattgaggagcacggactgtggactgccccgttggttacccggctcagctcagctcttctcagcattatcaccggggaacacatcctcttagtttcttgttgcaggtgagggaactgagaccttgacatttagaggatgggttggaagacagtgtgtcccctaagcttagaatctgtgttgtcaaagtgtgtgttctctaaaaattcatacaggagtagagtggtttaggggcttgctgcacatgcatgaggatgtgagttcggattcctagcatccacataaaagctggatgtggcagcatatgtctctaactccagcactgggaggcagagatgggcagatcccatggcctctctggtcaaccaatctatccaaaactgtgagtcccagttggtgagacattctctctctctctctctctctctctctctcagtctcagttggtgagacattctctctctctctctctctctctctctctctctctctctctctctctctctcttctgtctctcacacacacacacacacacacacaaaggtgtaaaggtgattaagattaaaatcacgccaggcattggtggcacacgcctttaatcccagttcttgggaggcagaggcaggcggatttctgggtttgaggacagccagggctacacagagaaaccctatcttgaaaaaccaaaaaaaaaaaaaaaaaaaagattaaaatcatgtgtacctgaatggacactcttgtactacacatacatgttcacatgttccactgcacataagaaggcagtggtttatcttttattcagtggtcagttctgtttcagcatacaatgctaagaggtaaatgtacgtgcatgtgtggcctttccttcctatcactaactctcccaagccagagcacagctctggtagtatgcctagggaagtagtcgttacgtaggcctcttagtaggcacaggtctcagatcaaggatgtacagacccctggtatataacgaaagcaggtatgacggagcccgtggcgtggatgatcttgggtctttaccgtgatttaacaaaccaaagccacactaactcaggttatcagatttgatagcaagccttcacacactaacctctttcatctccctagccaagaaagtcagaatctagaaagtgtggcaatacggagccaggcatacacatatctctaagcctggcagtgggtaggtagagattggtggatccctggggctgggctctttgaccagccagcctcgtctgcttggagagttccagaccattaaagactctgtttcaaacaaaaaggacactacctgagggaggacacccaaggttggcttctgactctcatacaactacgaacacacatgcaccacaccccaacacaaacacatgcacacacactacacgtggtggcgtttgtaaactcttctgtttgaaacttacttctggaaacttggaggctggccacatgaaactcttcacttccatcttgttttgaaaaaatactttttggtgaattacagttgtagatgtgtaactgtctcatcagcctcacagagatgaaaataattctctctaattaaaattcaccccaccttgggaatggtgccacacacctgtcatctcagcacacgggagtctacatcaggaggtttgcaagtttgagaccagcctgagctacatagtgtgaaaccctatcctaaaattaaactaaaattcagcccaaggctgtggcgtgggccaaaacacaaacagaaacaacaaactgttcaactgtctctaagcaaataaaaccgtttgctcttgtcctttgcagggctatatccgacagtgtcgtaagcacacgggaatgttcaccgttgcgcagctagccactatttttggaaacattgaagacatttacaaattccaaagaaagtttctgaaagaccttgagaaacagtacaacaaagaggaacctcacttgagtgaaataggatcctgctttcttgagcacgtatgtcaccgttcttccgttaatcatatcctgtcagacaatagcgtagaaagatgtctccgccaaagacattccagagggtgctgccttgcctcatgcactgccattagctagataggagttttcttcccatgagagtgaaggatccgaggtcgcatgctcgtgggtagatggcagcacgatctcagagtttctctgctggtgacgtgagttactgggacttattacaagattgactataatggacaagagaagattttggagatcttattgctgtgcttagaggatagttctagtagtgctaacaatggcagcagtatcccctcacttcctgggtgctgggcctggtggttttcttgaggcaggagactggagctggaggagtggatggaccttaaagtgctgagcatggtggttccttagaaatgcaggcagaatgggtccctagctgtcccggcatcttcgagacactgaagacctgtgcgactggagtagcctggtcctgttggggagcagttagggtgaggctttcaaaatgagcaaaagtgggacaagagcagacaggtggatgtcctcagacacagaagagtcttaactgctggtcatcaccgtggtcagccctgtcgggtgatggcccgtggacaaggacaaggaggagacctgttaaaaagggtattttcaaaggaagtctggcaaggctagttgtaccaacaaagaggagagcagtgatctgtatgtagtacttgtgcatagagttagcaggtaggctgggaaatcgcatgctagggaaagggggacttgttgggatgcccgctgcatttacgctcagtcaagcatgcaaagtgggatgggggaaacgggaaggaagggccgttgtgagcatgttgcccaacaactgaagctggaggaaagacggtagccttggatgtagcctagtacccagtgacagggctttcaaagtgatgtctgcccagtcctgagggaaggatgggtgggcagaggaaagagtgtagctccaagcccaggagagcagacagcatgagaagggcagagcagcagtgtggctgcccctcaggataagactctgagagaagggacgtggagaagttggagaaggtgtaacacgtggaaactagccccaagggttgtgagttaggcagtgtgtacctccaaggcagagtttatcagtggaggacggggctgaggccattgagccgagcctcagagcattgctttgcccttctgctgtaccagctgcaggctcgggactgactgagcacagtggtagaataccctctacccacccataaagagagccccgttatccactacccccagaccacaaatgatcacccttcccaccagccacgaaagccgctgtcaagcttggattgcccttggggtcttggcctgtccccctcttctccaggggtgtccctacggacagacggctcagagccattgactgatgaggttgccttcccccttccagcaagagggcttcgccatctactctgagtactgcaacaaccacccaggcgcctgtgtggagctgtccaacctcatgaaacacagcaagtaccggcacttcttcgaggcctgccgcctgctccagcagatgatcgacatcgccctggacggcttcctcctcacgcctgtgcagaagatctgcaaatacccgctgcagctggctgagctgctcaagtacaccacacaggagcacgggtaagtaagctaggggccgcccaggaccgtgtagccaagccccagacagcctggtgctcctggaacggcagggacaggtggtggtggtgctggtggtgctggtggtggtggtggtgctgatgctggtgagggtggtgatggtggtgctggtggtggtgctggtgttgatggtggtgctggtggtggtggtgctggtggtggtggtgctggtggtggtggtgatagtggtgctggtggtgccggtggtgttggtgatggtggtgctggtggtgatggtaatgtggcagcattgctacactgcctctgagcttcagggaagtttcaagtgtttatcagtttaacagagtatgggaagttactccatgacttccagacatagaaaaacaaaagagttctttttttgtttgttttggtttttcgagacaggatttctctgtgtagccctggctgtcctggaactcactctgtagaccaggctggccttgaactcagagatctgtctgcctctgcctcccaagtgctgggattaaaggcgtgagctattacagctggcttctttcttttctcctttccttctcctttttctttttctttttctctttcatatttattttttatatgtaagttacactgtagctatcttcagacaccccagaagatggcgtcagatcttgttaaggatggtagtgagccaccatgtggttgctaggatttgaactcaggacctttggaagagcagtcggtgctcttaaccgctgagccatctctccagccccccttttctttctctttttctttttccttttctttttctctttcctttcctttcctttcctttcctttcctttcctttcctttcctttcctctcctttcctttcctttccttctttccttcctgttttccttcctttctttcttttataaaacagaaaaaaaattctagaaaaaaaaagacaacaacaaaacccctttgattctgcccttctttggggacttttagcaaaaaaaaaaaagcattgtccctttcctttgcttggggcatccacttctggggcagttgcaggtcttgtttattttgcctcctgttcttctgcctcagagaatagttctgggaagacttgctttgtggacaaagctgcagacttcccaggactggagcgcccctgtgtttggctcactgcctctgctctcaaggctgttgaggctctaactcagtccaccagggtccctgctgtgtcatcacgtgagctaagtgctccagcctgttgactgaatggctggtctacacatccccagattacttccactgaacaaaacctgagcgtaacattttcttacacaggccacgcgtggtcttagcctctgtgtaaatctcgattttgatttcagggttttccatatttgacagttttagaggcatgagctgggctctgctggaagaccttcagactgtattgctcatggtcttttatgtccctccctaaacaagtaaaagatgagacttgatgtggataattactttcgaaagggctagtggttcttaagcagctttatatagcagaagtggttgtgttgaaatcaaagcagagatcaagaacagatctcggtactaatgagaataattcacagttgctatgactaacacttggtttctgtgacatttactttcattcatggtgatttctgggaaatgaatggcaacattcttattccaaaagaattgtgaatcgcgttccccctcggctcacttaacctgtgtagactgtagtctattcacgggaacaatggttcttactcagtgcctcgtctagaccattagcatacaaaccagggactgagctcattattttgtcagccctcatgtgtgaacttcatgtctttcaattaaaatgaactttccatttttttgcagcgattacaacaatataaaggcagcctatgaagccatgaagaacgtggcctgcttgatcaatgaacgcaagcgcaagctggagagcatcgacaagatcgcccgctggcaggtgtccatcgtaggctgggaggtgagaggcactcacacatgcgcagtgaggcttgccgctcctgcatttgcacccagtgacaggatacgttagcctcctgtgattggcactgtatgttctggctttcatggagtattgccttgtgcacttggagggattttgatgagcctgaaagacaactaccttaatgatatacaatgtctacaaaaaaattaagtcagagtaggaggtgaggtagctcagagggtaaaggtgccaaacctagagatgtgagtttattccccaggtcccaatggtaaaaagagagaattcgactctgagagctgtcctccagcctccacacgagcagtatgacccacgcatgcctgtacacatacatgtacgcacacacattaaataactaaaagtaacttttaaaagaaacaaggtcactaatacagtgcttagtgtctggtcctctgacacggagagccagctcccacacagtcatagaacacagtcataggagcatgggggactcgagtcatggtgacatattaggatcccaaatgatccaagcaaattatcttttgtctgtaagttgaggaggaaaatattacttcttaggctatttgatcattatgtaatagtacaggtaatcctatctgatagtgatgggccaatggatatacttacccttatttgcgtatccatcgagcgctcacgcacacacgcgtgtacacacatacacacacacacacacacacacacacacacacacacacacagaatatgtagtgctctaacttactcactgctagttacatttatgaactcagtgaattctttcaatgctctttaaaaggtgtaagtacctcctccaggcccaggagtctagacggtcacctctgcactgcggtcacctgcactgcggtcacctgcactgcactagcagctcagaacaagctggtacctttcaggttgttgctgaaccagataagggtcactgcatctaccaactggtcagaactggctttcacagacagaaggcactgggtgagaaggcaggaatagggctgaagtcactgagaacagggtgagctaaagagaaatgctttttcccaggagccctgagcatccctccgacatcgctgtctgatcccttgttgttgtttttttaagtgaagaatctggggcacaaaattgctgtaggaaaggaaatagaagaaatattttggagccaagcacttcggcctgcaaagcattctgtgtattattgggattaaaggaaaatgaaaattttataaatggaggccagcttcataccagcttggttagggtgatgtcagtgtccatccaccctaggtattataaaggggtgattgctttcccaccttagagtctgacatttagggaccatctcatcagaatttactaagttcttgctggcagcctggcgttttgtttgcaggaccctaagctacctataccagcaggtaggtaaacgcctgacatacccataatagtaatgctctgtccctgtgtggcaaaacctctgagtctcccttattgtcatgaagtcaagtctttatcagctcccactccagaaaatgtctgcattccattgtttgtttgttttttaaagatttatttattttatgtatatgagtacactgtagctgtcttcagacacaccagaagagggcatcagatcccattacagatggttgtgagccaccatgtggttgctgggaattgacctcaggatctgtggaagagcagtcagcactcttaaccactgagccatctctccgaccccattgtttgtttatttatattttatgtgcaggatgtcagattccctggaactggagttgaagatagttgtgagctgccatgtggttgctgggaattgaactcaggacctctggaagaataaccagtgctcttaaccactgagccatctctctagtccccagcattctattattttaacatgagtttttagatcagggagacactttgagaaggtcactagatgtccttctccgacctccacacacatcaccctgccagaaagaaatgtacccatgcacatatgcaccatacataaatccatagagctaggaaatgaagagtagaaaagacatggcaaggaacctgtgaagtcgaggtctgagcagcctcggaggccctacctagatgtgtggagggcagcaatgcctggtcttaggaaactggatggaatattctaaaaggctgcatcaaagtccccttctgtatctctgttgttggaaacaatctggtttggaagactcaccggttacttgcattcccttagggcctggacattctagaccgaagctctgagttgattcattccggagagctgaccaaaatcaccaggcagggcaagagccagcaacgcatcttcttccttttcgaccaccagctggtgtcctgcaagaaggacctgctgcgcagggacatgctatactacaagggccgcatggacatggacgaggtagagcttgtggacgtggaggatgggcgggacaaagactggagcctcagcctgcggaatgccttcaagctggtcagcaaagccacggacgaggtccatctgttctgcgccagaaagcaagaagacaaggccaggtggctgcaggcctatgcggacgagaggcggcgggtgcaggaggaccagcagatgggtgagtcccctcagccccctcctccactggccttctcttcccagatactccctcaagggctgaatctgtagatggcactgcaggcatgtgctctgtgtaatattagcagagatggcccatacagcccaagaatgtgttttttgcccttattcacactttacagatgaggcactccttcagcttgatgtggtcctagggactgactacataatggtagcacacacacacacacacacacacacacacacacacacacacacgccctcacccaaccagtagaaatatccgatgattctctttatttcttcacttatctatttatttattttaaatatataagatgcatttattttacgtatcagacacaccagaagagggcatcagatcccattacaaatggttgtgagccatcatgtggttgctgggatttgaactcaggacctttggcagaacagtcagtgctcttaaccactgggccatctctctagccccacttatgtatttatttatgctgcatatgagtatgcatgttcttggtagggtgataggtgtggaggtcagagaaaggcatctagtggcctacctgttctctcaccctctgccttttccacttgtaaagggtctcactgaacccagagctaggctgggagccagcaagccctagccatcctcctgtctcaatcccacacagcattggggttacaggtacacacatgagcacaccagcctgttacgtgagcactgggaattttaactcaggacttcacacttgtagcgcatgcacaccttcccactcctgagaggccatcttcctagcccagagttgtcagacagttgtgttggtttccctttcatcagcactgttgcaaaacactctaccttcccctcactgtctggtcagttcagacccagttcctcctgtgctttcccgatcgtggcaaccacagagcctgtaccatgtgccagagtgagctcgcgcttctcgggttcagtagcgtccttggacaggtagaccatctagagtcccaagatcaaaatctctgaacatcaatgaggaaaacttcacacctggcatcatgggagggacccagtcaaaatgcagatgccctaaaagtgtatagtttggaatcactttcaggctgtgtataaataagataaagtatctatgaaacataactgaatcctgtgtttagactttggtctcatccccaagataccttatgtgctgtgtatgtgaaaatattaggaaatctaaagagtggcatgtgctggccccacacatttcagataaggggaacttagcctgtattttggtttgtcatcccaacttccgctggcctttttttaattgcatgatcttgtgagaaggaaggtgccgtgtggcattcaccagtgcagcactcacagtttctgtgcccacgctccgtagccacccacacagattgggaacgtgaacatgcacttccagatgtgagcttcggtgcccagagaccaggggtgcacaggggtctcatgggtgagaaacgcctgagttgcccagatctcaaggaccatgtgtctggtcaagtatcacccactactacagagcccaaggggctttaagggtggtttctatgtctcctgttccaagccaccagcttaagatatggccttagattctgcagttggctgtagaaagtgtcctggggtcctgtgttgaactccattggcctatcttgccattaaaagtaagaatttcttcagaaactaccagagcagagactagtgtgacagcacacaacggccagcctcacagacgggatctgccactctgggtagctgccctttagacccaaggaaatctggacacacacacccccctgcagtcgccatgcattggctgctgaccatcagaccctgttgcaataaggcatgccacgaaatccttctagaagtgtgcaggtaattactgaaacgtgaagtgatggggtcaccagttcccagttaactgagtcactctgcactgtctggtgtggctataagcacccgagtcagaatgtttgcacttcttcccctgagggttcatgacaatcacagaagagtcctgaacactcagctctgttcttcctcttgtgcctgtcctttgcctcatgggctcctgttgcagagtaccagtgaggtcaggtcttcatgctttctctggagccacacaccagtctctgtgtctgggtatggggtgggaaggagacccttgccagtcaggcagtcattaaatatgtcactgcataaaggcaggacatcagaattaaccaaagtagagtagatccaagacaaagacgagggtcaatagaagctgcagaggtagatatgactcagctttgccacattggagcctggctcctcacctcccacttgtgtcccacctcttacctcaggagaagcagccacctcagccactgtggttgctcctctgccgtcttgcctccctccaaagccagtctgtcctctcccccggtacagcttacctcaccaggccaatacctagttggcctaccatatgttgacagcattgctgtccactgcacagccagggtgcagagtcccagtctgaggcttcaggcaagtagaatctcagcccacagagctcttggcacgtgtgagcagcagccccaagcctctttgccttgggccgtcttcccagagcgtcatgctttagacctgcagttagggtgactcccatgtggacattgacctggcagtgtctggtcttgagacactaagggtctgtgtgtcacgacaattgtacctcatatcactctctaaaatacctgagctcagaggtcatcgtgaggcacccggtgacttctggcacccttccttttcctcgcctcgcagggctctttacttcagtctgtcagtctgtagagaatgcctccgcactggtgcgtggtgtacacagtttgttctgaaaatgttttcccgggttctgaacgtagaccgcatctgtttccaaatccaggtatggaaatcccagaaaatcagaagaaactcgccatgttgaacgctcagaaggcaggacatgggaaatctaaaggtaaggttggcggaagcttcgcctgcctctatgcatcccgtgatgacctggagtctgtctcacagagcctttttgcagctctgcgtggagaggaaaagccagactgcttaaggaacaaatgcacaggcaggtggagagtcttcttcaggtttggattcaggtgcctgaactatctcagtagcagtaaaggccttcagggctcccagtcttgccagtgccttctgctcctcatggccctagaggatgagtctcactgggtatccactgagccaccagtcaagtaaacccctgcaactttgatttgaggaagaatctcttaacaccaaactgtttgccagctacaaatgagtgcagtgcattccagtgaggtgaggtctcagctagaggggactgcactgcattccagtgaggtgaggtctcagctagaggggactgcactgcattccagtgaggtgaggtctcagctagaggggactgcactgcattccagtgaggtgaggtctcagctagaggggactgcactgcattccagtgaggtgaggtctcagtgaggtgaggtgaggtcccttagataaggagactggactgcatttcagtgaggtgaggtcctaacattcagagcaccggtagataagaagaccctgggcttctcctagagcactcccccactcttgtacatactagaatcacttagcagtgacatagaagacttcatgactgggccacaccacggtcctagtgctcacactcagtgctctccccagggtaggtaatgccagtgaatgctacctcattcattcttgctactcccatagtagagattagtgagctggggcacagagaaatcaaagaattcccctcaaatactcatggtcagtaagtgtggagtggcattcgcaccaagggagtgttggctccgggccttggttcaaaatgtgttactgcttccagtccacaccagaaagcccagttctgagtctttactgatctctcttgtggtggaagttgacctgctccatcccctcggcttccttcttcagaggttttgggtaggcttcatgaggtaacccttgctggtcctgcacagggtatctgaattctcattttgtagggcagttattagatgtcctcttgattccttggaattagctaataagtactttagtcccaatgtggcttcctagtgactggtctgttcttctgtccttcctgagttaggctacaacagctgtcccgtggccccaccccaccagagcctgccgccccttcaccagcgccacatcactgtgcccaccagcatcccgcagcagcaggtctttgccttggctgagcccaagaggaagccatcgatattctggcacactttccacaaactcacccccttccggaaatgagccttacccagggcgtgcctctgaggtactgtggggaggaagaccagctttgtcacttcagcgtgatgtccggggatggcttcttgctcagtgctgaacacttcatttggggatcgatgaaggggagaagaagttggactcagctttgaccttgaaaggccccagcacccttgtcgaaggaaggaaccatgaagcactgttctgtcccacactggaagccacactctccggtggccatgatataaggaccagggcttctctgtatggagactgctgactcagtttcccactgacggtcacactcctccagttccgaacagtatcaggagcctttcagttcctcaggagcaactacattgaggacagcttctgtgtttgatcttaaaggagactcattgacaggagttggtaggatgttggcagccatgggatgacctgggtctggtcaggccctgaagagaccatgaaggaactagagccaatggagcaggtgcccatagttctccaaggtgtcacagatgccaagctagagtgtaggtctcatcctgcaaggttccttactctcaagagaatcgggaggcacctgctgccctggcagtgccggggatgatagcatcctcagggcagtgccactttccagacaggtgggaaggctgctgccacctgacttgtcccttcaaacagcggtcacgccttgctcacccctcacaacctaagaacctgccatccgcagaagtacgggtgatgtgaaacgtgtaactttgataatgtgacactgcatcttcagcggccctttgtatcactggtgggatgaagaaggcacatccacagagaaaaccagggcaaaaccatcctgcttcctggggaaatggacacgcctctgtcacgtgaccctgaaacagtagtaaatcgagaatggtcttgatggctccttagctctgagagagctgactcttaatgagggccacaggagctgacacccacagagagcaacctttctctgttgacactgtgtttgttagttgatgaaaatgccttttaactcgacctaagggagactggttctgcatttgaatctgcacagcgggctggccaggaggggtcctgccgtgtggctagtgtgttcctttggacgtgatcttgtatgcgggttttgtgcaaggttctcgcctctcatcagctctcgcttgaggataagcaagtccgcagtgtcagagatgaaggtattggtccgtcagcacagttcaccgtgtctccacatctatgcctgaaacaagtcacatcacagctaataaccttgaccctgggcctgggatcaacctcaaccctgctgtgcaccttggcatggtcacttataggcagcactgctgaggactgtagtcagtgccccccatcccccgcaggtgtgtctgtgtgctatgaagtggttcaggtgtacagagcatgcgccgtgtgtgtgtgtgtgtgtgtgtgtgtgtgtgtgtgtgtgtgtgtgtaagagggtggcagggagggagacggaggcctcaacttcactgcatttatataactgacaggtttggttggttggttggtttcttgtttgttttctaatagaatgtcaggatatatttttagaaaccatactttgggtacttttctgtgctccagtgtgtgtgtgcagcaattctcacagttgtattgttaatatgaaaattgctttaaagaagtgaatagtctttggtcctgttcattttcactgcggattcctcttgagtcagacccgctgcaggctccatttgctgttacagctgacgacagtgaagaaggctatgtttgtgaccggtcctaatagaattcccagctgccctaacttccagttcccaccacctccacagagccccctaacaatcccggatatcaggacgtgtttatattgagtcacattcaagacctgggctggccccgggtgattttatacagcctgagaagtgcttgatcaaataaagtctgacccaggtgacttacttgggatttctgggtgattttgaaaactaatgtgtttttaaaagatgtaatagcctttgactttgtaaaactctgtatgtcagtatgcattttattaccaaatacagaatgtggaggacctttagtagtttttattttcagttcgccaaacttcctttttgatgtaaggcatgtgctctactttggaaggaaatagaaacaacaaagaacctcctgcccagacggctcacgaacatcccctccctctccctcaatgggccaaataatattggtgatttaaaatgttgatgaattcatttgttctatttttagcgtatttttagcattccagaatttgccagctctgttcacgtgatagagaaggcctccctggcttagattgtacctataacgtgtaggcgtcgtgtggtaggtaaaaagtgatcacaacacttgaaggtgtagagaaagaaagaacattccagcagctgattgggcttgtgtgagcgtttgatgccggcccctagctcctgtcacctgctctggtcttccttgcctctcgcgcgtggtagatccacccctgcaggtgagagccaccaccgccactgtttctaactactgtgccttttactgtccaatctattgaagactgattcctcatcctgcgtcgctgttattacatgcaaagcataaagtgtatttaatttgaaacctggttcaaagcgcaagtctttttttttttttttttaagcaccagcgctccagcattgtgtgcttgtggggatctgtaactggattgctgatgtttctcaggacaaattagtccttttttccagccagagtttcctggagccagggcatggtttctgcattacggcttcatcacagataggaaaagcagaagtgtcctcaggccagtgccaagaaatataagtcagtgcctttcagctgacaggcaggatgctgggcacattgtgcccacagattgttccttctcaggacccggggaaaggggcgcttgaaagatttaggacaaagtaagtggaaacctctagccagtcttagagaggggaaagaaacatcagcttatataatgtatgtaaatttgctaagccaccccatgtacctaccacattattgcctttactgttctcctgggcattgccaattgtatttagaaagtactttgagccaattctataatttaattggtcctcttttggggtacatattggtgcccactgtgcatgacttgccgatcttggctatgcttttgatgataacaaatccaggctgcggtgctgtggtctgtaagagtcaagctgctgagctggtgggctgcctttgaccctgaaataggacccgcgtgctagacgtgcatcttggctgaatgaagggtttattggtttttagtgtctttttgttcttaaaaaaatactgttatttgatttcttgtaaatgctgtgaatctctatttgtcattttgtatttgtatattaaaattaatttgccaagctggttctagtgatgcatctccatagtaaaagaagatagacacattatacagaaagcggccggctggggcaggcacaaagccctgggtttgattgtcagcactgcataaaactgggtgtgatagcacatacctctaattccagcgcttgggaggtggaaggaggaggttttctctggcttcgataaggggttcaaggtcaacctaagccatatgagactctgtctcaagaaaacacttttaaaaggcagcagatgctggaatttacagatcctttcttgccttgagcttggtgcttcttcctaaagactcattcctgatgggtgggagggaatcactgggagttgttggagaaaggctcttgaggggaggtggagaggggccattagagtagtctatgagtcagagaggacaagggacagtttggatgggttttgttagcctcttctgcgtttgcagatgtaaccaggaactgccccacctcttaccctcaaggccaagcaggccctcttgaccggggctgagtgacagcccagccctggaaggctaaatcccttgcagttttccatgagtgatagagcatgggtgaccaggtctctatgcctctgagtggtcagagctgctggcgaggctcttccctgggaggtcagcctgcagccatggcctccctcacccagggggtggggtgaataggaatttcctcctctcattagcaagctcagaaaaacccagtaaacaagccattgtttgtggtgactaatcagagcatggttcctctgggtggccaaagctgcctcttgctttctggtgtttaatcccagcataatctgtccacttgctccctcctccatggggtccactgacaaagagtgacaatgacagccctggggactgaaggggtggcccagggtggcaccatgcacagaagggaacatagggggaagaacgttattctagaagagttgggaagtgaaacaagcatgtatagttgtctactgcatgcacaggagagaccatgtccctttggaggaatgtggccagacaaacccaatgatgttcttgtatcagtagcaccagagatgtgaggaggtaggcataggacagctcctagaatggagtcttcaacttaaatatccaggcccagactcaactcctaagggttctgtggagaagcacatagggcttacctagagaggtgcagtgcctctgctgggtcagagctgagaccatacagtgcctgtgcagctggactttaagcaaatgaccaggaccttgtgacactgatggcatttggcattccccaatgtggctgaagagctcaaggccagctgtagccagtattgcctacgtaggttgtgaagagaagtttcaaatccgaggcagagggttgcccaggatgtcaagcaggctgcacagtgatcccagcagaccttggggaaggaaggggacactggtgaccaagtcctcctcttatgaataggagtatcataaactgaggcagaagagtagtgtaaacaatgcaccaacaggcttggttcctgctaactcgggagagagggcaggactaggaatacagctagagaggattccccacggccaggggagcagaagggcctgtggcagcctgaagctgagtgaccacagaggtccctctagcaaccaactgcactacctacacatgaagggacttggctgtagcagtcagacctaaagaagctaaaccgtgctcagtggatgcaacccagtataatggatgctgccaaacccagtcccacctcctcttgggtacattgttggggctgtctgtgggctgaggaatgaatgtggggtgtggttagctctgccaaggtgagacttcccggtacctgcataccccatccccagatggccactgagggtgagctcctgcccttcagaacagaacagtatccttatgctcttgaaaccgctgcacgtttgcctgaccgttaagacacttgtcaggagaagctacagagcctccgagtgctcctcggtgggctgaaggtcagggaaaggatagacagagtcctcatctgctccatgcctggtctaaactcacagataacgaagctggtaacttgccgcatcctctgcaccaaaagctgaagtccggggttcctggaagagaagagtaattgtcaggtccgaaaggaacctcggtttcccaaaaaagctgtgggtaaccccgagatggcagcgtttgctcagctacatttgctcagctcaggctgaactatagacagagcagtgttcctcaggaacccatgaaaggggcttctatctggtggaaagggccccgtccctcagcatgtatttgtggttgtgtatccttcagttccactccgcatgtacctgacacatttcaagacccacactcgctagcatcctgtcctcacctcctctaagttctcaggctgatctagttccctccctcagctgcttgtcctcgtagagccctacttctctagtgctgggccatgggcttctttttctcgctgctctaggctcttaagatgcctctggctattctcctttcacacctgtagtagaaacctttctagctagggagccatttcagtggattattcactgcacccccacttacagcagtgaccatgagcagagactcaaacagacttcctgggtttcttctctctgtgtagcttgtccaggaatttgctctgcagaccaggctagcctcaaagtcacagaggtctacctacctctgcttccagagtgctggaatttatttatttatttacttacttacttacttatagctggactgaacccagggtcttgtgcttactagacaggtgctctaccaccgacctaaatacccaaactggagaagataactttattttactgtttggtatatttaaaggacagagcagggtcactgggagcgtcaggccttatcgagagctttaggagtcacaagggtgctcagagctgcttcatgaaccatcctaccccccatagcatagcagaaggccttttcctcccgactggaagtgccctgcagtattctgcacagacgtgaatgccaatgggagggttaactgaatccaaggttgctcttaaatgtagttttatccttaatgagagtcccaggcaacagtgactgtaatcattaaaagttctaagtaaacaaagggaattctgctgctctgtgctgcaaagaccgcaggttacagtcacggtcctcctcgttgttacatttacgcccgtttcctcacccctgatggactcaaggccgaggagagggctgttcacaataaggaaagaagcctgtagtggggacctcttctcccacattccacctgctggcacaaaggacagagaagaaaaggacaaagttgtccatacctgggctgctgtgaagggaggctactggaccctagtgtcgctgtgattttttttcctgaagctaatccaagacatcttgtgcctccctccgtcccctccccttcctgctattttgcacttaggttcactggggagttctatggcaggaaggcttgattttattaacagtgagagggttccctgtttgcacagtgccaggatccagcctgcaactcctgggctcaggtaagtgcactaaaggatattttttcacattcagcacccgggttctgaggtagccacgtgtggtataaagccctgggtaagaacagagataatctgcttcttaaactttttttctaaaggacaaaccaggtgcggtggttcatgcctgtaatgtcacactgtgtaatgtaatgacacaaaaggtttgggctacagagtaagttccaggacagacagcctgggctatagtatgagactgtcagacagacacacagacacacacagacatgcacagagacacacatacacataggaagggaaatgaggaagggagggaaggagtgagggagggagagagaaagggggaagagagagagagagaaagagagagagagagagagagagagagagaggagaagagaagaaggaggaggaggaggagaagaaggagaaggagaagagaagatagaaaagcagagaatttcatctgccagaattttgcactactggcctaggaagaggcattttaaaaaaaaaaaaacaggataaatcacaaaaataacagacctttctagaaaagcttatagatcatcagctacacatttaatgagtgttttaatagttgtgtatatgctgatttatatggtctataaaaacaatatatgttgaagaaaagatgcctactgtaacattgtatcaaatacatgggagaaataaatgaagccaacttagtgtaaggaatgtcaccgggcagtcttacactcaagcaagctgagccttagcaaagatggctcgcaagctggcctggtgaagcagacctgtccccagcacttggagtgctggggcaggaccatgagttctaagccggtctgagctgcatagagagaccctgactgggaaaagtgttcccttgatttctgttaaatgttcgtgtgtggggtctgcataaggattatgaagtgtttgcggggggggggggggcataaggaacctggaatgtttgagaacacatggctgtaaattagagaaaatcagaagaggtaccaaaaatggctttttaaaaaaaaaaaacaatgtgtgtgggtgttatgcctgcactgtgtgtaccacactgggagccaggaaagggcgtctcatcgtctacaagggcttcgagagcctcctggtactggaagatcagccatttctccacccactaagtggcttttcatggagaaggtgggaagtgaggcagaacaccggtaaagcccggaaaagtcaatctagggtctaccagtggcttctgcacccagcagcaggagtgacgactgcagagaactcactgggttggcgctaagaaaactcagctgcctgaagtggagtggccttgtgactgagggaaaccttgggaaacactttcagtatcccatcattctctgcagctttcaccagagggcgacatcatcttttggatgtcagtgtctagctacagaggggctggagagatggctcagggatggagccccagggggagtagagttcatttctcagcacccacatctggtggcctgtaacaccagctccagcaatgtctgatgctccggcctcaaagggtttttatgtttgtgtgttatgtgtgtgtgtgtgtgtgtgtgtgtgtgtgtgtgtgtgtgtgtgtatgtgcacacacacaattaagaaaaataaatagctacaaatgtgtaaccagcactacaaagacatctttcctcacaggaaagcctcttactacatcattctatacattaacatgtttgcctatttgcatacatttgtagttttttataatatacatacattaacatcctcataatgtgcctgattttaaaaatgttaaacctgtgtgtgtgtgtgtgtgtgtgcgcgcgcgcgcacctgcgagttgtatgaatgtcctcagaggccagaaaggggactccaatctcctgtagctgaagctataggtagctacctcctgtgggtgctgagagctgaaggccagtcctccacaagagcactgcgtgaacttagctgctgagccatctcttccagcccgattttagttctttttgtttggctgggtcttttgagacagagtctcatctgtacccaagctggtcttgaactcaccatccttctgccttcatgcatcttttacatatttcactgaccttcatgatattctcagcacttacgcactggtctacttcccaaggctattctcaagcattacatattgtgcccttttccaccttagcagaaaatactgcagttaccgttggcacacagatctttgctgtattatgaataactgcagagatggtactactggatcaaagagacagacaccctgctttttgccattacagaggattgtggacatctacattgctggccacagtacataggatctggggtctgatgggttgcattaacccatgtgttctttggtttggtgggggagggatgcgttgctctttaaatattaaaagagctgccatcacatagtccttgtatccacctgtcactgcccagcctcctgctcggtactaaatatcagggactggggacgtaactctcaaagtacagccaggtgagcttttgagtcccatgactttgtatcaaacgcaacgcccctgccaggcaggtcctgggggacagatggtatgacactttgcacactcacagggatcctcagctcgatctggaatcccacccattcaaatctcaaagactcaagcccctgcaggggcttgcatgctgatcctgttatggggagcagtttgcctactgatcttgcccagatctcagctccaacctgaggctgaagacatttaatgttttgttgtttttattgtgataaaatacataataagatatataataggctcaaacttactagtctaactaatttaagtgtatggttgaatagcagtagatacagtcacaccatcctgaaaccatcgccgtcattgacctgcagaggtctcatcttccactgaacagcgccccctcccttcagctcccggcacctgccatattgctttgctccatgatttggatcacttcgcatacataccagatctgtctttcagtcccagaatgtcaccacctaatgtcctggaggggaccaggatttcctgcttttctggggccgaatgacatgccactgtatttatatactacgtattctttaactgctcatccacggatgtgcatgtggcctgctccccctagtggctgccaagaatattgctgccaggaaccccaagcatagtcaaacctttgttgttgttgttttgttttgctttgttttgttttttattcccaggaatagagttgctaggtcagatggtaatttcacgtggctttttatttttagtgtgaattttcatgtatattgtggtcaaatgtggtctttatactagccccatgggataagaaagcatttttctgtggcttaaaaaagtagcttgctcaaattgaaacaatacataggagagtctcctgacctcaaaacttggcttccacatttattgaccattaaaaatggtcccaaccatgtgttgccatctaagaacaatgtcccttccttccttccttccttccttccttccttccttccttcctccccccatctttctttccttcctttcttccttccttccttccttccttccttccttcctctctctctctctctctctctctctctctctctctctctctttctttctttctttctttctttcttttgcaacaatggggtctcagcacataactgaatactgttttgacccggaacttgtgatttctctctcagccttctgagtgctgggataacagttgggtgccattatgccaggctttgcaacaagcttcttctagtccaggttggtcagctacctggtctctggttttctcctgccctgttcatctgacgcagtaagatctggttcaggcctttgtcagtgcagagacaggaggccctgtcactcctcagcacctctgtccttgctgagagaccaaaacctgtctcattgaagaaatgagaggcagtgttcatgcccagcaactgtacctgcacccaggggctatacatccttcagtttctgttttccctctttcagttgagaccctgtggtctgaccatgaggatttggtggcttctgctggttatgggtgcatgcacgagaagtgtattctcccaggacacctgccggcaagggcactccggcatccctgggaatccaggtcacaatggcctacctggaagagatggacgagatggtgccaagggtgacaaaggagacgcaggtacttgacacttgctgcttcttatggccttcttctatcccttcagtcacccacctgccactggtatactgttccacctgcccactgagccctcacccaccaatgtgccctgcaggtgctgaatgaagtgcagggcaaggtcaactgcaccccacccccacaggcttctcgtcgacagcagatgactgttaacaagtgttcctacaaaacaggcagaaacacagagtgggatactgcgggtgtgatgcatcattagtatcatgagatcagtggagcaatctgatggctaaggacagaggcaacccccatgcacagggagaaggcccacagtggacgcctatagccatagaaagcacagaaccctacccatgtcttgcttcctcctatatatgcatcatctatgataatgtttaatttctacactaggtaaggaataattaaccattaataataaaaaagattaaggattacattttaaagttcccagcatcaatttttcttacacttagagaaatttattgttacagttaaggttatgttgccatcagcattgtgaggttgccttggacatttgaatatctgagatggctgcaaagtgactgacaaggaggtagcatatggcttcccaggagctgtggccatggcatgtaccaccatgtctgggtcagtgtttagttttgaatgtatgaaggattttaatataatttatttatttatataaattcttagtgtatgattgctctgtctgcatgtagacctgcatgtcagaagagggcatcagacccctttatagatggccttttgtaccatgtacgtgctgggaattgaacttaggacctctggaagaacagccagtgcttttaaccactgagccatctcaccagctctgaatatataaagttttaatgtttattatcagatattttgtacacatgaagcagaggggtgattacaagataaatcaagaggaatatacctcaacctggtatgccaactttgtttacttctccctttgcaaacatttctccatctttcttggttgttaatccctccaccctttaaaaaaggttttttttttttagatatttaaatatttcttatgtgtatggatgttcttttctgcatgcatatttaggcaccacatgtttgcagtgccctcagaggccagaagagggggcattgagccatctggctgtagccccaatgtgggtgttgggaattgaatctgggtactctggaagagcagccagtgctgttaggatgagttcaattctaactcgttctccccttctctccctccctccatccgtctctccatagagttgcatgtagcacaagctggcttcaaacttgatatgtactcaaagacatacttgaactctttatcctcttgcctttgtctaatgagtcctgggattataggcgtgtaccactcactgtacttggctcaaaatctatctatctatctatctatctatctatctatctatctatctatctatctatctatctatctcatctatctatccattcatctctctttccctgtctctctctctctctccttccatcttttcctctcactggtggtggtggtggtggtggtggtggtggtggtggtggtggtggtggtggtgtgtgcgtgcgtgcgtgcgtgcgtgcgtgcgtgcgtgcgtgtgtgtgtgtgtgtgtgtgtgtgtgtgtgtatgtgtacatcatttttaggtatctccctctattctgctcagctttacagagggcagggtcttctgcagtacctgaagctttcatgtggaccaagctggctgactggctagcgaatcctcacgacccccgttacctccccccgcacccccccactccctgcgttccagtcctcgaatagctatgctcgagtttttacatgggtggtggggatttgaactccagtcccttgccacagaccaccccagtcgagtatgggggtccctggaatgagggtccttgaagctaggtgggtaaggattcggtggtgacaaacagaaacaaacacagaggcagtttgaatctgagtgtattttgcagctctcaagcaggggatttaataca

SEQ ID NO: 484 - DNA, 5593 bp, Mus musculus
gggctcgggacgccgcacccggccacgaccactgtctgactatggccagctggccggcagaagcttgtccattcctgaagatgccattgctgcagaccctccagatgaggaccacgtggacaggatgcacccagcaagtgtgactaccaccagccaggatccatgcgccccctcaggctcttgcaggggaggccggagaaggcgacctatatctgtgattggaggggtcagcttctatggcaacacccaggtagaggatgtggagaacctcttggtccaaccagcagccaggcctcctgtgcctgcacaccaagttccaccctacaaggctgtgtctgcccgcctccggcccttcaccttctctcagagcactcccatcgggctggaccgcgtggggcggcgacggcagatgaaaacatccaatgtctcttcagatggaggtgcggagtcttcggccttagtggatgataatggtagtgaggaagacttcagctatgaggagctctgccaggccaaccctcggtacctgcagccaggaggggaacagctggccatcaatgagctcatcagcgatggcagcgtggtctgtgcagaagcactgtgggaccatgtgaccatggacgaccaggagctgggcttcaaggctggggatgtcatccaagttctggaagcttctaacaaggactggtggtggggccggaatgaagacaaagaggcctggttccctgcaagctttgttaggcttcgagtcaatcaggaggagctgcccgagaactgcagcagctcccatggggaagagcaggatgaggacaccagcaaagcccgccacaagcacccagagagccagcagcagatgcggaccaacgtcatccaggagataatgaacaccgagcgagtgtatatcaagcacctgaaggacatctgcgagggctatatccgacagtgtcgtaagcacacgggaatgttcaccgttgcgcagctagccactatttttggaaacattgaagacatttacaaattccaaagaaagtttctgaaagaccttgagaaacagtacaacaaagaggaacctcacttgagtgaaataggatcctgctttcttgagcaccaagagggcttcgccatctactctgagtactgcaacaaccacccaggcgcctgtgtggagctgtccaacctcatgaaacacagcaagtaccggcacttcttcgaggcctgccgcctgctccagcagatgatcgacatcgccctggacggcttcctcctcacgcctgtgcagaagatctgcaaatacccgctgcagctggctgagctgctcaagtacaccacacaggagcacggcgattacaacaatataaaggcagcctatgaagccatgaagaacgtggcctgcttgatcaatgaacgcaagcgcaagctggagagcatcgacaagatcgcccgctggcaggtgtccatcgtaggctgggagggcctggacattctagaccgaagctctgagttgattcattccggagagctgaccaaaatcaccaggcagggcaagagccagcaacgcatcttcttccttttcgaccaccagctggtgtcctgcaagaaggacctgctgcgcagggacatgctatactacaagggccgcatggacatggacgaggtagagcttgtggacgtggaggatgggcgggacaaagactggagcctcagcctgcggaatgccttcaagctggtcagcaaagccacggacgaggtccatctgttctgcgccagaaagcaagaagacaaggccaggtggctgcaggcctatgcggacgagaggcggcgggtgcaggaggaccagcagatgggtatggaaatcccagaaaatcagaagaaactcgccatgttgaacgctcagaaggcaggacatgggaaatctaaaggctacaacagctgtcccgtggccccaccccaccagagcctgccgccccttcaccagcgccacatcactgtgcccaccagcatcccgcagcagcaggtctttgccttggctgagcccaagaggaagccatcgatattctggcacactttccacaaactcacccccttccggaaatgagccttacccagggcgtgcctctgaggtactgtggggaggaagaccagctttgtcacttcagcgtgatgtccggggatggcttcttgctcagtgctgaacacttcatttggggatcgatgaaggggagaagaagttggactcagctttgaccttgaaaggccccagcacccttgtcgaaggaaggaaccatgaagcactgttctgtcccacactggaagccacactctccggtggccatgatataaggaccagggcttctctgtatggagactgctgactcagtttcccactgacggtcacactcctccagttccgaacagtatcaggagcctttcagttcctcaggagcaactacattgaggacagcttctgtgtttgatcttaaaggagactcattgacaggagttggtaggatgttggcagccatgggatgacctgggtctggtcaggccctgaagagaccatgaaggaactagagccaatggagcaggtgcccatagttctccaaggtgtcacagatgccaagctagagtgtaggtctcatcctgcaaggttccttactctcaagagaatcgggaggcacctgctgccctggcagtgccggggatgatagcatcctcagggcagtgccactttccagacaggtgggaaggctgctgccacctgacttgtcccttcaaacagcggtcacgccttgctcacccctcacaacctaagaacctgccatccgcagaagtacgggtgatgtgaaacgtgtaactttgataatgtgacactgcatcttcagcggccctttgtatcactggtgggatgaagaaggcacatccacagagaaaaccagggcaaaaccatcctgcttcctggggaaatggacacgcctctgtcacgtgaccctgaaacagtagtaaatcgagaatggtcttgatggctccttagctctgagagagctgactcttaatgagggccacaggagctgacacccacagagagcaacctttctctgttgacactgtgtttgttagttgatgaaaatgccttttaactcgacctaagggagactggttctgcatttgaatctgcacagcgggctggccaggaggggtcctgccgtgtggctagtgtgttcctttggacgtgatcttgtatgcgggttttgtgcaaggttctcgcctctcatcagctctcgcttgaggataagcaagtccgcagtgtcagagatgaaggtattggtccgtcagcacagttcaccgtgtctccacatctatgcctgaaacaagtcacatcacagctaataaccttgaccctgggcctgggatcaacctcaaccctgctgtgcaccttggcatggtcacttataggcagcactgctgaggactgtagtcagtgccccccatcccccgcaggtgtgtctgtgtgctatgaagtggttcaggtgtacagagcatgcgccgtgtgtgtgtgtgtgtgtgtgtgtgtgtgtgtgtgtgtgtgtgtgtaagagggtggcagggagggagacggaggcctcaacttcactgcatttatataactgacaggtttggttggttggttggtttcttgtttgttttctaatagaatgtcaggatatatttttagaaaccatactttgggtacttttctgtgctccagtgtgtgtgtgcagcaattctcacagttgtattgttaatatgaaaattgctttaaagaagtgaatagtctttggtcctgttcattttcactgcggattcctcttgagtcagacccgctgcaggctccatttgctgttacagctgacgacagtgaagaaggctatgtttgtgaccggtcctaatagaattcccagctgccctaacttccagttcccaccacctccacagagccccctaacaatcccggatatcaggacgtgtttatattgagtcacattcaagacctgggctggccccgggtgattttatacagcctgagaagtgcttgatcaaataaagtctgacccaggtgacttacttgggatttctgggtgattttgaaaactaatgtgtttttaaaagatgtaatagcctttgactttgtaaaactctgtatgtcagtatgcattttattaccaaatacagaatgtggaggacctttagtagtttttattttcagttcgccaaacttcctttttgatgtaaggcatgtgctctactttggaaggaaatagaaacaacaaagaacctcctgcccagacggctcacgaacatcccctccctctccctcaatgggccaaataatattggtgatttaaaatgttgatgaattcatttgttctatttttagcgtatttttagcattccagaatttgccagctctgttcacgtgatagagaaggcctccctggcttagattgtacctataacgtgtaggcgtcgtgtggtaggtaaaaagtgatcacaacacttgaaggtgtagagaaagaaagaacattccagcagctgattgggcttgtgtgagcgtttgatgccggcccctagctcctgtcacctgctctggtcttccttgcctctcgcgcgtggtagatccacccctgcaggtgagagccaccaccgccactgtttctaactactgtgccttttactgtccaatctattgaagactgattcctcatcctgcgtcgctgttattacatgcaaagcataaagtgtatttaatttgaaacctggttcaaagcgcaagtctttttttttttttttttaagcaccagcgctccagcattgtgtgcttgtggggatctgtaactggattgctgatgtttctcaggacaaattagtccttttttccagccagagtttcctggagccagggcatggtttctgcattacggcttcatcacagataggaaaagcagaagtgtcctcaggccagtgccaagaaatataagtcagtgcctttcagctgacaggcaggatgctgggcacattgtgcccacagattgttccttctcaggacccggggaaaggggcgcttgaaagatttaggacaaagtaagtggaaacctctagccagtcttagagaggggaaagaaacatcagcttatataatgtatgtaaatttgctaagccaccccatgtacctaccacattattgcctttactgttctcctgggcattgccaattgtatttagaaagtactttgagccaattctataatttaattggtcctcttttggggtacatattggtgcccactgtgcatgacttgccgatcttggctatgcttttgatgataacaaatccaggctgcggtgctgtggtctgtaagagtcaagctgctgagctggtgggctgcctttgaccctgaaataggacccgcgtgctagacgtgcatcttggctgaatgaagggtttattggtttttagtgtctttttgttcttaaaaaaatactgttatttgatttcttgtaaatgctgtgaatctctatttgtcattttgtatttgtatattaaaattaatttgcc

SEQ ID NO: 485 - protein, 691 aa, Mus musculus
GSGRRWRPLSDYGQLAGRSLSIPEDAIAADPPDEDHVDRMHPASVTTTSQDPCAPSGSCRGGRRRRPISVIGGVSFYGNTQVEDVENLLVQPAARPPVPAHQVPPYKAVSARLRPFTFSQSTPIGLDRVGRRRQMKTSNVSSDGGAESSALVDDNGSEEDFSYEELCQANPRYLQPGGEQLAINELISDGSVVCAEALWDHVTMDDQELGFKAGDVIQVLENKDWWWGRNEDKEAWFPASFVRLRVNQEELPENCSSSHGEEQDEDTSKARHKHPESQQQMRTNVIQEIMNTERVYIKHLKDICEGYIRQCRKHTGMFTVAQLATIFGNIEDIYKFQRKFLKDLEKQYNKEEPHLSEIGSCFLEHQEGFAIYSEYCNNHPGACVELSNLMKHSKYRHFFEACRLLQQMIDIALDGFLLTPVQKICKYPLQLAELLKYTTQEHGDYNNIKAAYEAMKNVACLINERKRKLESIDKIARWQVSIVGWEGLDILDRSSELIHSGELTKITRQGKSQQRIFFLFDHQLVSCKKDLLRRDMLYYKGRMDMDEVELVDVEDGRDKDWSLSLRNAFKLVSKATDEVHLFCARKQEDKARWLQAYADERRRVQEDQQMGMEIPENQKKLAMLNAQKAGHGKSKGYNSCPVAPPHQSLPPLHQRHITVPTSIPQQQVFAEPKRKPSIFWHTFHKLTPFRK

SEQ ID NO: 486 - DNA, 37415 bp, Homo sapiens
  misc_feature (1)...(37415): n = A,T,C or G
gggagtgcagccagcacgaacgggcaggggtggggggcaggtggcccctggctctcctccagcattcctccaccgccttccacacaggggaggccgagggaagcccgacccagcctccagctctgagcggtgctccctcggtgctgctggagaaacagcatgccagaatctgccctctgcggccttgaccctctacagcagtccctcacctgcctctctgagaggggcctgggtcagtgcactgcggaaactgttgccactcctatatgcgctatactgagtgaatacatgtaataaaatgacaacaagcaccatatttaaaacaaataataaagcttgcctatggtgggttttctttcctttgagagctctgagagggcagggggcaggggaggggttgtggggctctgaaagaccctgagggactgcctagtggctcccaggaggacgccatgtcagggagggcgggtttatgggttgtctgccatcttatgctgtcctgtcctgttctcctgtcagtgtgagttgaagccgagcctgagacaggctcatagcaggattgctttgctggcagacacacctggctttgaatccagccccgcaacttggggaaagttacttaacatctttgagccacggtttcctccttcataaccagacagcaacactccaagatgcttgtgaggctctcaagaggatttattccagcgctgagcgcagtgcctggcgcacattaagatgccaggaagccggatgggtgattgctcaggtctgtccagccagttgggcagccgtcagaaactgggagggctgacgagacaccagcccagagagctgtcagggagcggcagagcagaggagagggcccaggatggatcggcaggtgtcagccaggatggacgggaggagccgtgctcagagccagcagccccaggacgagcagctcctggctaggaacagaagacaggcactgtgggacaagtcaaaggtaaaacctaagagctcaccgcaagatacaaagaagcccagagccaacgacgccccagctctgaactggagacgggacagaggctgagttttgagagcaggagggagtggagctgctggcttggttgtggggtctggagccaatggggtgttggctgcccagggtgcagggccctaagttgaatactgatgtgaagctatacattaagagaatgattcttcaaagctccttagacattaataacagattattagtgagagttaatatgtcagtttctaggattccttttgatcttattgttgtccacatgtttaaaagattgaaaaatactatttgtgaagaatggcttgaaagtctagattagatatactagtgacttttccaacactaacagtttacattctggaacatgaaacatatttcatactttaattcagtcacccaacactgactattaagcatgttccttgtccttgagaaagtcatagctaggataagagtagggacaggatataaagggacagatataaacttaataataactataatgtaaatgcgatacatattttaaaagaggttagtctaacatgtttatagaacatcaaaggcagatattgttatggcagaggatcagggaactgaaaaataagtcatggaaccgtcaccaagcaatgatggttacaacttttgtttgttgtttggttggtttttgtttccttaagtttatttttaaatagagatgggatcttgctatgttgcccaggctggtcttgaactcctggcctcaagcaatcctcctgcctcagcctcctaaagtgctgagattacaggcatgagccactgcgcccggccaatggttaaacttttgagggatgagccagaatttgatgggctgttttgggtgggaaagttgctccaggcggagaggtcagcgtggacggatggaaggattttgtcctattcgttggaataaggaacattcagtggtacacattggctaacgcagaggtttccagccaatgcaatcagaatccattgcctgcaacttgtggcttgctgcatggacaggcaacaaaaggcatatgtcctagaacaacctgagcatgtggtgtggtttaagtaagcttaacctgaaggtccagtggttcccaaatttttccaggtgtcagaatcatttgaggagcttttcaaaataaattctcagccaacatccttccccactaccaccacccaacctgactcagtggcccagggcaggggaggatctttatttttctaaacattttccatgtgattagatgccacaggccctgggtgtttgggaaccactgaagggggatggaccctggaaattgtgcatcatgttttgacgttgtcagttcctgtgacccagctctttccctctgtgtgcatctccgtggcctgagctcttggggttcacccatagtttcagcccacagagcagcagcccgtgacagctgctcccagctgtgaacacgagctgcccgcctgggcttgccatttctgtttttaagatgggaagtcagaatggcttatctcaactctgaggaagtctgagccatcagcaagaggttttctcaaatacatgattttagcagattattttaagggtgggggaatttccctgaagtcaagggaggggaaattccccaccaaggagtgatgctgggtgggagatgctggtcgggaaccagctgctcattagctaggcagtgttggagagtgcctcatgaaaatagctaaatctatgtctccttgttgtcaagtgcctgatgtttaagggctgtgttagatctcacctccctttcatttaacagaacacctcaacctccaccctgttatcacaccctcaccaggactaccctcccccacttatcagtcaggggctttttttttcctgatgtcttctctaactgtatttgtaacaatccttccaatttaaaaaaatgacacctcctctatggctaccacattgttctctgtagtagttcctaaagctaaaagtggccagggctgaaaatggggactggggcattctactcactgacagctgcagccaggaggaaagcagagagggggaggaaaatgagacatttgtgtaagggatggactggggaaggaccaatgcagccccaggaatcaggggcccccagagggcagtgtttctaggagtgatggttaaccatggttattgaacaagagcattataaattcactttattacatttttggaattgatagtactctgtggaacagatgtgttctcttggaattgtccccagtcagagaggcgctgatggtcagcacgcagttttgatgaccaagggtgtgctccttctacctgactgaagctgcgggaagtgttgtagaaagagcctgctctgtctgctctcatattgattgtatgtaggcatttggggttttaaaactgatttcaatttggagcagtctttgcttcttgtttacaagatcgtttccaaaaatggctttttgggcaaggtgcagtggctcacgcctgtaatcccagcactttgggaagccaaggcaggtggatcacctgaggtcaggagtttgagaccagcctggccaacatggcgaaaccccatctctactaaaaatacaaaaattagctggatgtgatggcacgcacctgtaatctcagctactcggtagtcttaggcaggagaatctcttgaaccctggaggcaaaggctgcagtgagctgagatcgcgccacagcactccagcctgggcgacagagcaagaccttgtccctcacccctcccccaaaaaatgttttttccacaccaattttttcaacaaaagaaactacagttggtgagaatgtggagaaattggaactgttgcgcactgttggtgggaatgtgaaatgatgcagccatgtggaaaacagtatggagagtcctccaaaaattaaaactagaactaccatttgatcaagtatgctaaagagttgtaagcagggtctcaaaaagatagtagcacattactcacaatagccaagtggtaaaaggagcccaaatgttcacccacaaacaggtaaacagaatgtggtgtgtatactcacaatggaatatttttggttttttccttttttaaaaatcaatggaagtgctaaccaaacaatggaatattatatagtgtttaaaaagaaggaagttctaacacttggtacacatgaatggatgtcaaggacattatgcttagtgaaatgaaccagccataaaaggacatatactgtatgatcccattcatatgaagtatctaaagtagtcaacatcatagaaacagaaagtggaaaggtggttgccaaggaacaggagaggaagaagaggaagttggtgtttaatatgtgtggccgttctgcaagatgaaaaagttctgtcgtacaagagtgtgaatatacttgacactgctgaactggaactgtgtgcttaaaaagggttaagatggtaaaagaaaggaagaaaggaagaaagaaacaataaaatttactttttaattattataatacattcatttctcctgattttggtgacatacattttgagaatttataatagctttacagcgtcaaaattcccttagataagaagtcatcattattaactttcatctgtagttgaggttcaaagcctattgaagttagtgaggaatggaacatgtagaggtgaagaaggcagcagcaccggcctgtgggtctggccattgtgaggaactctgcccagcagagctggcattgacacgctgtggactactacatctaagatttttcagctgaactgcaaattgctatttccccatcagcaattcgtaattcaattgaacaatgtctactgagagtatgtgacactttaaaaagtgttcaagtagagtggagtcagattacagagaagatataccgtaaaagaattttgttatgaagcaatagacaactcgcatgtcatttcttgtgacatcataaaaccactgttttaagaagttcaccttgggccgggcgcggtggcttacgcctgtaatcctagcactttgggaggccgaggcgggcggatcacaaggtcaggagatcgagaccatcctggctaacatggtgaaaccacgtctctactaaaaatacaaaaaattagctgggtgtggtggcgggcgcctgtagtcccagctactcgggaggctgaggcaggagaatggcgtgaacctaggaggcggagcttgcagtgacccgagatcgcgccattgcactccagcctgggcaacagagcaagactccgtctcaaaaaaaaaaaaaaaaaaagaaagttcaccttggaagtaatatataggatggcttggggagggaaacagagtcatgaagatgaagactggctgagggatttttctagctagaatctcagatgagcacaggggtgggagtcagagagacctgggttcctatcctggttcggacccagcccctgtatagccctgataaatgactcaacttcttggaacctcagtttccacatcagcaatttgcagttcaattggaaatcacatactgagtgccttctgtatgccaggtactatgctaggggctgggaagacaaaaatcaaacgtctgtcctttcctttaagtctgtcctgtcctttaagatggtaagcgacctagacagtaagcgtggggaatcatagaaaaccaccaggcctggacgaagcatcaaagcatagcacaaagattcttcctgtctagacatcagacactgagaaatcccactccataaaacacacttgaattatgggacaggaacacaggagtcattaactttaagggactttaaaatcgtgaaagtagttagggtggtgaagggaaaaggatacaaccagaaaatggaatcaggtccttgacaggccccactgggagcagggattggtagttggaaggaagggttagtgagggaacggagggcaggacatacggctgctctccagaatgggagcaaaacacacagatttggatactaacactgtttttaatatcattttgtcttattacaagtaacagctactgctggaggagacagttctgcccagtgggtaagagttagatggcctgagcctgctgcacacagctgtgtgttattgggacttgagtttcctcatctgtaagtggggacaactgacagtacctcccatgtagcattgtcatgaggattatatgagccggttcatctccacagcttaaatcagtgcctagcacattataggcacctgataaaataacatcttgcaattctatttttaatttttttttaatttatagagatgggtcttattatgttgcccagcttggtcccaaactcctgggctcaagggatcctcctgcctcagtcttccaaagtgctgggattacaagcatgagctaccacgcccagccacatcttgcaattctatactgtttttcaatttacagggtgctttcatgtatcatcattccacttgaggctcaaagcacaccaataacaagtacttgttcagaatgtataaacaaccctgagagatgggttttatcatccacattcaacaggtgaaaaaacaaagaaagaaacttgaccaaggactcatactcaaaaaagaaaaatatagaaaagaaaaaaaatgtgcatcgctatcatttgaaggcaagttcatctgaccccaaagccttgcatgaagtccacatgctgtttttccttctttccttccttccttccttccttccttccttccttccttccttccctccctgtttccttgcttccttnnnnnnnnnnnnnnnnnnnnnnctcccttccttccttccttccctgcctcccatgtatgccaggcaggaacacagttaagaataaagcagacaagaattactgcctttctggagcttacattctggatagtgaacagaatacattatagacggtgacaaatgctatggagaaaactaaaccaggggagacagtggagtgagagtgagggttgtggttttgagtggtatggtgaaggtgagagagggagccagtgtgtgtgtacctggggagggctgtcaggcacacggagcagcggccctgggcaaggagtgcctgcggtctttgcagccaagagcccattggttggagaggggtgggaggcacagtgtatctggggagaggtctcaagaactttggctgtctcccctgtggatgattctgagcagaggagtgacacaatccagtctaggaatggtttggcagcatcgctctggcagctatggcctgccgggggcaggggtggcagcagggagaccaggaggggctgctggagggagccggaagctggatgggaacccaggcttaagtggtgggaggggacccaggcttgagtggtggcagaggggtaagaggtagccagatcctggacactttcaggaacttgagtcagatctgccagtgagtgggtcgtgggatgtgagaggtggaagaataacctctgaatagataaaacatacaggctaatgcctgctttacagatgggaaaactgaagctcaaagagctgaagtgacttgcaccaaggtcatttagttaggaagttagtgaagcaaggacattcacccaggaattttcactccaggcgccatgactttccctcgtccatgtttcaagtctcttgcccctggcctctgccccccatctcctggccaggactgagtcagcccacccatgagcgcttcaagccatcttgcttccgcagtgtcgctaactactaatccatgatgttgaaacagttgctgttgaaacctctcttgtgattaacctcagccagagttgtcttttttctttacttttttcttttgaggcaaagtcttgctctgttgcccaggctggagtctggtggtacaatcagagctcattgcagactggaaatcctaggctcaagccatcctcccacctcagcctcccaagtagctgggactacaggtgcgtaccacgaccccgggtagagctgttttgctaagtgtttatgaagaactcagagagcagtcagtatttccagtccgtgtctctgtccagaggtttttctcctggtacctcctgtaaaggtctaacttttcaatagactcctgttaattgtgaatttatacatgattacaaccagctttttttctttctttactgattttcacagcaatagctagatcatggtaaagaattctcccttggaaaacactgttcagttcttcgaggagaaagcgtcatttttcagagctgtgctgtgggtgggaagccccaatgcctttattttactgagatgcacttttttttttttttttggctcaaccacggtttaaattgataaggaaaaatgctattggtaccagacagtgccagatcagtggttgctaaaattggaagattcctgctgctttaggcattagacacccagactttgtgtatatgctcctcacccaggagcatcaggatatctcggccagtaagcagcacagttcttgggcctcgtggtctgggcagccgctccagggttagagaaggcctttgtcttcagtgttgtttcccttggagtctaaaacacactcatgcatgaaaaaaatgatgtgcttcctcaagacatcccccaacccacccccaaactcacacaccagcaaagcatactagactaggtgacctcctgctctccgactgtacgcaccctggcctagcataggaagcagaagttacatttaaaacgaaacagtcaccatgcgttgttcaggctcccgtgtttctcagacagcacatgtctggctttctcaaggcctccagccacacccccagccagacagacatgggtacacacatgcatagctggctccctgctgcccacccacccgtgctcccagggtgcactcccttctcctgaggcgccaggccctgccatgcccctggcaaccgtcccctctcctttaatgagcaggtaagaaagctagggcccagaaggcaagaccaaggctgtggagcgctttcttctgcctcttggctttgtgcttaggcccgggaatttactcctccccctccaaccccgtctcttggtctcttagacagctcactttcactttttcctcacagacacaggccctgacctttcctgaccaaaactggggatgggcccaggcaggggagtggaggtgggtagagggtgactggcaccatgcactcagagcctggaaccctgactttgtccacactgagagctctcccctggcttccattgtcagctgctccaaggttccctggctgtcgcggtgtccggcgcacctgtctgggtggtttcacggctggggcacaggtgcggacccatgggccatgcctcaatgtggcgtgtgctgtcatggacgtaagcagctggttctcctggaatcacagaagggttctggaaaggaggtgatggtggctgggatgtcggggtttctctgagaggggcaccccaggcagagggggaagcaactggaaagccagagcccatgagcagacccagctcagtgggcaccactcacaggtgctgtgtccagagctcaggcttacaggactggggctgccaggtgggaggtggcctgagcacagtctgagagaggggctggggccgggctgggagaggcgccgctggcagcacgtgcacaccttcctgctttccctccgtcctgcttcaagagctccgtgcatcaccagtgcatgagcttgaactcctcctcatcatgacagccctgtctgtgcttggcaaggaagacctaaaatgctggtgcatgaaatactacttctgcagtgttgattacccccattattgtggatctttttccatgtttatcattgttctagtgccagactcctgggctctatttacagaattggttgcttgtgacagcagtgtggctgaagtgatgaggggagggaagggaggagaggcataaggggagcaggaggctaagcatgatggtggggggtgggagtctggggctggacgtgtgtctgccgagcacctggcacatggccagtgcaggtaagatgaactgtgcatagaaaatgcaggttagattgatccgaatataaaacatctccccaagaaagaactcttcagtcagaaaccagacccatccttttctagtcaagtaactagaaacgtggatttgccaagtccttgaggaaagcaagcccatggagcaccatcccagggcgaccttcagccagccctctgtccttgctggcacaccagcttctccctcaggcttctgctttttgttaaatctccagggaacttggaatttttccaaaacatccttgactgtatctctgttgctgcaggcatgagcttggcctcccaacatggatctcagttcctgatgccatttcctcgggcagctcttgttgctgcccactcccactaacctgtgttctccccagctggcttccctggccccaggctctgccccaacagctcttcctccacgtcgtagcaaagtctgtcattagcccagccctcatcgtgcgggacaccatcaccacagtagcactctctgtggagttccagctacttgtcaaggatgctaaaagtttcacctgcattctgtggcctgattcttcaaaaagaaggacatgaagctcagagaaatgcagtcacttgatttaggtcccatgcccacagaagggcaggaccagaattcagacgagactctgtgaccctaaaacctcttctctttctgtcatatgaggggactctacttaggtcctgtggcttcctttctccaaaccctggaacagcagcccaggatgaactctagcctgtgagacccttctgtgtgcccccgatctttgcagtcttgtctttcatgagatgtgcagggagtctgtggagcatgtgcttcgaatcaagccacctgtgatttgcaatcgggccatcgcactgttctgagtcgcctgctcctcttccaggaagcctttccctgactggggaggatcccttcctctttaaaatcctgccacttgcttcagactctccctattatatttccacttcctggctgcagtcatcagaattcgggttttattgcatccccttaaagacaagggtcatctgttgtatagctttctgtccccagcacctgacagtcattccgttggaaaaaatactgatagattgcttcttggacttttggctaagatcaagtagagaaacagtgatggagacatccctgaacttgcacaggaggactgaggccatgagtctgaaagaagagactgctcagtgacagattgttggctttgccaagggtggctcattttcccaagaaagaaaatctgactagcagggtggccaatctaaaaagctgcaccatccttaaaagatctttctctctcttttctggtaaaagtactatataattcctcattctcatattttgagttccaagcctttcaaatatgtacagagagtaagaatgatggcacttttctactcaagacactgttgggatgtactggttttagtaatactgttgccttgcagataaaggatggaagcagaatattggatcatctttttcatcttttttacctcctcagctttccagcacattgcttggcagcattgttatctatatttatgttgttaatatccagtttggagcacagacttccaactaaattacacataatatcctgatggtcttcactctgcaaatggtattgtgttggcaatacactctttaacattccacctctcacttaatgtcacacttaactgcagctcttaactttggagtaatgtagacattttctaatagtttcttattctgagtaagatgcagatgattaccttcccttgggagtatgttaccaaattttttcatcatatgaaaaaatcttgttagctgtgtcttttaaatcatgcctttgttttgtatgttttagtttcttcagatggaggtactgagccctctgccttagtggatgacaacggtagtgaggaggacttcagctatgaagacctctgccaggccagccctcggtacctgcagcccggcggggagcagctggccatcaatgaggtactggaattccacacgacagtagtggatacgggatacctgattttcagggtccacaaccacttctgactttgttccctagttcttctttactaagcatgtccgaaaacctggaactctgattaaaacaacactgtgattcactttggaaggccaaggcaggtggatcattagtggtcaagagtttaagacccgcctggccaacatagtgaaaccctgtctctactaaaaatacaaaaaaattaggtaggcatgatggtgcgcacctgtaaacccagctacttgggaggctgaggcagggagaattgcttgaagctgggaggcggaggttgcagtgagctgagagcacaccactgcactccagcctgggcgacagagcgagactccatctcaaaaataaagaaagaacaacactgtgattctctgacctcgtccaggaaaatatatgggattaagctttctgggtagaggcagctcgtctttttaggtaaggaacagcagctccccatcagtgttcggccagtgctttccacttgataaagaataccctcccctccactatctcgtgtaattctcacaactgatctaagaagcggacattatggttattatccacattttcatcaacgctctaaggaaagatgtctaattactggctggcgaatggcagagctggaggcacccatgtatttctccctccaaatctggtgttcctttggccaccctgcagctttagctttttttttaggaaatcattctggaagatacctccagcttttggcattcttgagcagaacgtgtggagcataactccttagtgagtcagcgtctttactgagatggccagtgatgtgtatcgttgggcgctaaggagatgggcaaaatcacctgctcccgtggccaggggatggaggagccacatctgttcctgactttttaattgttaacgatctcaagatcatgctatgttctcttcaattgctgtaaagtgtaaagttagatgcaaaacttactcgaattgtgaataaagtatgaatgatccacactggagggagatgtgagggacttccaatagcatatgtgcataactttagtaggcttggctctgtgacatctagtacggctgccagaaaccatttttggagcaaatatttcagaattcaagtttgctagataactgacctgctgctaagtgagcagctagtacttttttaaaaaggggcctgcctgcctgcctgccttcctccctccctccctcccttttttcttgcattttgctcttgttgcccaggctggagtgcagtgatgtaatctcggctcactgcacctccgccttccaggttcaagcaattctcctgcctcagcctcccaagtagctgggattacagacatgtgccaccacatctggcttttttttttttttttttgagacagagttttgctcttgttcccagactggagtgcaatggcacgatctccgctcactgcaacctccaccacctgagttcaagtgattctccagcctcagcctcccgagtagctgggattacaggagcccaccaccacgcctggctaatttttgtatttttagtagagatggggtttcaccatcttggttgggctggtcttgaattcttgacctcaggtgatccacccgccttggcctcccaaagtgctgggattacaggtgtgagtcaccacgcccagtttaagcgctttctttaaaagcaggtagagatgtcctcctgactttgttttttcttagtctgttctcctgggttctctttgtgtaaccagtcacatagtcagtgtggaccaaatgccaccagcatatccaagtgagaggataccagtgtcaccctgagagagtgcacctagtggctccctcaccatcccgcccactcgtgctctatgctgagcgcaccccactgtctcctttcagctgatcagtgatggcaacgtggtctgcgcagaagccctgtgggaccatgtgaccatggatgaccaggaactgggcttcaaagccggggatgtcatccaggttctggaagcctccaacaaggactggtggtggggccgcagtgaagataaggaagcctggttccccgcgagcttcgtcagagtaagtgtggggtgcttgcagcttttccaaagtacctgggggagctgcaggatcctttcaggtcagaactcgccttttatcaggtcagctcttttgtaattgatatctgacatgcaagtcacacctgtaagaaattaggctgggtcggagcaaaaatgttaaaggcaggcaagcgagttgctcggtgtttctctgtggtcctcgtgcctgctggcatagccgcagccctgctgaggccatgagactcaggcgagggccaggctgccttcctaacaggtcacaggaaagtaggaacctgggaggtctcctgcctctgctccatgctgccctcccctgccccaagtcacctgtcccctgtatgtgggttgcagttgcgagtgaatcaggaagagctgtcggaaaactccagcagcacccccagtgaggagcaggacgaggaggccagccagagccgccacagacactgtgagaacaagcagcagatgcggaccaacgtcatccgggagatcatggacaccgagcgggtgtacatcaaacacctcagggacatctgtgaggtgggacgccaggctgggacctcactgagggtcacagtatgaggctgcatgaggtgcctgggctttctccccacctccaccccccgcccccccatcaggctcccacatgtatgctcatttctccgcctctgctgtctgcactgctaagtctgagtgctgcggctgtcctagctgttggtggaggttttttagagtcagggtctcttttcagagacaaggcttttcttagagatagggtcttgctctgtcatgcagactggagtacagtggcgtggtcatagctcactgcagcctcaaactcctgggctttaagcagtcctccctcctcagccccccgagtagctagggctacaggcatgcatcaccacacccagctaattttctaaattttatatagagatagggtctcactgcgttgccgaggctggtcacgaactcatggactgaagcaattttcctgccttgatttctcaaagtgctgggattagaggcgtgagccagtgtgcccggcccctctcttaagtgcactctgcaactatctctatcaggacctaattcctgagattatttgaaaagaatggctttcatagaaggcaacaccctcacttgattttacaaagagtcaaaggtttgtcactatctgcaaccccgctgcatctaatcaccaactgacagatgagatcctgagtcatttagacacagatgggaaaaaatgctggttttatattggtcatatgaaaggctatattctattgtcatgctattctacttggcaacaaattttattttatagttttatcctgatttcagagaacttgtcattagtagaggtgcacctgaaaggttttgtcttcctgtggtattttgtgcttctatggattgtgtacgagcatcacactacactgctgttcgccctgtctgctcattacggctctcctagctgtaaatgctgatatctgcactatcagttcaacgctgaccattcagtgctgaagacaggttgaagtcagagaactgcccgttctctaatcggattagccagctgtgtggacatgccagtgtttagcttctttgtgccagccatctcgttctgtatgagtgtgtggcgaaagaagcaggtctgcagtgccatttagggaaataagaggaagtgcccatgattattgagcattgactgtttgtcacccctcacctggattaactcagctaccacagcattccccctgagcaggtcctgttagcccccattgcagatggggaaacaaaggcacagagaagttaagtggtgggattggatttaaacccaggcagtctgccccagaacctatccttttctgaactattacattatattgttttcctgttaaaattcataccaagtagtcattggtatgtgttttactccatggtcagtttattctactgaatgtcatgataactctttttgagttagctgttacatgtatgtacagccttttcttcttatcccactagctcctacctaagccatagtatagccatggtgttgcacatagataattagtgcaagcctcagattaaagacccacagattgatgctgtccatagaaaggcggtgctggtggaatccttgggtaagaggaatccttgccctgatgaacagtgcacagagctgcatgggctattcagcaagcagtgacattctgcatttgacaagtctcctgggctgtgaaatggaattagggttgggagaatgattacctgaagagtttggaaaaacacgtgacgacaccaatttttgagctctggtatttgaaacttgtttctggaaacattatatggtttattggatcctaaatccaaccgcatgagcctttttgctttctttttattttaaaacacctatggcaaattgcagtcatggaagtacgatgacctcatcagagactcatagagtctttttaattaaaattcattccaagttcatggctttaggcctacaaaagctgtactattcaaataatttatttggatttccaaataaaaagtattacttctgtattttgcagggctatatccgacagtgccgcaagcacacaggaatgttcaccgttgcgcagctagccactatttttggaaacattgaagatatttacaaattccaaagaaagtttctgaaagaccttgagaaacagtacaacaaagaggaacctcacttaagtgaaataggatcttgctttcttcaaaatgtgcgtcaccctttacttcattattaataacatctgcttacataattttgaagtgcatctccacagaaaacaggagtctcttttgttttattgtttgtttgctagatgaatcttccatagaaaggagatgtttcttctatcttatatgcttatcatataaacaaaatctgtatagttaatcttgtctaaatgtcccaaattcattttttcaaaatccttttatgtagtctggaattagggggttacatttggagtaattactttttaaaaatttctaagggttatgccataagaactatggagtccttcctaataatatccaggaagtgtctattacatttcaggcactgtttccagggttttcttatattagcttgtgtattgctatgaggtagatatgattatctctcactttctagatgaggaaactaaggcccagagagtaagtaacccaagaccacataccagtaagaggcatctgtgaaggcagacccgggcatgcggctccaggacgcatggttgtgatactgtaactgcctcagaaccttcctgtgataacatgcatttatcattttttaacttatgattgactattactacttaaccgctaaaggatttcagaggaagattttagtcccagcccaaatagctagggaacagtaagagtaataataataacaatgacagcctcaccacaccttcacttcctgggtgctgggctcagtagctgtctagagtcctctggggcagatagattttaagtggctgggcataatgtttttgtgttaagttagtcagctggaggctgggccccatgtgtgacgtgggcatatctgggacattgtcacaggcctccttgtgtggcctgtgcagaaggttcctgcaggagccagcttaggacaggctggaggccaggtggtggcatgaggaaggtaagtctcacagtgaggacaggggagtactgctgccaccagggaaggggtcttggcgggcccagccagggtgacggcagagaattgggaagagaggtatgttgaaatgggcatttttgaggaaaacctgacaagactagttgtaaaccacaaagaataagcaacgattaaaactgcatacatggttttcagcgagttgaaaaaatttgtgggagggggacgttagaggccctgctccccaccttccaggatgagcgtgaggcaggctagaaagagaccagggtgctgagttccagggcagcctcatccccaaccccctcaggagcctgctgaagcaccccttctcgccggccagataacgcttgcggaaaccatggcagggcagcttgggtgccagcggatttcatgccctgtccttcttgcagtagtccatcttcctcctttctaggagtgtcccttagagagggctgggatgatgcctgtctttgtcatgtcccagaggcaccccagaagctgacgaagctgtacttttccttcccagcaagagggctttgccatctattccgagtactgcaacaaccacccgggcgcctgcctggagctcgccaacctcatgaagcagggcaagtacagacatttctttgaagcctgccgcctgctgcagcagatgattgacatcgccatcgacgggttcctgctcacaccagtgcagaagatctgcaaatacccgctgcagctggccgagctgctcaagtataccacacaggaacacgggtgaggggcatgggtaaggggcacaggtgagagcactgctgccattacccgtaggcagctcttaactccaggcagtgataggtgggcttcagtgtcagccttaacactttgggagctccatgggagaagttttcaggttgtttagaatgtgtgcaattaactattgaaatagagtggttgaagagcctccaggatatccagtcctagagctatgaagacacaagggccattcgtgagctgtgccacgagtgcatggcggcttttgttgtattgttatgttgcttacctgtattttataaacatgtctttgagtactcagtagttagtaaagacggtttctgagggaaacagaccagtgtgaatggaaagccataactctggttctctcctgtacccttgaggttgacgtacagcagctcggctcagagcaggattctttatggcagaaacattacttactagtggcttacctaaagttacttgttgttaagcagtctctatttagcaaccccttctctatttagaaggggtgagggcacacacaagcttgaactgtaaaagggtgtggattgtcaggggtgcaaacccatatggggcagctgagaagaccagggcattgggcacctgctgggccctgagccgttccctacccaccggggtgccgactctctggtcttctccctgttccctcctgctgggagcacagggcttccttccatgcttacctgaatgctgcatctcccttcgagcttccttggtgcctgactaagctcttcttgttactcacacttctgttgtttggatctcggcttctcctgaacaacaagcaacaaaatacactctctctctgtctttatttttttttatttttattttttttttttttgagacggagtctcgttctgtcgcccaggccggactgcggactgcagtggcgcaatctcggctcactgcaagctccgcttcccgggttcacgccattctcctgcctcagcctcccgagtagctgggactacaggcgcccgccaccgcgcccggctaattttttgtatttttagtagagacggggtttcaccttgttagccaggatggtctcgatctcctgacctcatgatccacccgcctcggcctcccaaagtgctgggattacaggcgtgagccaccgcgcccggcctctctctgtctttattatctgccttggttgtttctggattcttctcacgcccttgttccctagctatatgatctcttctgggggagccaaaagttaccctttgtttccttaatagccaaccatcatttcgtgcatgcacagaagcctttgtgtggttatacattaggcatgtcacccattcagcattggaatgtgcatgcccattttccatgccatgggaaaatgtcatcacagcacagcccagctgttgggtacctcaaggtagcagtgcttggctaattctgagttctcacctggccagcagggacaggatagtcatagggcaactgctatgtgccaggctccaagccaggctacccaggggcgcaggggtctaggctaaagctgactcttttagatgagaatcgaaacagggtccatgcccctgacacaaagtctttaactgcacctgcagctctggagagggtcatctcaaagggtcctaatgagaagaggaagagggaagggattgtaccaggaggaaatttctatggcaaaccacaacagttctgggtttcagcagctaaatatcttcctgcagggagtggagagtgaatcattattttgtcctctctgcctctgaactcctgtggagagacagacttaaaaaaggaaacttctggccgggcgccatggctcacgtctgtaatcccaccattttgggaggccgaaacgggtggatcacatgaggtcaggagtttgagaccagcctggccaaatggtgaaatcccatctctactaaaatgcaaaaattagctgggcatggtggcgggcacctgtaatcctagctaattgggaggctgaggcacgaaaatcgcttgaacccaggaggcggaggttgcaatgagccgagatcgcaccattgcactccagcctgggtgacagagtgagactttgtctcaaaaaaaaaaaaaaaaaaaaaaaaaaaggcgagggtgtggggagagccttcttacaattagattggaaagtaaagaataagagcagatcactgaacaatagacactagatatgggtgttagctaaagagttaggactaaaggaattagaaaaaggagttcattgaaatagataaaagaagagagagctatatatttttttctttttctgatggagaaatcagaaaagttcagtggaaaaaaaaaaacagggaagtcaagagagccacaaaattgaagaaaaaaaattatagttgtaaataccttctacagattttcaaagacacttttaagaaaatgtcctgatggcatgatgaggagtcagagccaaagacaattaataagaaaattaagaagcaaagacttcttgaaagacgtgggcaggcagcttagtacattccgagatgggaaagctgggtccagaagtccacacctcactcttcagtagttgattttcttcctttaagggcatttttcaccaagagcatttgcagattttggttttttcaaaataaaaattagttgacatgacagaaagtccatttccttgtcttaagtaaaacaaagcaaaaattcttttaaaaaaaccattacaatttagttttgtccagaaaaacttattttgcgaccctttcttcattgctggaggcctctttgggggctctgtgcccattattttggcagtccctggtgtcattcttgctcctgctctctgcgccacttctgggtgtgaatgggcgtctctgaagacagcagggtctgcttggtgggcagtgtctggggacttcacaggagctgggatgaattgtgtttggtaaatagacaatagaatctgctttcaaggctttcccatggctgcgcaggaggattctaattcattccagctgtgatggagtggccctgtctgtgctgtaagttgccacgggaaagcggaaaatatagctcattagctggatggttggtctccgtggccccgcattattaacgctgagcaaaacctgaatgggaagcttgcagatactggacatgctctgtgctagcctgtgtgtagattaaaactgtagtttctgcttttccggtgcctacagttttagcgggcttgggagcggggccctcctggggagaacattttagcttgacgtgactgtggtggacggaaagcaccagaaaggaagatctgttggtgaggcgaatgccatactggcatttccgtaactcaccacttcaggtgcctgtcctctcctgtcctttcccgaacagcataaaagatgaagactcagagcaaatagtcactgttgaaaatggttagtgatttttaaagtactttatgtagcaagagtggttatatgagaatcagagccataataaagactgttctttctgtattaatgaaagtcacccattgtcaccgtgactaaaacttacttatttgtggcatttactgtcattcattgtaatttctgggaaatgagtgaaaacatttttattccaaagaattctgaattgcactgggtcagctcccttaatctatggcagactgtagtctattcacaagggaacaagaaaaagggaaacagtggctatgacgtaaatgtcactttgtctagagcattcgtatacgaagaagcgccccagtggattattttgccagtcctcatttgtaaggtgcatgttatgtgattaaaattaacctcccatcttgcagtgattacagcaacataaaggcagcatatgaggccatgaagaatgtggcctgtctgatcaacgagcgcaagcgcaagctggagagcatcgacaagatagctcgctggcaggtgtctatcgtgggctgggaggtaagtggaaagcaccccgcatgatcccatgccactcgcccctcccgcacctttgatctggtgcagatgcactttaatatcctgtggtcaatatcttatattcttggctttaatggtacatataccattaatggtaaatgtatttcgaggcatactgttgaatttaacagtcgactactttataccccactcccataagaaataaaatctgaagagtatctgcagttaatttattgctgagcctctctctctcctcgtagagggagtaccgtgggaacagtagagggcatttcagttgcagccacataacatagtagtagaagtatgggggactctggagtccctgcccacatgtgaatcctgtatgatctggccaagattaatttttttatcttataaattggggaggaaaatattacctacctcataggctaccgtgagcattttataaaacagtacaggccaggcacagtggctcacacctgtaatcccagcactttgggaggccaaagtgtgagaatcgcttgagcccaggagtttgagactagcctgggcaacatggcaagaccccatctctacaaaaagtaaaaaaaatcagccaggcatggtggcatacacatgtattcctggctactcgggaggctgagttgaaaggatcacttgagcctaggaggttgaggctgcagtgagccgtgatcgtgcccctgcactctagtctgggtgacagagcaagactccgtctcaaaaaaaaaaggaaagaccacaaatacaatgcctgtaataatggtccaacaaattctcactctctctctctctctctctctctctgtattcataaaaacagtgacaatagcacctgtatgtgtttaccacatgtctgaatggcactgatctgagccatttgtacatatatgaactcatttaatcctctacaccatcctatgaagtaagcactattattatacccatttaacagatgggaaaactgaagcacagaaaggttaaataacttgcccaagaccacacagctcaaaagtagcagagctggattcaaacccaagcaggcaccctggcttcaaagtccgtgctggtgatcactgtgctctaccgccattaaattaagaacaacaagcagatgccattcagattgtttttagaccaagctacattgattttacatctattaattggtcagaactcactctcccagaggactgagaaagtttggagcaagaagttaggtttttaactgaaataggctataggtggtgaaaattggagagaaacacatacatttcaagggccttatagacttctggagtttgggcaggatctctgagaacactgagtccaactcttttatttcatcagtgaagaatctagggcacggaattgctctgagcaagtaaatagaagaactattttggagtcaggctcttttgcctccaaaaaatattgtgtgtgactgggattaagggagaatcaaatcttatttaacaaaggccattgtcataccaaataccataaagtaacattggattagattcaacctaaatataataaaagtgtgtttttctttttgattttggacgctgacatttaggggataatttgtcagaagttaatttcttgctgacaatttatcgtctggccttttgtttctatgaccctgaacaagttgcaattccagggagctgccatatactcaacgcaaataatgtcaggtccataatcacgatactgtgtcccctgcatgaatgctttctcccatgtaagcctgcgtgctctcactcttggaggctccgtttgggtcagctgctgtttcagatcttgactgggttccattaattcagcatgcctcttaccagaggcttcaggctaggaagacccctcagctaacacagaggcactgtcacatttttctagtaagcaggaaaaaaaaaagaaaaggaagaaatttcaggcaccaggagaccaataaatccaggtttattacaaataacctttgaggccctgcccacctgtgaatggggacaggtggtaggcagcctcaggtacctagaaagtctgagaaagattctgtgttaggagtctcttccatatcctaacacctgaaggaatccaaattgggagtttgtttttgttgttgttgttgtttgtttgtttgttgttgttgttgtttagagagaagggtcttgctctgcccctcaggctggagtgtactggcgtgatcaccattcactacagcctcaaactcctgggctcaggggatcctcccgcttcagcctcctaagtagctaggactacaggtgtgtgccaccatgcctggctaatttttaaaattttatgtggagatggggtcttgctgtgttgcccaggctggtctcaaactcttggcctcaacgatcctcccaccttggcttcttaagtagctaggactacagctgtggtagaattggaaggtcttaagatgtgttttcatccttccagggactggatatcttagaccgaagctcagaattgattcattctggggagctgaccaaaatcactaagcaaggcaaaagccagcagcggacgttcttcctgtttgaccaccagctggtgtcctgcaagaaggacctgctgcgcagggacatgctgtactacaagggccggctggacatggatgagatggagcttgtggacctgggggatgggcgcgacaaggactgcaacctcagcgtgaaaaatgccttcaagctcgtcagtaggaccacagacgaggtttatttgttttgtgccaaaaaacaagaagacaaggcgaggtggctgcaggcctgtgcagatgaaaggaggcgggtgcaagaggacaaggagatgggtgagcagcccttggctctgcaggcacctgtgcctctgcttgctgtaatagcttcattctccactcccatgggcctgctctgcccagccttctccctcagagctgaatcccaccatggggaaaggacaagggatctgcaaaccctaaatacttctgaatgcacttacaagacagaccatgtcagatgtagttactaccggcaacatttattcagtatttaccttgtgccagacattctgtggcccatttatagagattgtctcattgaatccctatgaagtggttgctgttattatacccaatttacagatgagaaaattgaggcttatggaactggcccactcttgcactgtggccacataacatttaaatccagcactttggatgccacatgcagggtatgaagaataaataataaaaccagttcagtgtgaccccagagatggaaccccactatggtgaccatcacccaggctatcagaagtatcacgtgattctggaggcctcccctttggctgtgcctgtgcaataccttcagtgttcttcactgccacagttgatccacacccagcagcctgccctcatgcttcccatctctccctatgaaactcaggatgccgcatcgtccattgcagttaaggcgatggtacttcacacccagtgttacatttgtacttctttggtttgtcttcccagcttctgctgacctggaggtgcagtgtggcccctgagactgaagctgccatgcctggcattaatgatggcagcacccacagtctctgagcctctatttcattgcctcccaagctctttagggttttgagcacaatctgttgaatggaagtcagggagccacagtgaaggatattcatctctgcagcccaagtgagcccagccctcaaaagtcatggtccaggacggaggggagccagcatacgcccctccccatccttgcccactgccatgaggacagcaggactaaaaaccaggaggtgctttttctgtcctccccagccactggctctaagcttggctacagaatttggtctcacccacaggaggttttgtgagattctgcagtagagttggagggatttacaagttggtcaggctaaaacggaagcagggatcgacttggaaacactcaatgggtagacattggcctggacttgggccactccaagatacagagctccccacatcacaggcagccccttacaccaagtgtcagggtgtcctttacactaagaggaaatctgattcccagcaacagccatagattattggtgcagactctggggccccattggaatagggctaatcactcgtgcccagaattcatttgaagatgacagttactaaaatgcaaaatgacagagccacaaaatcttagttttagtcgtcatatgacgttgtctagcgcaggccctgaagtcatctgtaagtcagagtgtttggattcccaaagacggcactatttagtgggggcatcctatgtgctttcaacagtgtctctcaataggaaggaaaggaggggcccgatgtggtgccctttgccatgtaatgctccctgtggccagtgctcagagatgcaagtgcatgactgaggcactcctgagccagtaagtctgtgaactggcacgtgtgggataaaactggatgcattccttgcctcgaatattttggcagccctcgtacttgatgcatgtgtgtgggtagaagcttcaggtagcagatcagagagaatggacacggagggccttggaggcagggacagcccggtggccagcgtacagagcctgagcctgacgtcaggacagtctgggacagatgttgggcatgtgaaggaatcagggccaggggagcagagtgggcagaggtagagagggagcctcgggagcgagccaggcagtgcaagctagcagacacagggcctgggtcagctctgccaagctggagcgagtacctgcctacaggaggaaggcttcccgcgggagaaggcagggccccagcacccagccctggccattcagctctgtccttccttctccttccccacaccctgcgaagccaagggttgcctcatcttgtctttccagtgactcttgtttcacccagttcacacactgcacacgtacactgtcactgtgctactggactttacagtgagggaatgctcagggcacacactacacacagctggggtacagaatccgctacctgctactcacgtggtacctttgttcagggtggaactgctaacgtgcaaagctctcatagcgtatgggtgaacacgccctgggaccctttgctctgtcctctccttctggggcctcatcctttaggttataattgggatgaccctgtgggaatatttgcccgggagcgtcgggcttcacacagacattctgcattctcatgagcaccaccccatttcactctccaaactgtccgggtttgcaggacaatcacatggccaccttggcgataatccttgtgacttccccttttctgatcttcaacctgtccacgttctttgaggattaaggttctctgtctcaggttgtggtgataacctcaatgctgatatgggctgtgatacaagttttgctctgaaacatgtccacgtgttctgaatatatatcacatttatttctaaatgcaggaatggaaatttcagaaaaccagaagaaacttgccatgttaaatgctcaaaaggcaggacatggaaagtcaaaaggtaagttatggagaaggctttgtccccttaatgcttatcagtattctcctgaaaatgggagcataccccaagttgtcagcctgtgaccagcttggagcaaggagaacagtagaagttagaactcaagggcaggtccagaacaggggccaggtgaaggtggcctgtgtttggttttgaatgtgcgtcagtgtttgcttccattggaatgtgggcataggaaaccttcagaggggctgctggagggtggtggacctccttgcctgcctggggcccctctgctcccctcccccaagtgctgatggtgttagccacaaggtcacgcacatccccagtctgaggcaaaccaaggactcttgcatcttttaggcatgagaggacaaaatctcaaaccccaaactgcttgtcagctgtaggctggatatagtctagtttaagtaagaaaaagatgtaaaggttcggtacatcaggcaaggagttagacaaaaaaagacacgtgagctgatttagggcggtgattccctaatctccatgcacattagaattccctggggaagctgttcaaaaatgctgatgcccaggccgcatacccaggggctctgatgcactaagatttgtccacacaaatctggcccaacaggatgcagataatctggcccaacaggaattcagtaataaggatttttccccaaaaaatatgcactgtattcttagaaactttattcccgtcatctttctactttaaaaggcatttaccccatgaaatgtatctcttttggtattttcctgactgcaaatgcaaaaacaaggaccaacgaatcccaggactgcaatagaccactgacctttagtcagtgaagaactgattccccaaaccacacttaacactcccctgctttctccatgcaaatgcagaatttcttttccccactaagttacaaatatctttaaggcagaaaaacccatgttattaatttttttaaatctccacttctaatgtcagatgactagtaaatcaatttgttagaatacattgttttctgtccatatcttctgcgagtcactcgcccagcagccaggcttctcaagaacggaaggactgctgacgttcacaggtggctaccgggtgggacgctgtgcctgggttatctgatttcttccttcctgccacctcgggaggtagggagagccttctggcaggccaggggcagggacgggttctgagccaaggccttcctgctttcagggcccaccctcttcgtgccatgctgacttacacagttacgttttaatctaatcgctaattttaataaaccttctaaattacctctgcacagattaaaaatacctatgccggtgaagttttgattagagtgattagatattgagggcacagttctaagcactttacttctattaattcatttaattctcatagcaaccccataggtactgtaattcccgttttagggattggggaaccaaggcgtagagaaatcatatcatttccccagtaatcccagctgataaatggcacagaagaatttgggccaaggcagcatgagctccagacttccatttagagcattttattgctactcaccttgactgtcagtctggctcagattctgccacttcccgctgcacgtcctggcattcagtttctttccctgtcaagttgttgtcataataccctccttggaggctttttgggagagttcagtgagagagactgtgtcacgctccacacggagtacctgaacataacaagtgtagctactggaccttctttttggttaacgtgaattaagaattagctctctacaaaaaaatataaaaattagctgggcgtggtggcacacacctgtaggtccagctacttaggaggctgaggtgggaggatcgcttgagcctgggaggtagagattgcagtgatccaagatcacaccactgcactccagcctgggtgacagtaagaccctgtctcaaaaaaaaaaaaaaaaaaaaaaaaaaaaagaattagctgagaacttggacttggagtctcagcatttttatttttttcctttctggttaacaagcgaccctcagtccctgttccatctctctcccctcccgagtcaggctacaacaggtgccctgtggccccaccgcaccagggcctgcaccccatccaccagcgccacatcactatgcccacaagcgtcccccagcagcaggtctttggcctggcggaacccaagaggaagtcctcgctcttctggcacaccttcaacaggctcacccccttccggaaatgaaaacaggaggctgtgcttccatggagctgggtgtcaagagaagaactgtctttgtttcttgtgtgcttcaatccagggaaagtttcttggacccagtgataaaaacttccttttagggatcaatgaaggagagaaggtcttggaatcaccttcagtctttggagacccagctgcctttgtggaagggaggagacggtcatgacacaaagctttatcctacacagaaacacccgtgacccactatgagatggcccagatgtgggacccggtaccatgctctaaagcgagtgattaggcagcagctgaagccacccctgctgatgatgagcaagtgcctgctgcaggtccaaacacagcatccagggctttgcagttcctaaggagtgatgaggttagaggatcacttctgcatttgattttcaaggatgccgtcaagacggggttgacacaatgctgcacgtgtctggtcacacttagaaattgagctcttactctcttctgtaatactgggggacctacagctgccgtggggctgaccacggtgttccctggcatcgtctgtgtccacacagatgctaactggtagtgcaaatgtcatcctgcaaggttcctcttcctgcaagcaaagtggagagaaagaagatgcatctgtcaccttcatcagggtcctcagtgcagagcaacttacgcatcctcaagaatccactgcttttcaggcaaggagggagaaatcctgctgcacactggctttgtcccggagtcggattccctcctgcctgcacgccttcagtaactccgagcagaaatcacatcttgcccacatgctgtaacctaagaaactgctatgcaaggctgggtgctgtggctcatgcctgtaatcccagcactttgggaggccaaggcaggtggatcacctgaggtcaggagttcgagacaagcgtggccaatatggcaaagcccagtctctactaataatacaaaaattagctgggcatggtggcgcatgcctgtaatcccagctactgggaaggctgaggtaggagaatcttttgaatctgggaagcggaggttgcagtgagctgagatcgcaccactgcactccagcctgggagatacagcgagactgtctccaaaaacaaaaacaaaaacaaaaaacattcaaacaactgtttgcaatataaaaagctcatttactgtaatatttatgatacagtgaatatgaaaatgcactggtcagaaggcactctcaaagagccgcactgctcctgacatcgtccttagcaatgaaatcacaaagacagccaaagcagtcctgcttcttggaaatcagaagctgcctttatcacatataaagccaaacagggcataaccatgtcacgtgagcatgtcatcaggcttctgaggacttgttctttataaaaaaagaccttcacaaaatatcttggcttagagatagcagtctttattaacaaaggccacctaggctgacacctgcagataatcatctccttttctttgtctatgttgtacattttcatgatataacttttaactatgtctagagaaggcaggctctgcaagagaggtgccctttcaacccgctcagtgccctggacaggagatgctgtgttaaactgttaatggatatctatatgagaagctcatttttgtatgctatccctgcagtttttttttttctaacaggcccatgtttgagaataaacaagtctgtgatgtcagagacaaaggtgtattcttcagtctgcaggtgtgtggcacctcccttctcccctgcagccccccacatccagagccgttcctgagagtgacatcatgcatcaagaaaacataaccttggtcctcaggtgaacccttggaacattctgtgaccgcctgatgtccattctgagccaccttggcacacatgcttacaggcagcactgctaagggttcaggtgccccatggctgacagcccgagttgcttctgtggaccatcatgccgctcggcacgtcctgagacagaagttgctgcaggaaggagcttctggagaggtcctgtggcatgtgtgggggtgtgtgtgtgtatgtttccttcttgaacagacattccaactttagatgtgtttatagaactgacctttttactaacaaaatacaatgatatatgttggaaactacttaatatgcttttcctgcacaccttagcaataactgtaggggtctctgctagagttgtttgtatgtacagcaattttgaacaaattgttttaaatgtaatataagagaattagtttaaggaagtaaagagaatcatttgcttgtgttacattttcagtgaggattcagtttaagagtcattcttaggacttccatttcctaatatttattcatgggtaatgaagaaatggtttgcattttgtggccagtcctaatttattttccagctgagccctaacttccggctcccacctacctccacggacttcctaacagagacttatgaataccaggatgtgtttttgttaagtcaggttcaattcgttgcccctgtcagttttatagagtgtgagggtcactccattaaagatctctcctgggtggatcctacttggatgttcaggtgattttgaaaactgctaacatttttaaaaggctagaacatcctttgacttcttgaaaatctgcatgtctggcttgggttttattaccacatgcctgagttcttcaagaatggaaggctcaagtattctcatcttccatttgccaaacttccttcctgatttgagtcacgtgttccacttggaaagaaagggaacagagagcctcctccatggacagtgtatgaatttcattgggaatcttgctctctcccgcctctatgcctttctctctttttaaccttactttacataatattatagatgggccaagaaaagaaaagatgacataacattttgatgaatttcacctattccattcttcacgtttcagaattggtcgactttgttagaagataattgaagtagccttgggtcaaaagcaaccttttcaattgtgatcatacctaaaacatataaaaaccctgccgtagattaaaagcaattataaaatcataaaattgaatgtttgcagaatcctggagcagtagatttctttgtctttggcctgcggactagaaagagggcagcagtagtatgctggagcttccctgggataccagccacatggtttcttttcattagatctgatttttgtttcccactgtagatctgattttgtagttgaaaacatttcaccaccatcaaacactatttctgaatattgtgcctttttatacctagcctagatgaaaaccgatgccattcttattcagaaaatccccccatcctacatgactgttatctagacataaagcaaagtgcatttaattcaaaatttggttcacaatataagtattttgtaaaagccagctgaaccagcattttatcaggtggaaatctctgcaagccaaattgctgatactccttcatgcagatcaacttggtgtcccagtcagaatagaacagcataattacctggagttagggggagtatttctgcactattacttgtcagggagagaagaaacttagaattgtccctcaaaggagtgtcaagaagtatgaataaatgtcctttcaccagctcacaggccagaaatggaggacccaagtcaactaggtgaaactactagcagacccagctttcccataataacctaatatgcaaattgttctattaaagtctcattgttttcaggatgcaatgaaagtggatttcaaaaggctttggaaaaataagtggaacatgactgatcttgaaaaaaaaagcaaaagcttaaatatttgatacaagtttacttagctacaacatactttacattgttgcctttagttatctcacaggcactgacattttatatttagaaaatacttttaatctttctaatctttttttgtaaatattagtgtccattctgtatgactcgctaacctactttgcaaggctttgggcaacattttagctcattaacttcaagatgatgtgtcatctgtataggtcaaagaatgggacttctgaactgaggaatttgctgttgacagccaaagtatagtgtacaagattgatgtaacttgatatgtatttttgttgaagttttttgtaaaaaaaaattatttacaatgttatttgaatgatttttttaaatgctgtgaatctatatttgttgttttgtatattaaaattcatttgccaaactcgttctgatgatgcatttgagtagcagcctttaaaaggaggaagtggagagctgggtgcgggggcttctgggatttgtagctcctctgctgccctgatgtccctagacttctcagtggcaacaactcatccattcaggagctccatgtaaccactgggtaggcgtgggagaaggggggctccgagggcaacctcggagggcaccctggcttgagaaacgtcagtggttggagtaagagggatgcggaagggagcagtggggcggggccgcttttgctagggatcatggagaggagacagaacaacagactgtgccctctgactgcccctgaaggctaggccctgccacaggagctgtgctagtggccctgctcactcgccctttgcgggtgggtagattagaatttccttctccaacagctcagaagagctaagtcaacagcccattgtttgctgtggctgtaatcagaaaaggattcctatgaaggctgccaagtggctactgcccactttttgtttactcttaatatccacctgcttcccaaagtgatctgctcctcccaaccttgggctgcactggggaagggcggtcgctagggtggggagggggcgagccccagaacccatagggcagagcatagtggctccatgtataggagacagtgaaagagatgggggtggcattttcttccaggagagttgtggggagatgaccgttaggtcataagcgcgcccctactctgcactggcgagaccagcaaagctggagtgaacccagctgaacctgggccgcagcagccccggaggctggaggcgctgcagtcgggaaacaccaggaggatggagcccttttccctgtaagcaggaggccaggatcctgattcctgagccggcttcccacggaccccaggccccggcagggtcctggcgggaggaagaacccacggagtgagtggggtgtcagcaaagcggggccgcagggcaggttctggaagcctctccgcgtggctgggctggagtgtgcagacgtgggagagcccggaatggggagcgcgtggccggtggaggcccgaggctgtgcttccgtcgctggctctgaggcagaggtccaggccggcaggctgcccaggtggtcctgtctcagagctctccggggcgcagaggcgcgggaagcggggaagggccgggcagcgagacgggtgtccccagcaggaggtcggggacccgtcgcgcgttccgtcggggccgcctgcggtgcaggggtcagagaccagccacgcgagcaagagggagcccggccagaactgctgagagcccccagcggagctgggactcaggggctccttgcgtttagccaccaagagtgggggcaggctgcggggtgccggggagaagccagatctcactcattttacaccgactaattagatcccgccgcccacctgggaccacggcattgtcatgtccgctgcactgacggggaaattgaggcacgggggcgagtaaggcgggagagggagtcggcgccgccgagctggggcgagccccgcacccacccgtacactcggcctctgcccctgctctgtgcgtgggctcctgctctgtgcgtggcctcgccgccgagctggggtgagccccgcacccacccgtacacccggcctctgctcctgctctttgcgtggcctcctgctctgtgcgtggcctctgctcctgctgcgtgcactgcggcatctcgggaaaccgggctgggctcctctgtcctctggaagctactgtaagttttagataaatgttactactagacacgaggaaagtgagtccatgattactggcattgaacaaatggttgcaccgcgttctccgtggtaggtggagtgtgtgattgtgagaggggaatggacactgaatccttacctacacaaatgcctaaactcgtaaggcattacgacacacccatctgaaaatctaattaagcggtaggaattctaatggtccgggatccaaatgagacccagccacttaacagttagcagccttcagttttgtcctgttgcccgtaattaccccaaggtcagggagaagcactgaagcaaaggcatgaacatcactttgaaaaagaaaggagttaatgggtgcagcacaccaacatggctcatgtatacatatgtaacaaacctgcacgttgtgcacatgtacactagaacttaaagtattatatatatatatatatatatatatgaaagaaacctgcctggggcactccttccttcagactccccttgaaagtattccctcatttcattcaaaaggatttaacttttctaaactaagtggtgctggtagaatatgctacctgatttacgtgttgctgtaattcttgaagctcttccaagacatcttggccttcctctgttccctccccttcctgctattttgcagacatatccactggggaattgtatggcaggaaggctgattttatttagctggcccttgattcttggtttg

SEQ ID NO: 487 - DNA, 2688 bp, Homo sapiens
atggtggggggtgggagtctggggctggacgtgtgtctgccgagcacctggcacatggccagtgcagtttcttcagatggaggtactgagccctctgccttagtggatgacaacggtagtgaggaggacttcagctatgaagacctctgccaggccagccctcggtacctgcagcccggcggggagcagctggccatcaatgagctgatcagtgatggcaacgtggtctgcgcagaagccctgtgggaccatgtgaccatggatgaccaggaactgggcttcaaagccggggatgtcatccaggttctggaagcctccaacaaggactggtggtggggccgcagtgaagataaggaagcctggttccccgcgagcttcgtcagattgcgagtgaatcaggaagagctgtcggaaaactccagcagcacccccagtgaggagcaggacgaggaggccagccagagccgccacagacactgtgagaacaagcagcagatgcggaccaacgtcatccgggagatcatggacaccgagcgggtgtacatcaaacacctcagggacatctgtgagggctatatccgacagtgccgcaagcacacaggaatgttcaccgttgcgcagctagccactatttttggaaacattgaagatatttacaaattccaaagaaagtttctgaaagaccttgagaaacagtacaacaaagaggaacctcacttaagtgaaataggatcttgctttcttcaaaatcaagagggctttgccatctattccgagtactgcaacaaccacccgggcgcctgcctggagctcgccaacctcatgaagcagggcaagtacagacatttctttgaagcctgccgcctgctgcagcagatgattgacatcgccatcgacgggttcctgctcacaccagtgcagaagatctgcaaatacccgctgcagctggccgagctgctcaagtataccacacaggaacacggtgattacagcaacataaaggcagcatatgaggccatgaagaatgtggcctgtctgatcaacgagcgcaagcgcaagctggagagcatcgacaagatagctcgctggcaggtgtctatcgtgggctgggagggactggatatcttagaccgaagctcagaattgattcattctggggagctgaccaaaatcactaagcaaggcaaaagccagcagcggacgttcttcctgtttgaccaccagctggtgtcctgcaagaaggacctgctgcgcagggacatgctgtactacaagggccggctggacatggatgagatggagcttgtggacctgggggatgggcgcgacaaggactgcaacctcagcgtgaaaaatgccttcaagctcgtcagtaggaccacagacgaggtttatttgttttgtgccaaaaaacaagaagacaaggcgaggtggctgcaggcctgtgcagatgaaaggaggcgggtgcaagaggacaaggagatgggaatggaaatttcagaaaaccagaagaaacttgccatgttaaatgctcaaaaggcaggacatggaaagtcaaaaggctacaacaggtgccctgtggccccaccgcaccagggcctgcaccccatccaccagcgccacatcactatgcccacaagcgtcccccagcagcaggtctttggcctggcggaacccaagaggaagtcctcgctcttctggcacaccttcaacaggctcacccccttccggaaatgaaaacaggaggctgtgcttccatggagctgggtgtcaagagaagaactgtctttgtttcttgtgtgcttcaatccagggaaagtttcttggacccagtgataaaaacttccttttagggatcaatgaaggagagaaggtcttggaatcaccttcagtctttggagacccagctgcctttgtggaagggaggagacggtcatgacacaaagctttatcctacacagaaacacccgtgacccactatgagatggcccagatgtgggacccggtaccatgctctaaagcgagtgattaggcagcagctgaagccacccctgctgatgatgagcaagtgcctgctgcaggtccaaacacagcatccagggctttgcagttcctaaggagtgatgaggttagaggatcacttctgcatttgattttcaaggatgccgtcaagacggggttgacacaatgctgcacgtgtctggtcacacttagaaattgagctcttactctcttctgtaatactgggggacctacagctgccgtggggctgaccacggtgttccctggcatcgtctgtgtccacacagatgctaactggtagtgcaaatgtcatcctgcaaggttcctcttcctgcaagcaaagtggagagaaagaagatgcatctgtcaccttcatcagggtcctcagtgcagagcaacttacgcatcctcaagaatccactgcttttcaggcaaggagggagaaatcctgctgcacactggctttgtcccggagtcggattccctcctgcctgcacgccttcagtaactccgagcagaaatcacatcttgcccacatgctgtaacctaagaaactgctatgcaaggctgggtgctgtggctcatgcctgtaatcccagcactttgggaggccaaggcaggtggatcacctgaggtcaggagttcgagacaagcgtggccaatatg

SEQ ID NO: 488 - protein, 574 aa, Homo sapiens
MVGGGSLGLDVCLPSTWHMASAVSSDGGTEPSALVDDNGSEEDFSYEDLCQDRYLQPGGEQLAINELISDGNVVCAEALWDHVTMDDQELGFKAGDVIQVLENKDWWWGRSEDKEAWFPASFVRLRVNQEELSENSSSTPSEEQDEEASQSRHRHCENKQQMRTNVIREIMDTERVYIKHLRDICEGYIRQCRKHTGMFTVAQLATIFGNIEDIYKFQRKFLKDLEKQYNKEEPHLSEIGSCFLQNQEGFAIYSEYCNNHPGACLELANLMKQGKYRHFFEACRLLQQMIDIAIDGFLLTPVQKICKYPLQLAELLKYTTQEHGDYSNIKAAYEAMKNVACLINERKRKLESIDKIARWQVSIVGWEGLDILDRSSELIHSGELTKITKQGKSQQRTFFLFDHQLVSCKKDLLRRDMLYYKGRLDMDEMELVDLGDGRDKDCNLSVKNAFKLVSRTTDEVYLFCAKKQEDKARWLQACADERRRVQEDKEMGMEISENQKKLAMLNAQKAGHGKSKGYNRCPVAPPHQGLHPIHQRHITMPTSVPQQQVFGLAEPKRKSSLFWHTFNRLTPFRK

SEQ ID NO: 489 - DNA, 63897 bp, Mus musculus
  misc_feature (1)...(63897): n = A,T,C or G
caactaatccatacttgatgtgtgtgtctctgctggtttcaagcctttagagttttaacttggaacctttgatttttctctttgatttttttttttagatgtaggaaattttaaaaaatgaaaccaaaaaaattgaaatcaagtgccctgcctcaaagtaacagtcactcacattcttcacatccatagtaaactgccattcgtgttttggctctttgtgtgtgtgtgtgtgtgtgtgtgtgtgtgtgtgtttgtgtgtatatgtgtgtgtgtgcccacaatgaacacttttttaaagcatgctacaggctggagagatggctccatgattaagagcacattttgtttttccaggagacctgagttccattcctagtactcacatggggctcagggcagcctatagcttcagttctgggtaaccctaaagcctctggcctctgtggcacccgcattcatgtgtgcatactcctttctcctctgtctacatgcacatgattaaaaactaaaattgaatctttaaaaagcatgacacgagctggataaatgattcagcagttaggagggcttgctgctctcccagagttgcagagtttggttctgggaggctcacaactgaccacatgtaaccacggctccagaggatttggtgtcctcttctgcacagacacacacagacagggacacacacagtgacagagagagacagagacaaacagagacagagagagacagagagacagagacagatagaggcagagacagacagagacagagagataatcagagacagagagaaacagagacagagagacagagacagatagaggcagagacagagacagagagataatcagagacagagagaaacagagacagagaggagaattttctcaacaccgctttgaggcatgacctgagattcaggctgatgccgagataatggagattcttctttgatggcacttttctaacttctaaataaattccaaagctgcttctcactgactcttccagaaattctcttctgcatcaaggctgacgatctagtttgagcctagccaaaggcctacaagaggaaggcacctcccttctggatgacagtgtggagcttggcgcctacatccctcccacctggggttgctatacgttattccatcatgttccttcctctgtggcaggaatctgctgctgctgctgctgctgctgctgctgctgtggacagataaccttcccctcctgctggtcattccaggtgtcccggcctccatgctgtggtctcctcccgtctccctgtacttctccagcacaacttccctcccttcagggtcataactaaccacagtcgtccatctggccagtaggacccattgtgctgacttgttaccaagctgactccccacagaatccatccaggagaggaggccagaaccccagtggtattctcatttccccacctaccagtgaggcttaacatatactttattgattttgcacaaatgtccaagtccctcaacatccctttagagtcgtttttcctttctccactagtttaaaatgccaatattttattttagttattttacttaacttttgttagtgtaagcctggatcattccattcagttattcaatctggttatttctaagttagtctgtgacacatcattttaactgtgacttcatcacctatggccggccatatgttttgcgaagcgtggtggcaattttgtttgttttctgtgggtaggaaaactgaaacccagggttaaaatgatttgctcacagcctgcctcacccattccccaggcagaaagggtctttacatagggccgtaccttcttctgtctgctcctattcccccagttcctgatacccctcatgcattattgtgtgctaagtgatggccaagctttattctccagctttgccattggaattggaaaagctatgttcatagtgtctccaatcagaagacccactaggtgctcggagacccactaggcacttgggatcactgggtggatgaccatcttgtctcagcctcaggagaactaggtttctaagtggcttctgctttcctcttctagacactgatggctcagcctgtgtgtgctatccactctgagttctagaagacccaaagccaggagtgtccccgcagcaagcagagaagttctccaggaggtcttggcgcattggtcttctcttccatattacttaatcttttcactcttatttccccttttaactggttccctcaactccgtccttttgggaaatgtgttctttggtgtgctatgcaggatattttgttaatgcacaaagcaacgaggtgacccatgcacgagaaatgaaggtgaaatagcctagcaggtatggaaagctcaagagcccaaacaattaaccatgaggtaccatttgctgccagggcatcctggattctgcccttaatggggaagcagcttctcctttcctagggaaaatctactagtgccaattcctaaagccaccatgcttgcccagtccagcccagcccagtccctgatctagcctgttcctttatgtgctgcgtgtccttgtggagtggccctgccttagtatctactcctgctttggaggaaacctcctaggatctgagagtgctgtgactgcaaacatctcaccagggtgggctctgcagccagggggtcccctggggtctcaggagggctagctgaactttacaaggctgctgacctttaagctactaagaaagcatagtttgcggcaagctgctcagcctcaggattggatgctcccagcactgctgctctaaaaccggtcattagtgggagtgtggaatggaggtctggaaagggctttccaagaagcaaatgttggagagaagagaggactggactgcagatgggaaagcctagtattttgtctcgtgcaactgctccctggcctttaagaaaaagtcccttgcttaaccctgcagaataggagcagtgagaccaggatacgatgatgccctcagtccctcgacaattgtgaacaagttcctcagtttgactattggaggctactacaggaacagtggcaggaaagacatcgccataccttctcgtgggtcttaccctttattctagtgtgtgaagacaggcactggcgtcagataaaccaatgagtaaagtctctttacaggtccctctaggggctgacaaatggagtccagaaaaaaaaacagtgatcccaggagaggggaaggagagcgtgagaactggtcacaggaggcgactgtctagacctccagagccctgacctggggactagccatggagatgggcagaggaggaactgcacacagcctgctggagagggactcatgggatctgctgcctagggcagggagtgcaggggactctattcttcagatgccgtggttgtttgccctttaggaaatagctagtcctcccaagtgaggttgtgatggaatctggagaagtatgtaaccaggaaaattgcctgggaagatttaaggtaaggtgggagcaccagaaacagattctgggacctctactattcagctgaagtttcaactttgtcccagagatgggtctctgtatgagaacagacagttcccctgccaaggaagagccttggcttggcgactgttgacagttggaagggagcaggtcagtagacctctgctagaaaacagtgttagcagagcctgcagccacaggccagaaggggcccaggggagaatcatttctcacatacattgaggggtcaccatgcgagggacctggaacccttagaagataaatgttaacatcacctacattttaagacaaggaaaatatgcttcaggctcttagccactgggaaactcataaggactcatgtgtaaggacttgtgatatttaaaggaagaagtatcaaacatttgagggccagctacttacagacccattgtctcaagaaccccattgttgtctcaattctaagacggggaaactgaggttcaggcagttgggggacactgggacctctgctttacactgcctggcactgaggcctgctgcctctctgcagaattcagccacttcctgtgtttaacaaacacctttccagagactccatcctggcattctctttcactccacgggacctgaggcttgggaagtattgaaaattaactcagttggtcaaacatctaagaaacgaaacggggatgagatgatgtcagcttgggagattcccaccccttgtttactcacagaaacaatgatttcacaatgaccacagatgaatataggtcctggggagctctggagtacagtcaggaggctgcgtgtcagaggcagaacacagggaacacgttgggtgcattgtcctaactccagggacagtctaactcagtgacaagaggtttctccttggccgtgactttcttccctgggtgagaatgaagtgctgggatccattgatgttcctagcacctttgctgtgttggtggccatggtccttcacagcttttgcctctgaaagccaatgctaaacccaagctgagagagagggctgcttggaacctacccgcctgtgcttccttagagctaaagctctcgctgtctgtcccttctgggactttccagaacttgcttatgaatgccagcgtcatagctcgggtgcctgtctagtggccctattgccaccagtgcccacctaccaaacctggagttgcccacttccctgagaacacatgccctggatgcagcatctttgtacattaggaacctggcatttcccacaccccacttagccaatacccctaagctgactcacaggcaacgctttttttctaccaaagacagtctaccagttgggaagaagtacctgccccttcaaatctgcagataccaacacaaagctacggcaaatacacctacacacattcacacactagagctctcgcacacacgcacatacacacacacacacacacacacacacacactcaaaagcacatgcatgcatgcccacatgcatgtgcctgtacataaaacatgtacaccacaggacacaataaacttccaattaaacaaatttggatcttctggttgcctatcaaataattcaaaataatgttttttgttttttgttttttttaaagaagctcggccaaaagatatacatagctcaacagtattaggggggaaaatgtatttagataaaattaggagttcaacagagagatgctatagaacaaacagaagaattctgcaactgaagtacagcaggagtgaagtgaaatgtctcgttacaactgtccctagcagacttcatgctggagaatcagcaaatatttggagccacgcagtcaggggaggaaaacaacacagaactctcagaggaactgcatcaagcaggcgcgtacacacacattgtcatagtcccagaaggtgaggaagaggggaatgcacaaagaaatgatggccaagagctttctttatttcttattttgtttttttgttttgttttgtttgtttgtttgtttttgtttttttttcgagacagggtttctctgtatagtcttggctgtcctggaactcactttgtagaccaggctggcctcaaactcagagatccacctgcctctgcctcccaagtgctgggattaaaggtgtgcaccaccactgcccggctggccaagagctagcttgcttgcttgcttgctttctttttttttttttttttcgagacagggtttctctgtataactctggctgtcctggaactcactttgtagaccaggctggccttgaactcagaaatccgcctgcctctgcctcccaagtgctgggattaaaggcatgtgccaccacgccgggctccaagagctttctaaaacttgggagacaataggtatccagatgaaggtcaaaggaccaatccaaagaagactgccgcaagactcattatcatcaaactgtcaaaaagctggaagcaacgagaactctgagaggaatgaaggcagccacataccaggggaccccattacacagtaagcagaagcctcgcagtgtaggcggccagagatgagatagtcccagaaccatcctgaatgcgagcagttcctgtcccacagcagagcacactgcaggaaagattctcttaaccttccctccactccctgttcccaacacccacactgtttctgccggcccctactagcttgcattctttttcatataaagtgattttatgccagtcctccatccttcaactgtaggcacaggcctggctcctggctttccgatttcagtttgttaatccacagaaatcctctttactgcttgttatttttttatagtactgggaatcaaacccaggggctgtgcatgctaggaaaattctttaaccactgagctatatccccagcctatttgtttgtttattgtttttgttttttaaaagatttatttactaatttaatgtatgtgagtacactgtcactgtcttcagacacaccagaagagggcatcggatcccattacagatggttgtgagccaccatgtggttgctgggaattgaactcaggacctctggaagagcagtcagtgctcttaaccactgagccatctctccagccctgtttattgtttatttgttataattttcatttctttgtagagcatacctatctgctgactcttattgacatgaagtgtaatactctacatatttgagaatatcttcctttaattccatgaatgtatcgatagtaactgctgtgaactcaaagcccttgaggagtttgcattattttctggtcacttttttatttttattttattttttgtatacaatagagtttatccagggcatggggaagctggccatgaccacacagagagaggagaagggggaagagaaaaggggtcactttgtttttgttgttgtgtttttttttttttttcttttcctcatatctgtaacttttgatgaaactgggcattgcttctggttttgtttgatttccctgaaagttactggtgttttgttttaggaatctacttggaataagtttataaaactagccccctgcgtggtgcatagccgctattatctctgcacagtgtagtatcagcatttctcttaatttttaagacttattttgtattacttcaaatttttattcgtggtgtgtgtgtgtgtgtgtgtgtgtgtccaggcacctgtggaaacctgaggtcttggaacccctggggtgcagttatgggcaattgtgagctaccagacatggggactggaaaccaaactcaggtcctctgcaggagcagggagcacttccagtccctgagccatctctctagttcctttactttactttttagttgtgatctcccaagggtctagtctctttctgcattttaagacaatcctttgaacagggtcataatcagacaccttgcacaagaagccctccacactccgctgcccgagctgggcgtggctggagaagcaagggactgtgcagcaagccctcccatctccctttgagctcacttttggctgtactctcttgcattccccctccccaccccagctttggtcatacttgtttcagcaattcattgggtgtgtaaagagattttattgtcttggctctaccttgcctgaaggaccttccagttctggctgtttcttttcaccttggatcaaaactataatcttaagccagtaaacctgtagttttcccaacttcttgtctacaaccaaatacataacctttaacccataaactgcaggttcatgtgtccacacccaaaaccaaacctgctttctcttcctagtacagtggctggttttcattggcctgtggaccaagcctaccacaggtaccagaaaacctatgatttttccttattccaaatagcatcctgtgtgccgggcattacaataatcctggcataataaaattcttaatgaccgagcatttcccatgatctgaaagttgttctttgtatttgtttcgttgacaattttgtctgatatacttgttactgttaaaggggactatgtaatgtctcataccaccacctttgaggtgaatcttggcttggactatccgaacatttttcaacttgaccattctattactcacatcttttgattttaattatagatgagttgttatcagaaggttggtgtagagtcatggaaagagagccctgagatttgcataagtcacctcagatgcacaaaaataaatggggaaaatgacagagagaggcagtcaggctgagcacagaaccccaggagtcagagcaaaggtctggtctcagtgctgtcctgacaagacctgctgaggctccctaactttataaactgtctgacaaaggatactgtctaacccttcaccatctctcccctgggtcttctccccaacagctttctcgggggccctgtgactttgtgagggttaaaatggctgaaattagctttcacttctgctcagacatctgaagccaacagcaacatcatttctctgttcttttctgagtggttgctggaatctatctgttcgtgtgtgtgcatgtgcgtgtgcgtgtgtgcatccaacatctgtggtaaacagaagggtgagtttttctcagactataccaaggccaaagccataagcaaattggaatcactctcctctcagcaaactctccccatccctcctattctgctctgggaagatgagggagtggcagaggaagctggttccatgtcatcccttcgtgttctcccagcctcaggctcaagtgcacaggttcaagtccaaacattctctgttcaaggtctgagaagatagttcagttggccaattgctttcattacaagcagaagaagccaagtctggtcctcagaacctgctataaaataagataaaataaaataaatgctggtatgcaattatgattccagcctgtagaaagcagagacaagaggattcctgggactgaggagccagccatcttatcctgcttagaaagttgaaagccagtgagagaccttgccaaaaacaaaaaaccaacaacagcaaaatcccgataggtagtaacttctgagatggtcctttgtttcccacacacgtgtgcctatttcttgcagctgaacacattagctgtctactctatcctaaatactgtgataggaacatttatacatgttcctatgaaaccttaggggacaagcaacagcccatagaaccaagagctccatgccccactgcaaagagcttctgatagctctttcctacaaggacttgcagtgaacactctcttagccctaaagtcccagaaaggatgctccatatgggtacagatcatgagctgtggtgtagaaactggcagaccgatgatctactcgatcaaggctcctagacattaaagagaagggagagtctgcccttgagacacctggatgagcaaggtgatcggtggtccatgatgtcttctgggccagcaggtcctctcaacaaccttcctggtcccattaacccctgactgacatcggaaaggatataatcaaccatggtgccacccttcctgtcacctcactgtctcttctctgagttttcactgacaggtaaagtgatcagttgaaaaaaacctctgagatcagattcacacattgatacaacactatcaaacatggagggatttgtgtgtactgagcatcaattctatacagtccagtcacatctgttctgccactgaatgctcacaccatcctgtgaccccactaatattagcatcatttaaaagcaaagcaaagccaatggactgagagaaccccgccctagttcccacaggtggcccagacggaaccctctgaaaaatacttcctggagatagttggaggtgtgttgaccctaacaaaccaaccaaggggaaacaccagccgtgtggtgaaccaaaacccatgagaaaactttggggtggcagaggggcatcatgaccagcctggctgaaggtcaggtgcccatgaaacttcctcagaaacacctccggggctgaggagccagaagtctccagaagacttgactggagggcagagctcccactgagctgcttcttagggctgttcatggcggtctgatcacaacagggggcacacacacctctgtgtgctgttggcaggaagccacaagccactgaagctgactgagatgagaagaatccatctggggatgggattggcttttcttaactgggtccagagcttctggttgccgctagaaagttcttcaaccacacagaccctgggatctgcacagctatgttgagaagctactgaagccctgcaaggtaggcctttcagctggctcctgggcagctctacccagtgtgaacggtgctctgaggcctgtgagatgggtgaatgggcaggaacattgctatggctgctactcatagaattcacatgctctgtcctacagctatgaataaggcatcctactgtttattcctgagaggtctttgaatttataaaagttcacccacctagggtagattgtgtggtgtaactccaaggtgggaagggcagtgaaggtccaccagaagacatgggatgtgggagaagatagccgggaacatacagaccagctatggggctagaggcaagttccccagcctgttagaaaggaaagtaactggagccactgtgtagagtccaatgaggtgatatgcaccacctggctcaagatcagtgtgtctggtgattactctcgattctctggtttttaatgaaattatttggatttttgggtattatggtgatggaactaacaacctttttggccaagatatgttttgttagtaaaggtagcccaaggaaagaatagttgttaacacgttttgaaaggatgtttaaaagttgcttactagctgggcatggtggcacacgcctttaatcccagcacttgggaggcagaggcgggtggatttctgagttcgaggccagcctggtctacaaagtgagttccaggacagccagggctacagagaaaccctgtcttgaaaaaccaaaaaaaaaaaaaaaaaaaaaaaaaaaaaaaagttgctttgcttacttatacttgggctagggagatagctcagtgaagtgcttggctcgaaagcataaagacatgggtttgatcctctagcacacaggtgaaaaccctcagtcctggggaggtagggtaggagcattcctgggtgcattggccagctagtctccttactccatgatctctactccagtgagagatctaaaacaaacaaacacacaaacaaccttaaaaccccaaggtggctccctcctgaggagaaacacccatgcacatgtgcacatgaacacgcacatgcaggcaatgtttacaatttggcagcttctccgttcactttgtaattggtcattgatttcatccttactggcccacaccaccaataacacagtgttgctaatgatctggaactgtggggcattctcttgccatgtctgcaggaggggggctagtccccctgaccttgacagggacctgagcctccagtatgagaggcagaggcagtagctgtatagtagataacaagacagaccctaggttaggcaagttaccaagatcaacttcaccgaggacaggacatgttgctgctgtgaacttctgccaccatgcacctcattcctcaaactcgcaacaccgcccaaccagaccgaatgaccatatcggtccaaactgaggggtgttctacaatgtgtaaatccttgagactgtcaggatcacagaaaacaaacacaggtgataaagttacaggccactgttacaatgttcctggtgccactgtgccagtattagtgtattagttctggtgtctgctgtttttctacaattctagaattgcttcaaaataaaaagttcaaaaaaaaaattgtactcatcttgcctcagagcgagagtggtcccaggataagtattcctgaggaaacttctctttgaacctttcggaacacaggaggccttcgccgccctctctcttcggctatctgtctattctagaatcacactgtgtttcccgctcctcactggattttcgtctgtctgtctgtctgtctgtctgtctggtttttgttggatgtacattttttgagtcccccctcatgttaggagctgtggggttaggccagtctgacctgctctgcggtattcacggtccaatgtggactcagcctcaaaaaggagacaggaggcaaagaaagaggcagcggggcacctagacctgcacagagtgcctctcatccaaatggagccagacatcctttggggtccactctccctcaggatcccatggctagcctgacagggcagatggacttccctcgaaagccataactctgccagatcatcgatgcctcagaagctggagaggaagaaaacagactgtgcagaaagatgacacatagatccgaatcacagcgctgcgatgattatcaaacagaacagcgggactacaagctagcctgaggatgctttccaccagtttatgtttcgctgtgttatcttaggctggagccctttcctactttctcatggagaatccctttccccagagtcttagaaccatcgcttacagggctccaagccattttgtattcccacaaacaccagcatatgctgagctgtgccttgcctctaccaaccaagcccccttagactggagctcccctgcgacaggggcaggctttgctcatccggctgggtcctagcatggtccccggctcatgaaaggtgctgtgcaaaaccacttttccttttctctatttctctcctaccttcctcctctctcccctctattctcctcctttctgctctttctctcctctttcttctcgcccccctttctccctccccttcccttgcctcccctcccctccccttcaccgctacagctagggattggacctaaggtctcatacttagtaggaaaattttgtgcactgagctagcccagccccttggttttattttatactgagacagagtttcactgggtgttcaggttctccttttccttgctctgtagcccagacagacgagagacttgtccatcctcagcctcctgagtgactggaatcccaggcctgtgacaccaggctcgcaaaccattcttgcacgaaaggagcaagcaagaaaaccaaggtgcatgggaaggatagggcatgaggaagaaagttacaggaggaagggctgagctctaaacgtcactgctaaccgtgctgatctccatgagggtctccgtggcctgcgctgtgggctctgaagcagtacagacaggggaagtggcactgcgaatttttgacattctacttcccttgaggtggtgtggtacagaggtctaaacgggaacatggcttagaacctgacagctgggaaaaagtgagccagtggcctgtttgtgctctgcttcctgctatgtcaaacagtagccacagctccctccaagcagagatctcggtgccaaacaaccacaagatggagtacaggctttactgagcatcagtctcctccaaggtgacagtggggctcctagcccccagccccccccccccccaccaaaagagtgctatttccacaatcctgcagcaagaagttcctgggaggccttgtcatccccaccttgcttggcctctgtacacctgacacctgggatcctgccacggacaaatcagagaaaacatgacacatctggtctacacaataaatacagggaatatgtaagcccacaaccccacagtggtatctacaagggctttagatgttctgggcttcacaggttagatcacttctgacgtttaagatcaggctcctgttgtatgtattggagctgtcaagtgctctgaacctgtagtttggtctcttgagctggtgtcatctatggtacagtgtgtacactcttgcataaagagcccttgggttttcagaggcttcctctgggcagcaaggtctgacctgatctgcttaattcctgtgggtggagtgcagttccgcctcttgctcctgtgtcagagggaaactgtccctatctctgtcccatacagatcatgttgtagggaggcactctctacagaggtctttgtttgccatgccagcaggaggcaggaggctgagcaggcatctagcacagcatgggtctgtactgttaatttctgggatggacagagacacttgctctctcatgcccaggcctggcaatccctttcatatgtacaggcttggaatggggacagggacgggacaaaggagataggcaaaagtggagaagggatggctgacaagatgattggagctgaaggatggataggagaaagttttaaaagaagaaagcagctgggcataacagggcacatgtttaatcccagtgttcaggaggcagagaaaggcagatcttgtgagctcaaggttagtcgggtctaaatagtgaattaaagtcagccaaggacatatggcaagactctctcaaaagagatatagatagatagatttatagacaattgacagatgatagatagataatagatagatagatcgtagatagattgatagaggacagaatgtctgatgatcctgcctggcaccagctctgcccctgggatccatcctcgatctgggtcatctagatggtccactatgaggtgttgagatacaaatgggtgctgatgaaaactgttgagtgcatggcctgctactgtcattgagaagggcagatgtagtcaccctggctttggacaagggcatgacctcactgcaaacgggagtttaagaggaaatcagtgctctaaagcaggcatgttcagcctgtggccagctatgagtgcaaccccaacacaaaatcatacacgtaattaaagcattatgaggtgaggtttacgatttgtttgtttggttactatttatgtttttgtaactccattacacagttctagagcatgaactctgtagatgacaaagtcgtgttccaatgtcagacgtttggcaagggtttagggtaggagactatgaagataaaaggtcagctggccccactggagtgcaaggttcaggttagagactactgaattcttgcaagttgagcactttctagaagctgacctgggagtggggtaatttctaaagtctgtgttgatatatacatatatatatcatcaccatcatcatcagggtgctgctgatatggacaggacgagatggtgacctaggtagggttaagactggaggaagagccagaagctaagagagagctggaggtggactgtgccctgcctggctcattagtctctgagacttcacttctagaacggagctctggcctgtagccttggctgggcaacttcctctttctgagcttgtttcccatagtgcttttgggggaggggagctaagctacctctcaaaccacttgtcagaccttaatggctctgtaggtacagcaagcactttggtcaaacggtgaaggctggttaggcaccagaattccagaattccagaatgccctggtctcaactggtccccaaacaaccctgtgctggtggtcggaacctacctaggggtccagagctgggagggagcaccgctgagatgcactcagggttgcagccttaggttccagcatgagcctgcaccttagcacaacagcaaggcaagggggtggggcagggtgtgtgtatgcatgctctcgtgtgtgcgcacatgcggtaatgggagttggggggtatgtgtgggtcatcatagagttgagggctgagaacaggctgctccatggtctatacacagagattgtgaggttaggagctaggatgggatgagctcagtgctatgctcatgtgagacctcaagctgtgacctatgacctctggctgagggcgtttctatccccaggagactctggcgccagcttgcctggggacaggatcctgctgagtctgcttctatgccctgtgggctattcctgtggtcaccttccctatttcctctaggctgctcgccgctcaagctcctggctcgatctttcctgctttagtttctccatatcaccctgccacctttggggttaagtttcccctacatttcctctctctagagccccttcggctctcagctctgaaacagtctctcagagagcgagacactgtgctgggcccgagaagcacagacatgagagtagttatgaagtcaggcttgcatgtcaatcattcattccgacaggagtccaaatgataggactgtggcaatgtccccaaggtccttcagaatgcagaaaaggaaggcaggtcacttgtgagtccaaaggcaaatgaacactggggtcagagagcaggagggggccccctaggcttctgctcacttcctctagcagcaggaagggctggccatgagagaaaagctcttgggagcccaactagaggtcagcaggcctctgagagcagacttgtcggcagatctcggagcctctgtatgttggagctgtctccttccctgagattttgctgtaggaacctatccagtcctctctcagtagctttagtgggagtagctgacttcacgctctcatgaggataccacgaggaccgcagatgccaggcgaaagctgagccaggccagggtcttggtagccaaggggctgtaatgattctcagcactcatcagtcaccgcagacaagccatttccatctgactccaaatgccagtcggcttgcgagcgatgtgatatgaacatcagagtctctgatggcatgagacaacaagacatgtctattccataacccccatgaatttcagagtggagccccacccccacctcgtttataggagcctctctcttcgaagacataaactaggaggggtctgaggggaccaggacaaacactggaagtgctgatggtgtcttctttgctcttcctaacgctaggcttggggtttgtggtctgagtctggaggggttctgctagctcagccctggcgctacttacccccaaaacccagtcacaagggaagccacaggaggagcaggctgctgagaccagggcgggagagccgctgggagggtaggctaatttaacacagatgtatcatttgtctcctgacttcaaatctgaaaaaattatgtaaccccaaaggtaatgctgaaaacagacataacctctgattcagctggctttgcttatgttggtcctaaaatctgctcctgttggtttaccctggacatagtttatcactgatgcacgagagacatcgctgtgactctgctccccccccccttctctttctgtcataacgtaagcatcttcctgtgagtctatggcacagtggtcattttcgaggctgcataaatactggacctctagtttgctttgatttttttttttaaagaccattacacagagagctgtggttcaaaaacgaaatagcacacaggcaacgttaatctgagctgcatcatgtaaccgaaggctgtccttttccaatccctccaaggaatggcaattaattgggaacacaaaatgcttatttggggagagaacggggttggcaccgagttgcattgtaagcggtgacgacggtggctgagagtttcatcctctgtcatctggctccctgacaaccttatttgctggccagtgctgtgatgtggtctttggccggagaacagactttcctgcctgggaaatgaagtgactcataaggaaacagcccctagagctttgggctagtttgttcttaatcagaagtctgtgaattgttgaaggctttgccaggaaaagggtccctgaaagtgggtgccaaatttagcatagaaatttgagttttaaaaaatatctctttctctctgtgtgtctgtccctgtcagtctctgtctctgtctgtctctgtctctctctttgtctgtctctgtctctctgcctctgtctctctctttctctcccatctctgtgttgtgtttaggggggggaggacaaatgccatgtgtgtgtccttggaggccagaagagggcatcaggctccctggagttacagaaaattgtgggctgacatattgatgcagggagcagaactctcaagttctctgtaagagcagcaagtgctcttaaccactgagccatctttccaggccataaatttctattaaagaaaaggtttttaatatgttaattttaatagtaacaaaagtaaactctcttagtatacttcaaaaataaaaatcagtcaccttttaaaactggcatgtttatggtaagtgtatttttttttcccctggggacattattttcaatttcatcacagttgtaaggagactgtgaatccagaaatattttttttggaaaaagagtctcaagtagctcagactggcctcaaacttgctatgaggctaaagatgatcttgacctcttcctggtccttccatctctacctccagagtgctgggattacaggcatgtgcccgaatacccaatttctgaggtgctgggaatgtaacccagggctctgtgcatgctacataaacattctgccaactgaactacatccacagccccgcatgtatgcagccccatatgtaggcagccctgtatggctggttcttagttaaagagaacatgttggcatttttttagactaaatggattccaccagcttcatgcctccctcctgagagtcagaaggactcactagtgcctgtggttgctgttagctctttccactgagcgagccctgtgcatctgcccaaaatgttatcggctaagagtgaaggggcaaagataaaccttttgaaattcaagagagcaaacatagacactcagccaccccagggaatatgtcagcctgttatagcctgtttgtctcctgatgccagcatcggttctttccttttcaaatagctgtttttattaatgacagactctcctgccccacccttggtggctgagtgatgtcttaaatgtatctggtctccttccttggtaaccttgtcttggatctccttaaagtgtgtgtgtctgaggcaccaaacatggacacactcagtttcccatctccccagaagtctgggctacattccccagttgctactactcattgaaggagaaaggcttcttaaggtatggcaagctgacgtcaaagtgagctggttatatttgcatcttggctgtctgtgatgtactgtagtgatgtagagcaccactgaatattgggtcaatgtgtcagccccaagtaatggccaatgaccccagccagagtgcagacagactctgacttgagataaacgtctttgtattagggaggtgaaggagtgagcattttttatgctttgggttttccggaattgaccaattgattgactgggtcactcatccattcaaaaagaaatcctgggctctgtgggccctgtgtgaaggaggatgtggtcagcaaagcagcctggtgcctggcctcaaccagattcagggtccaatgcaatgggagagtctgccttggagagacttcagctcattgccctgcctttagtgagaaaaatattggggatttttctgagtcacagggagtttaacatcatgttacattgaacaagtggaaggctctggtgagaatcacactttctctctttctggtacaagggccatttcatttcagcatcttggacaacagcataaggaacacatctgtttataaatgagtggggtctgggaaagctcttgggttctctgtccctcgtcacctgatcatgtgccaggtacggctgagtcaagtggtcattccagctcactgaaacacacaactcaagtcagagccaagacccgtccttgaaataaatgtgaggagcccagtagtcgatccatgaaagaccatccatatccctctatagctgtacaatcacaactgaagaatggtgaacacagagacagaggcctgaggtcctggaggtcaccttggaaagatggcaggctgtgtttatcccctcccacttcccatctacctgaaggaccttgggcacacttggctgatctgtccagtctgttttcttggttgtaaaaatgaggcagttgggggtagaggatgccttagggcagagaggagtctgggtacagtggagacttagtgccataggtggataatttgggaagggctggatgtgggacatgagaaggagcagagagaccagagggaaccctgtagttgtcttagtgagatgaagcagctcagataaagtaaaatatcagggatggagaccacgagacttatccagttatgacaccatgttgatgattttacaatagaaattagttgtacatggacgtgaggaggaagactgagtggctgtctaggacggcatagctttggggaaggtctgggtccagcagggtgggaagtgggtcaaaagcttatttctggccattttccttctgagccatcttttagaagtcttagagttgaggagacaactgttctagtcagtaatgtgcttgctgaacaagtgtgaggatctgagtttgatcctcagaacccatgttttaaaatccaagcgtgatgctgcatgcttgtcatggcagcgacagggggacagagacagacaagtccctatggcctgccagtcagccaagctgaatcagtgagcctcaggccagtgagaaatcctgtctcacaaaacaaagtggacattcctgagaattgacactctgggtggacctctggcctccacagacatgcacgcatgtgcacccgcacacacatgaaacacacacacacacacacacacacacacacacacacacacacacacacacacacgaagtcccagcatcaatagtttgcataacagtgccagctgctctgagttctatagccctttctctggtcctttccctgtcatgagtgttgtggcttgtcggcctcctcacataccctgatagttcagaccctatgtaatctttcaaaaatgattttccgttctcacgcataaccatgagcagcctccaggatgtcagggaagagatgaccacctagaccataacaaaaagggaccatacttctgaagactacataccattcctagccaaacttgggtcttcaggacacagccaagcagctgtctgggagaccctgccagccttagtcctgcaatgagggcttttggccctattgcatagagatggtcctgttacccaaaccccaattagttggacttgggtcaagggtcccctgtcagagaaaggagggactctaggaaaccaaaaagcacatttcccataatatcaagagcgtgtgctttctgaagcagctcagggcttcaggagtcatcagaggatgatttaggttgggcttggccctatggccttgccactgcatggaggaatgaagcccttgggttcccacagcaggtgtagaaactggagctgggtgaagggcacacttagacaacaaacttaatgaatcaggcatagaatgcaccccctaccccaggtcctatgtgagctagtgatctaatcacccagccttcagtctcaccatgggcactagttgcctttatccacaaggcacagactcttaagctcgggttcctgaggggaccaggagttggctccatggtccattggacttggcttgtgtatgagctcatgctgcctaggtggacacttgctttcctgagtttattcaatacggttggggtttcagatgcctggtagagatgggactcttcactctgaacatagattctaatcttcagaaggggtgaggtggcccttcccactgcagagtctgcccctccctcaaaggtcatcactagggtggatgttggtagcatctcactgtttccatccgtgccccccatatctgctgacaacacctgtgttccagccacagcctcttgcttctcctcctgccaaggacccctgccttcggctctcacttccagtctcttctccacacagcagctgcagtgatctttgtaaaaggtatgtcggctcttcaaagcacgcagtgggccatcctggtgtcattgatgaaatctccagcttctcctgggcttatgccctgtttcctctgctgcccatgcatctctgccctccagtgtgctacctttgcttttgggcgagcccacacttgggctttacctcttgctctcgccctgccccacaacacttccccgccattcagacccaagtatgttgactttcacctgaccctggaagaggttttatctgaacagtccagcccctctggtatggttgactgactttctccacagcactcacctctgctgggaattctgctcagtgattggcttgttcgctactgtcttctcatggctctcatcccatggcattctgaacgctagctctctgcagtgctcgtactcgcctgcatcccagctctggaaagcatttgtggagggatgatgtgatcctcatggggaagaaccaagccgtctctctctgggattgccgtggatggtagaggccatgctgcctcacaggaggctgaagagacttgtcacagcctttctggcaagcaacttggtggcttgggtcagggatcttgaaacagtttccagaaattagtccaaactgattttccttccaagagcctagataagcctgaagaaagtgcagggagatccagtaactaactcagatgaaggtaagcgagcacacgcaaatgcttacacatgtatgcacatgcatagtaaggagagttgtgaaagtgtgcccaggtctgcatgataagaaagaagcttacaataaaattttgagtgataaaagacaaaacaaagtcttataggctaagtgccagtcagtgttcccacagatgctgtgtcagactcagcttctagctagacttctgtgagatgctgtgagatgctgaccatcctcgccttcactttacctggcagggaaggagactcaagagacaaggacaccagcaaaggagctatactttgcaaaccgcaatgtcaggacacaggccagtactctccttccaccaactctgcttaatctgtgttccatttagaaaaaaaaagcacatttctccaaagaggaataagtaaaattcaaataatcaagatattaaaacaatggagagaggctttcctgtataatttcctgtgttaatgtccatctttgtaataagtgcatactatttttatatgaaattttgagttgtacaagaaatgaactatcaagttaagtgtggggaggtcttgtctgtaattccagcactttgaaaactgaggcaggaggatcgtgagtttgagattaatatattctacatggtaagggcctgcctcaaaatgagagagagggagagattgtatataagttcaccttattgatttagaagagaaatatttccttttatttattactagtgtctatgtgcacacgtctgtatgcacacatgcgcgcacgaacacacacacacagatccactccacaatgaaaagagaagctcactaatgtgtgctgtcaacaagtcaaaaaggaaatgactggggactgtcctgagggagcctatggaagacataagacaggctctagcatgtcctgcatggtgttcttgtgactcagagaaaggctgggccaaggagatagctcaagtcaagacacttgctctcaagcctgactaccagggtttaattcctggaccccacagagtggaaggactgaatggatactcacagattgtcctttggcctccacacacatcctgtggtatgtgtgtgcatgcacgcaacacacacacacacacacacacaaatgaatataatttaaaacttaccacttcttcaaaaataacatatgatcataaatacaatgctaataaaattaatacaagatttttctcaaaattattcttaaattatatttgaaaaatcaattagaaatagtaaggaataaagtcctggcaataaggagttccatggtttctgtgcagtgaggaactgcatggtttctgtgcaggtgtagattctacgtgtggttctgtgcaaagaacagccatgaggcatccaggaacagacttgagaacatatgataggatttcggttaggggaaagatggggcatttaaaacttccattatataatatttgactttctgattcagccgtcattgatggctaaatctttcgtcaatgtagatttgatattaaggcacagctgtgagggaagagaacggcttcgcccttcaacagaaacatcaagtgtcacggcaccgttctcttgaatgtttttctggtgatcgccagtgcttgtctgatgtctaacatgcttatgtatgtgtgctgtgtggtggatgtgatgtgatgtgatgtgatgtgatgtgatgtgatgtgatgtgtgtctgtgtgtctatgtatatgtgtgtgtctgtgagtgttactgtgtgcgtttgtgtgtgtgtgtctctgtgtgtgtctgtccatatgcatccttttgctatctcacttttctgcagcttttactggggcctctttgacatttgatcttttttaatttttttctttattttttttattcttgagttcttattatccaccaagctttaggaacttcttgtaaagtttttgctggaatattgatcgaaaacccatttgacttttggaggctatggagggaaggttcacctctgaactatagtcctcttaattagcgatcaatgactcagactctctcctaaaaacacctttaaagtctcttttaacaaattcatatacaggtctgcatcacctttttttggtgtatttctaggttaagtattatttgggttggtattggagatgggaagacatttctttctttcttttttttttgtttttgtttttgtttttgttttgtttttcgagcctctgcctcccgagtgctgggattaaaggcgtgcaccaccacacccagctgggaagacatttctaagtggccacccaataggaaaaggacaacacagcgggaagggtcaatatgattcctagcatgctaaaagtcatcaggcaaaaacaaattaacgcaaaagtccccccattgccacccttccctgagtacaataaacgcgtagagctacctctgggtgagaacggacctctcagcttctgctggcggatcgctcagggatggtgctgggatccatggtgccactgccctgtatgcccacagagggatcgtgctgggatccatggtgccactgccctgtatgcccacagagggatcatgctgggatccatggtgccactgccctgtatgcccacacagggatcatgctgggatccatggtgccattgccctgtatgcccacagagggatcatgctgggatccatggtgccactgccctgtatgcccacagagggatcatgcagggatccatggtgccactgccctatatgcccacagaggcaatcagcacacagaggcttcttgttcttggggaagctgctggctgtgccctatgggcgctgttcagtgtcaagatcaagaagcagagacccttaggagaaggtgaaaaataaaacaagtcacggagctgaatagggttttcggtttgtttgcttttgtttttgtttttttaaaaaaatatttatttattttatttctatgagtacactgtcactctcttcagacaaaccagaagagggcatttggttgtgagccaccgtgtggctcctgggaattgaactcagacctctggaagagcagtcagtgctcttaattgctgagctatctctccagcccctgaataggcttttcatttggttgattttgattttggtttttttaattttttttaatttttttagaaccaggaacctctaccttacaacaaacaaacctccaaattatacaattttaaaaacaaaagcaaatcacaaagtctatagttgcatagactatagagtcatttttgtgacagtctcgaacacaaagcaaaagactaatactgctgtgacaacagggacatgccaatgatgcaggaaaccatgcatggtagaacatccaccagctttaggataacggtcactcctgtggagaagcagaggacaagataatgatcgagcgaggttgtgtcctttgtatgaataacacaaagaggacagaggacgggtcagggaagaaaaccgagcaaaatgaagtatcagtgtccattatagtcgtgcagctgcatcgttgctgtgatttttgttttcacatgtttaaattttctgcagcccgtgaggtggtgcagcaggtaaaggtgctcacagcgcaaacctggcagtctgaactcaggacccacatggagggaggaaagaaccaacccctcggcgttgtctccaggtctctgtgtgcctgcttacacacacacaccatgccacacatggtagtagcaaatacaatgaaaaagccctgaaacgtaccactgatagtgagcaagtttcaacacttacacatttctgtataaaggactggtggacagacagtaaactgagtagatagatcaacgaccctctgtgcatagcgtaccataaaccaaggaaagatgcaaagctaaattgagaaaatgtttacaacataggatagaatgctgtatatatcaaatatatgtgtcttttatatatatatatatatatatatatatatatatatatatatatatatacatgtatataaaaacctctggtgtattataaggaagccaaatcgtaacattagaaactgtggttaataatataagtcatttataaatcataaaaaaataaattaaaactgtcttatttatcactttttatttaacaggtaggcaaagatggctttttttctttttctttttctttttctttttctttttctttttctttttctttttctttttccattggcaaggaaatgaaaaatagtgttttcttcagttctgagaacgtaaatcaatcttactatcacagaccagaagcttaaaaaaccatgtgcctatatttgatattgaattctacttataaaatcatagctttaaaaatatcacacaagggcaagtgagatgataaatgggtgaagggggcttgtgtccaaatgggatggtatgagtttgatccctgggacccacatggtaaaaggagagaaccaactcctaccagttgtcctctgacctgcacacacagaccatggtgtgtgggaaacacacgcacacatcacctatctatccatccatccatccatccaaccgtctgtaagtataattccaattcttttaaatgcacgaactgctcagtattttacaagtttgttcataataaatttatttataatcaccaaaatttgaaagtaacttatttgaccaatagtggttatataaattaatggtaaatatgtagagtagcagttagaaaactcccatcaaaattatgcttacttgcttataaattaaattttacttaattatttaataaatataaataaattatatttacttataaatgtaattcatggtgtagtgttcatcaagttattaaacaagataaacagtctggatattttgtttgtgggtatatgtgacagccctgtttaggctagtggtaactatttataatcattttccattgctgtagctatttttatttactgtgctctcagttttagcttattggttttttggtggagacaaggtctcatgtagctcaggttggaccttaaactcctatgcctctatgcccctgcaattctgcctgcaggagtttaaccttaaccaaaattagtctaaggatttagccagaagacctcaagccaagccttttatacacatgtctggggtgcaaaaagtgttcgaagtaaactggtatgtaagagtaaattcatgtagcagaggaagagtttgaacctctgaccttcttgacttcatccccccaccctgcccctccccccccccacacacacacagctgcagcatcacaagcctgtgtgctgaaggtggaacccaggctttgtgtacactaggttagaacttccaacagagccacagcctcggcctgctgctggggttttaggggattttcctttttgaatgtgtgtaatctccaaattattcactgtctacctatggcccagcttagcaaaaagaaaaagaaaaaaaagtgaaatagaaaggtaaacagacttagaaatggatagaagctgtgaggggccacctggtgacttattggaggatgctcgatgcttatgaccctgtgattccacttgcaggaatttaaccttgacaaattagcggacaggtttattcagaattaagacctggacgtttacacacacatctagggtgcataacgctttggaagtaaaactagtatgtagtaaaagggacaggcaatactaagctcaaatgatagaggcttgataggcagacaagcagtaaaggagacaaagcagataccagcaggaaaagacaaccgtgatgtgctctttcaaaagcaggtcgaaaaaacaggatgtagataatgatcctttttttttttcttttttaaactaaaatagtcttggaaaattacacaccagcgttaacaatggctgcctctgaatgatggtgttggggataatttttatctcccatgttattttctgaatttcctgtggtaaaaacaaatcactgcgtgagagagaaaggacattgatttgattcgtaataggtttcattccgcacgagtggatggagctggccaggggcagcgtgtcaccttcctcctgtcccgctgcccttctcagatgggttcacgaccacataccctgctttgaacatttgagtgattgcctggttttctttgttttgcttctttttgcaagaggtatttaggaaggttttagcagccctggcagaggtaggcactcttctaatgttagcagtttgattcgatccatagatttccacagagttcctttacatcttcagatatgtacagacgcccctttcggtccttttacctatcttgattgtgtaatgaaaccacccgggaatttcctctgctttacagtaatgtattccggatgtgtttccttcctagttgccatctctcttactacacagctaactttcacccatgcctttattacttagctacaggttgcaattctataggctatccctgaatatgttttgttctggatagccccaaaggatgtcagctgaaaactaaaaaattgcctttcagccattccttggggctccctcccagaagcaaacaacggtcaataagtttttttcttttgtttatttgtttgttgtttgttttgactttttgagggtttttctgggtagccctggctatcctagaactcaccaggttagcctgaaactcagagatcctcctgcctctgcctcctgagtgctgctgggattgaaggcaaaaaaaagctcccccgtggcccccaagccactaaaccatgtacctgcttttgctacaattaaagcttcagtgagtctgggggctggggagatcacttagtcactaaagtgctcggtgtacaagcgtaaggacttgagttcgatcccccaagccccgagctgtgtaaaaaaagccaggtatggtggcaaatgctcttaatcatagcactgggaagacaaacaggtacctggggcttgctggccagtcagcctagcctgattggtgagtgtacccaggatacccaaagtgaatagctcttgaggaatgacagctaaggtaaccctctggcctctatattcatacacatgaactcacagagaataaacaaatcagcatggactccatcatttcactaaccataaaggcccggaaggcctgagccctgctgcctctttccgtgcctgccatcacccaagccctctcctcccccttccctccccagctcttccgttttcatcggtttgcttttctactaagtgactgattttatggtttaaagtaacacatttaaacgctgacgctttcagtccacttggtctccactttgagctgtacatcctgtgttttgctatgctgctattataagtttattatcatatttatactataacttaccacactattacatgcaatatatataaagcactgtcttataacactcatatcctgttctgtgctcttcttagcttcactgtgcctcatcagcgaagttactactaaaataaattaactaaagagcaaccattatgataatacgactaggtaatgtttttatcctttcaagtagaatcattagacacacacaaaggctttatggtacagtgtcagtgacannnnnnnnnnnnnnnnnnnngtcctggtcctgagcaccacactcccagacttccttgctacatcctttgcagcttttttccccttgtgaacgcatgtgtacaagaagagctacccctggctttttggtgcgatgtggaatgtcttcatggagacaaatgagcatgcttaattgtactacagttatgccttcagtgacaagtaaagtcacttggtcaggcatgtgagcttgcgtgtgtgtaatcccaggacttagaaggctgaggtagaaggattgatagctaggctagtctgcaatactgagtgagactttgtctgaataaataaataaataaataaataaataaataaataaataaacaattaaaacaagactgtaacgatgaatacactgtgcaacctcccccacataaacacttctatcaccccaaaagtttcccttaggactttcccattcagtccctctcaccatccctccgtgccattcactgaccttccacacccagcacgtcatatgtgtgtgtgtgtgtgtgtgtgtgtgtgagagagagagagagagagacagagagagacagagagagagagacagagagagagacagagagagagacagacagagagagagagacagagacagagagagacagagagagagacagagagagagacagacagagagagagagagacagagagagagagagacagagagagagagagagacagagacagacagacagacagagagacagagagagagagacagagagagagacagagacagagagagagagacagagagagagagacagagagagagagacagagagagagagacagagagagagacagagagagagagacagagagagagagacagagagagagagagagggcaagttttctcatgtatccagccttgtctcatagcacaatgctcttaagactcagctgtgttgctggaggggtcacctgctcatcacatcctatttttcaatctgtttacagttaatggacatttttttgtttgtgttgaaagctggcttgtaacgctgctatgactgtacatggccaagggtctctgtattcactgtctttcatttctctttggtaactggaagtccgacaccaaacttcatccttcatagatggtgctgtcagtgttccatctgaaaagacatacccagtccggtgtggtcgtgcatgcctgtaatccaagcactagggagatggaggctcaacagtcgggagttctaggtctgatttagtctcatgagatcctgtctcatgaagaagataaacagataaataggtaatttattaccagtgagaggtaaacataaaagaatgacatgtattcatgaagatgtcataatgaaactccctattttatacagtaaaatttttaataaaaaaaaaaaaatacttgctttaaaaaagacattaccaagcctgaagagcggcaggcttagtgggtaaaggtgctcacagatgatctgagttctatccctgggacctacattatggaaagagagcattgactccagggttgtcctctgacctttgcacagatgccatgtgtgcaaatctatgtgcacacatgcatgcccaaacacacacacacacaaattcacacacactcagagacacatgcatgcgtatccatacacacatgcacacttatacatacagatgtatacatgcaaataggtatatatacacatagctatatgctcaatacacatacacacctacaggcaacacacacaatacatgtaattaaaaaaaatttaaagtcatagccaaacccaaggccacctgatttctcccatgttgtcttctagaagttttacagttttgagttttataagtatagtttcatgatcatgattcacttcatgatctggcttgagttgtttttgtgggagttgtttttgtcaagatgcgatgtgtttttcctttgacatgtggtacccaatgatcccacacatctgttaaagagattaacctatggcctagtgacttgccttggtcatttgtcaatgagtggtagaccatagttacaaaaatgcacttctgggctctttatggtattcttatgctcgttctttcatactgccccttcctgtcttgagagtaaggtacacattccggtaggatgagtctcaactttgctcttttcctgtagaacagtattggctcttctgagcatgtctctccgtaaacacttgagaatcaccttgttaagtcacaaaacaactggctgcctgggctccttgttgcatttcatctgtgctcatgaacccacagtaggcgattgcgtcttcatggtcctgaaccctaatagagctccatttctttagatctgctatcagggatgtatagtttccttcacatgctttcagtacacttttcattagatctatactcaaatatagatattttggtgttaatgtagagagagctttttaaaatttcagccccaattgctccttgcaagtgcataaaaacatatgtatgagttagattcaggaggatgtttcagaattttacacatttatatatttatatttattgacatttatttagtgtgtatgcatgtgtatgtgtgcaagtgcacacacattgcacacacactcagaggggggtcagaggacagcttccgtgttctgaggactgaatcagtttgtcagacttgatggtaagggcttcacccactgagccatctctccagatccttacatcctttggttattctttgggatctctttatgcaaagaaccaagctatccatgagtaaagatattctctattccctttcaaccttatgctgcttgctctcctctcttcctttattgttaggactgctaaaacgatgttggatcagggtggggcgagtagacatccttctgcctcaagattagttttttgcgttgatttcgttttctatttatattttagatcacgagttccaactccatccatactatccacatctatcttattttttcagccatttattttcagttttcaagactgttcttttcatgcttatattggagaaaggtaagcagccgagaaggaatgagataactgcacaggaaagtatcctgcgaactggaaagtgccacagaggtacacgctggtccagagtaattgtttcccctatcaataaactatgcaggaaacatagcaccatacaagaaatatttgtatggaggacagaaacagggcatttcacttatggacaagaggataattggcattgtttacggcaaactcaaagaaagaactgtgggatgactggtccctattacaatgcatactctggaagcaaaggcaaacaaaaccatctaggtgatgtagtgcatgccgtccgatcacattctaaaacacagatcctggaccccacctcacctgttgaagaactgttaggatgggactcggggtcagctgcttactgcacaaaaccaggcttcagaatcctttgccacacaaagaacaggctccattaagggggaatgcactccagatttaacgacacagtgaacaattaaaagttacaagagagctgggtgaggtagcgcacagctttaatcccagcactcgggaggcagaggcaggcggatctctgagttcaaggccagcctggtttgcagcagtgtgagttccaggacatccagggctacacagagaaattctgtctcaaaaaaaaaaaattacaagaaactgaacactgaagagtacattacaaacccggagtcattaaagcaagacatgaagttctatgttgacactagagcaggtcattaacatgtttccatggtcactaatggggagtttaaaaatatacatttccatgagatctccctccaaaaagacttttggttcacctgaaggaattttatttgtgtgtgtaaaacccagtgtgtgtagggcttctccaaggcttcagggtgacacatagttgatgcaccataaaagggtatgccttgtactctgagcagcctcacaagaaggtcaccttccctgctgaggttctgctcggaaccctcaaactatttatcatcagaaaatcttctctaccagatttaccgcattagggtgtgagagcatttccatagcaggaaagatctggttttataaaactgaaatagccacaggagtgcttcctcctactcactgtgcctcagccaagccacacatgcccaggggtcgtcacttgctcagctacatgtttcaaagccacttcttcctaacaagcccattgctcgtgcagggaaaatagacaactccagagctaagtaggatcagacatggtgtcttagggttactattgtatgatgagacaccatgaccaaagcagcttgggaggaaggcgttgacttacacctggagacaggagctgatgcagaggccatggaggagagttatttattagcttgttcctcatggtttgctcagcccacctccgtgtagaacccaggaccacagcccacaggtggtactacacacaatggtgtggaccctccacccaccaatcactgactgcaaaaatgccctacacacttgcctacagcctgatcttaggaaaatattttcatagttgaagttccctcctcttaaataactttagcttgtgtcacgttagcacaaaagtagccagtacacatggtgaatccttggatgggagatggcttgggactatcagaagtgatcacctctctaaaaaatatttgtttgtttgtttgcttgcttgtgccctgtctgtgcaccacaggtgagggtctcggataccctagagttataggttgctatgagaggctatatagttgctggaaatcaaaccagagtgctctggaagagcagccagtgctttcaacagctgagtcatagctccaactccaaatgaccaatctttaaaatatatttcacacaacttggactgtattcccttaaataattatgatacacactatacaggttaatggaaaaccctcattttctgaacacctttccttcatcaaatgtccttaggaaaatacttgcctatggttagattgattgaccgtctttctggggtgacttttcttctctcgggccccacttaacaagtgtgaaatgcatgatgaaatcatatttatagcttttctatctgtcaaggaaaaaaatccgattaaagttggcaagaacattttgatggatgtgtgggacagaccacctgaactttgacccactttagcatcactcctttggtgtgcctcctatacagcacacatcaccttaaataacatctgtaccaggagaaaatgcacctgaatcaaatggagcctgtggcttttggtccatgaacaaggaagcaaagtccaaaatatagaaaattctataggatttgtagtttacaaatcaaggaacatggaacttgtcagagttggggcaggggaatagtaatcatatgttaagtatgattgtgttggaatcccaagggcaaatctagcaagaagccagcatgagataagtatctgatgattattgatgaacttctgctgtgtaagatataacactttgttcctagagctggaatgtttaagaccaagtgaacaaaagattatagagttctgagagccatggctggggctgcttcaagttcaggtgtggatggaatgatacagagttgcaactgtgttgaaggctgggcttgctagtccctgactacacggtggtagaaagatgtctgatgtccttaactgccatctgcagaaggggactagtaacacttacttctcatggtactgaagaaactgtaaccattggttcttctggtatctagcctgacagcacagtgcctattagatgtttaggtgagctaggcactgttctaagatgtgctagtaatgagtaacactaattatattaatacaatcaatataatactaatttataacaccctggggacagaaataatcactacttcaattaacacactaaaatcctaagcaactcactgaagggcaaacaattatatcctgtactcttcctccctccctccctccctccctccctccctccctccctccttccctccctcccttccttccttccttcctttcttccttcttccctatgctgtgtggtccccaaaacagtgttctgtgggtggagtatcaggatacgtgcaaacagcacctaagccttgctactccaaagcatgaatcagagtcagacagacctgaagccatatactataccccagcaatgacttaatcgatgatacctgctttcaaccaggggtcccctgtttctagattaacaagcatggctttctaggttagtagtgccaggttaggtacacaaatgctcactgctctgctgggtccaaggatctccctggccattgtcttttagcccactaccaaaccttcaggttcgatataccaaagctcatcccccaaagacaagacagacaaatccaataaacctcagaaccaccttggaaatgataaagtcccctgaataggaaggaccatgaatcccacaggttgctcaccagttcctccgcacccagaaacaggctctcacctgtgttaatccaaaatataaaagaaacaaaagcagaacaaaatgtttatttagtgtcccatttgttccttgattcttccttgtcttcccattgtgggggcctcttggcaatgtttgttaattatgtgcaggttgttggcctttgactttaaacctaaatatctgctctctatgtatcaacttgcgcaaacatctgtgcactgagcctaggtgctcaccctggagctcagcagggtcaggacaactattctgcgcagggagcagtgttcacacaattgtctccatattcgctattttacacaagtagacatagtcaattgttgctggaaagcgtaattaaaatatatttgtgaccagctgaaaatggactgtggagacgagccaaatagacaaggtagaattgaaatttttcagagctctaagaccctatccaagatgggaagtcaattatttagctttctcaaccatattcgagggcacctttctctgagggttttgtttatgatgctaagaatggacccatcccatcccatcaaccaggagacaaactcagggaaatgaaatgatttgcccatggttgcaaagccagtaggcaggttgctctgagctctgatcactgaacccctgaccaccatggctggaacaacggggagaaagaagaggcttagaaagcttggtaggcaggtgacatcccatgtaggggaaaaggcagcgatccagacttgaggcttgtcctgccaaggatcacctgttttctgtgtgagctggccccagtgtcagagctgctgtctaccaccttccatgccacctgaaagcctccttggctctcttgcttcagatgcaaggactatcacaaccaagccatcgatgatatcacaaacatcaaaactggaggtgccgagcgctcttcaaccatgacacacacagcaggtgtcaataagggccttcaactctgattttaactgttgccttcaccacatcccctgtttggctgaggttggtttcaggctttgagtacctccccaggggcagacagggacctctcagctcttgtgagaatctgcatggaggtcaaatttatttctaatcaacaaatatctcacatcctcctttgggtaacccacaaaatgtacacacacatgtaaattcaaacgcccgcgtgcatgcacgcaaaggcagatttgtgctctcctcccatcctttcctggaagggaggccaatgtctactggatgaagccacgccccatggtataccaaggttctatgtgctccctcttctctggtggacttctgcactccctcacttcagccaccctgagactccagggttagccaaacctagtcacagggaatgttgtcacacagccttctgggtgactagggtgtagccagtcttcattgagaacttatgcattccctaaaaccctggaaagtcggttgttcatggactgtaaggagtggggtcatttcccataggagtcagacttcctgtcagggtctttaaatactcaagtgtgctgggtaagtagctgggtaagttttcccaggaagttcacatttgggggctgactagatggaaaatgagtgtggtcatctggacaggcgaaaaagagctcaagtccagagaaggttctcgaacctgctgctcactgacttatcattgagtctgggagatggggaggtcaggacatgcttgagacccaactacgtggtgtccatccgagaactatccttgtcccagctcctaagtaccactggggctaagctttgcttctgtacaagggtatgcacttactcttgaagtgctcatggaatataggcagtaaggaaacatgtatttattttgttgtctggatttgggtctttcccacatcttctaaaattcttaaccaaagaacaaacctgatcatagagtctatcagtttgtcctctgcatatagcattcatttaactctgactttaaagcatcttactagacatgctcacacaaaatctcgccattgacagaggagcctgtgggaccagggaggaagaggaacttcccagtgacatagtggcccactgacaacataacactaaaacccagaccaccagacatggggtcaggctcctgtccctgaaaactgagacctatgccaggtgatgtctgcgtcctaaacacagtcattttccctctctgggtcgctgagaaaaagatggatgccagcatagctctttcagcctcttctctcatgctctgatatgggaagctgcactgtcacatatttctaaccagaagggggttgggtgcagggacccagggtcttgaggtctcttgtcattgtttgctgtctgcttgcatacaggatggggctgctgagcagcaagaggcaggtcagtgagaagggcaagggctggagccccgtgaagatccgcacccaggacaaggctcccccacccctgccacccctggtgagtgatcagccccttccgggacagggtctaagtcacagggtgctccctgaagcggctgctttgggctcatatgtctccatgacggtttcgttccattccctgcctggtcacaaatctattagttcggggcaattggagtcatgcctggacccatgtcctgccctgtctgtcactgtgggcatcaccaagatcctaacagaggcctgatgggagccaagactgctggttccctttcctagacgaaccctggcctctcttctagctgtatcaaagcatcctagctgtatcaaagcatcatacagtactctgcacacgatgagatgtttattgagtggatgaatgaacgagaagatgggcaaattcaaacttagaccaagttattttcccaaagtgacacactaacaaacagaagcctagagcttaattttttaaaagccgtgggatgcatccgtactttagaaagatggaaattccatactatttcacttgccggagataattagagttacctctcctgagctcctgccccaaggccctttcttcatccatttggctcatggttctgggttacagcccatcatggatggccatgacacagtagcaagagcttattgtatctgccttcaccacagtaacacaatactgtgacccaggcaactcagagaggaaaggttacttgggcttcagttccagagggataacagttggtgagatttaaccacactgatgcagctcattatttctttgttttgccatggatcttaagggctactgtcatgatgaaaaaacacttcatgtgtgactattactataccaggcgtatcttcatgttatggcctggcacacatgtgcaggagtcttcccatgggatagacaccctgtggatatttattgagttttagggaaacacaattttccaatatctttctttgccaatgaatgcccgtccacaacttcttctttaatggtagagccaggattttgactgaggtgacagagctttttccctttgaagctaggcatggacatacatggtcagggcaaggatggcaggtggcctggggtgacagaggtactccaaggagctgatatagtgtatacagaatgtatctaagtatccctgtatgtggctaccctccttcctcagagtaggtacccacaggcaatctagtctcctggctctccagtgtcctctagttctacccttgctatagactgctcactaactcagtgtgtttctgcccaaggttgtcttcaaccaccttgccccaccatctcctaaccaggacccagatgaaggtaagaaaagagcatgagagcacctgtctagggacatcatgtgttagaaccagagcagttgtggtgggccctgtatggctggaaagcagtgggggatgctgggagcttagaaggagaataagaaaggagttacaggagcatgtctggcacccaaggcctggcttggagactctagatcccaaactccaagggcagcaggactgctctgtccttccctctcaccatgtggaggatggacaccttcttgactccctctttccatagcccctggaaaccttccagccatctgtaccatctccttcattccatactccacagtgttctgatgggactatggtggtcccatgatgaatgagcctcctcttgggccgggactcaggcttttgagggcttcctggatgggatttgtttggagctggctaccaaatcatcccatatcacccatccatacaaatcattccttcattcactcacagacaatgtggagcaagagcactcaaaccactgtatcccaaagattgggtaagatgtcacagtgggtaatacacctctcctgtcccttgagagctaagcctgtcacctttatgagaaaagtgctagaacttgtcggtgttgtcatctgggagcccttacccagctaaggacaccatctttcccatcagataggtaacccttcactttctagcagggggtatccaatctttaaaatggaggctcaggggagggaaataactgactgcatttggcacaagggtttaagtctcaacactgtgagggactccgccattcatgctgagcctcctcccaccaagggaaggtcccagcctcagaccatgccactcatccatgacaatgttaggtcatctgtgagctacaagtctccaagagattctgccaggtattagggacccctggtgtcaaacaatgatcatctgaaaagtgtccagcatgctcctgcaccttctactgcctcaccggcttgtcaacatccttccaggggagtctcagagccaagaaggccaggtgctgaaagccagaggtgcccctgggaagctctggtaccaatgccatagagagggcggggctggagtggtcacatgacctttgggatagaggctgggaaatgatgctgaggggatacttcagaggcaagttggattcaggatcagctactggctcttagacttgggcctacagccctctaagggctggcaatggctgcctccatgtagctgctcccccaccctcaatctttgtctaggccttagttctgaaaggaagatgagccaggcaatgagggtcggcctattcctagagtggctgtgggtctggtgtcacttcctgagaatcccctcttcattgctgagagtatagcctcatgtggcttcctctcactaacgctcttaggacctggaagatggtttcccccagacctctacttcagttgtggaccccagtggtagccatctcttccttgttctttccagaggagcgttttgtggtggctctgtttgactatgccgctgtgaatgacagggaccttcaggtgctgaagggtgagaagctccaggtcttgaggaggtaaatttctagcatcctgtccccagtcatcaaggacctccccccattgtctacttccctagttcacccaccccatccctggggcacccctaaatggccttctctcttgccatttccctctcctgagttccggggttctcttaggcatgggtcattgtccttccctccaagtctttctggtaaggtggtttccacgtctggccttctggctgctgttaaaatctaacgagacacctccctggatcccacatagccactccactttggcttactctctgtgttctttctcagaacaccctccagtctgcttatgttctcccttcttccttcctccacccttcaggcccacaccatgcaacaccaaggtctgactttattcttaaaggtctgcagtgggtttgaattgaacgtgtaagtgagtgccctgatcttagattctacacagctttccagttcctcccttgtcaagccccctcctgggtttgttttcttagccaggtccaactcattcataacttttggacctgccccatccattgagacaggggccacttagtaaagggcatggtgatcaggttgtcaggctatacaagcaaatctacccttcctctgcactatgaccccttctgcctgtcacatggcccagtggatgggccactcccacggcacctccttatcaccaggctgtctgtctgtctctctctgtgttactgtctcttaccagattgggatctgttgtagggtgctgagagctgctcagtgtgtcttgtgtgagcctctgacatatttctgtctccccttcttcctctagcactggagactggtggttggccaggtcactcgtcacaggaagagaaggttatgtgcccagcaactttgtggccccagtagagactctggaagtagaaaagtaggtgaatagacttcgtcaagccagaggcggcagggctgctctcactgctctgggtacggcagggccagaaagtgagcttagtagtggctgttggtgagaggccaggaatggaaagttctggctctcttctaacactctgaatgatgccaagggagtctgtcttccctctgaaagaagagctactgattcctagcttctctagatgagactgcccacagtgtctggttccctccagaatccatagcaaagctctatgtcctgtgaccattccccaccactgccagagacaggctcagtcctcgaggcatcttcaactttctcatcaccagctctcacacaccagcaagctccaccgggggcattcccctactccttcacatagtgcagagacatgagtatgccccacctcatggtggtgacgttacctgcttccttacccttcccacgcaccatgggttttcccccagaaacatgttgtatcagttatttctttcatcactatttaaaatttatatagtttaaggaaggcttcattttggatcacggttagagagagtacatgatagcatgaaaggaaagatacaccctgctcacgatgttcatgatggtaggaatgtacagccaggcacctctcacagatcagtggaccaggaagcagcttgagcttcaccagggcagctgagctggcttgtcacctccagtgccactcccatggcttccaactagacctcatatctcgaaggttccacagcctcccacaagaacaccactagccagggaccacatcttcaaacatatacaaccctgcaaggagcattttatatctgtccacagcatgtgttgaaaagccccatgctaaagagaggtgaatcggaaggaatccaggcccagaaagtccctggcagtgacatcattggctcagacagcaaggaaactgaaaactcatgccaggagaagggtggtggaggatcaggagctatctcacagactagcagtgatgaaggttacctaactcatgttcttgcttcatcacattcatccaaaatgtgaacctagaagttgatgggatgaagtggggttgcagggactgaggggccatctgactgaacaggatgtgagggacatctcaggatcgacttaggggtatcaccaactctgaggctcacccactcttgctattttccagatggttcttcaggaccatcagccggaaggatgctgagaggcagttgctggctccgatgaacaaggccggctcctttctcatcagagagagtgagagcaataaaggttggttcaggagcctcgctggccccacttgccatgtgtgcacggtcctaggaagccctcagtgaggccttgatctggagtgccagggatacctgttccatggcttctgtcccatgtccctgcctgggagctgctttgaggctgtccacaccaggtattctcctggtcccaagactgacactactggatagcaggggtcgtggaaacacccaaatgctacagtggccacaaactggccacaaactagtgaactgaggcagatggggctgagaaaggaaagataccagatagccatcagtcccccagcacattttggaatcaaagagtcaagattggagaatctttaaaaagcatctcagtcagcaagtggcaggtcacaggaaagagcaagggctgtggcaacctcaaggtgcgatggacaggaaggcagcctcttggtgcacttttgcaagtagactgtgagagacagattagcaagaaagacacaagaggaaaaaggtcttaagatgcggactgctatgcctgcagagcatctgaaacaatgtgcaacagtatcaaggtcctcatacagaaaggtgtgcaggcctgacccctcgtggtggagagtgggactgctcctcaaacacgtgttcataggaagggtagggtgcctccttctcagtgcccctaagcctactgtagctaactcttctcctaatcttcatgcaatggccccatttcacaactaatttgaaaatgggagattctgtggcagccacagggctggacagaggcattttataaaggctcaggaagaagtttcttagcgggaaactcttcctctgtgccttgccacctgcttccttgtctatacaaaaatgtcaacacaaactgtaaagcacagtgtgactttggaaagacctctggtgagcatcttgcttccaggaaggacatttgcactggaggccctgagtctcccaaatcctgagtccctccaatcaaagatatttaagctccaagtccgctggagacctctcatttctgagtattctaggcatccccaagagaggacctatagatagctgagaaacggtcctgtctgctccagagttcctgattccctggcagtctagggacttggagggaagtctgggtcagacagccaatagggaacagggttaagacaaaaggaagggaatttatgctgagatggctgaggactgagtccagaatatggggaaccttcttcacatctcacaagtgccaactatggtcctgggtttgcattactgtgtctcactttgcatgtatctgttaaccctgtaggtgccttttccctgtccgtgaaagatatcaccacccagggggaggtggtcaagcactataagatccgatcactggacaatggaggctattacatctccccccggatcacctttcccaccctccaggccctggtgcagcactattcaagtaagaggcattgggaatccctggggtctctaccacatggccctaaactgtatgagtcaactggagggggggggttgtcctccaaaccagacttaaggatttgccaacttgcagcttaatgatttcaagatcagaggcctaatgcttggggtggggctattcggaatgtcgcaaagacctacagtctcagagagtgcagatcccagacatcaagtcccgcctgccaccgcaggagtgaggagacaagagacacagttctaggacagtgtggttcttaaggcacatctgctctagggaccaccaggaccctcttttcttccctgaaacagagaaaggggatggtttgtgtcagaagttgactctgccctgtgtgaacctggccccgaagaacctttgggcccaagatgaatgggaaatccccaggcagtctctcaagttggtccggaaacttgggtctgggcagtttggcgaagtctggatgggtgagttgtggcatccccaattccctctctctcctctctgctctgagcctggccatgggagggaggcagttccatacaggcacacacccctttcctgagaggcctatgaggcatagaggcagagctatatatgtctacacagatgagtttataaagcccagatgccaagggattcacatcattatcttgtcttccctgtagtggaagggactggaatccagctctcccgatttgtaagccagtccctcttccattctcagacagatgttgtctttgtggctgacttctgtgaacttgaccatttcactaggtccttttaactccagctctccagacacaagccatacatcagatattgggagtcaggagccaggagctccagggtctttgcaaacagaagtcacatttactggtgtgtgactgtggggtcctgaccccagtggccgtgccattctgtcatagctgctgcctgctgctgcttacttaaagcacccagatagggtgtaacataaggccctttgtcttgttctgctctggtccatgtctcaaatttccattctgatgcctcctggaacctcacacctttatccggagctgcagatctggtcctcaccaaggctcagcacccataggaagagcaagccccggccattgtcttacacactttagtgggtgtcatcccacaccccagactgcatgaaccccaacacatcctgaggctctgttgcggggttctcagagacaaactggcatcttatacaagatatgaactcccatcatgcccgcaggaactgcacgttccagcttgaaccttgggtccagatagagtgaggcttgaatctgtggtcaagggcattcttcaacatctgaatggctccttcactctcccgccctttcaggttattacaaaaataacatgaaggtggccatcaagaccctgaaggagggaaccatgtcaccggaagctttcctgggcgaggccaacgtgatgaaaaccctgcagcatgagaggctggttcgtctctacgctgtggtcaccagagagcccatttacatcgtcactgaatacatggccagaggtggggtcctctctctctctatgggacagagcttacagggcagaaacaagagtggagcatgctggcggatttgcctggccccaggggctcctataggggatctgtaagctttgttttacgagagggaggactgagaaagaaggtagaatggattttagagagctgtgttctcagctcaggggaatctcagccttccagagaccccccagttttgcttctgagttgtattttccactcttggagcaagccctgtgtttctggaacctcatttttgcttctggaatacacacatcatgctttgatccccagtatgattggcagagccttgcaaactaggaagagctgtagactgggcatccaaaggtggatctaataatcccagttccacctcttcccagtgacgggaacttttgcaaacctgtgaacatttcacagtgggggttgataaggcgaatgggcctgggcggcctctgcagtgcctccacagggagcagttggccaggcaccagacctggctccgacctaagggacctcaccctccatggccctgacatcacctttcctcctgtaggtcctcaatgttaccatgctaattgtaatagttgttaccaagaggggcggcatcaccggctatgctggtaacctgcctcctggctgcagttttcaagagcacctcccaggccgtgagctctgtggaagagccactttcattacttgccccagctctctcttctggtgttttcttgttaatgtttggtggggagggtgggagagggagtctgtctaggaggggagtagactaaggaagacacctgggaacgtcatgctggaaaagaacactagccttaggcccagagctggtctatcccagctctgctgactcaggagaccccagatgtgcccctgaatttatctgagaactaacttttaaaagtctgggagctagtgtttccctgaagcctgaggcacctcagctgtaggcagatcaccacccctacctcctcacatagacacagaccacgcaatcagagccaggctccatccagtcactttgcagttgctgtctttcttctcctaggatgcttgctggattttctgaagaccgatgaaggtagcaggttgtcccttccaaggctgattgacatgtcagcccaggttggtgagctctgaagcagagcgggagcctgaagggggggggcgccccactctgtgctttgtgactgtactgaattccctggtaggaggctgtgctcaactgtgaagggcagaaagcctgaagtagcgacctctaaatatataaacccctagagaacagatgagagactttactcactgatgtcctctgccctgatagcatggtagatgctgaagcttcatcacccacccttgacccttagccagcaagatgatggtgataaaaatcccacctcctttcctctagagacacatccctcccactcacctcaatgagaggctcccttggctgcaagggagtctgggaaatgtagttccaattctgggccgccatgatggagtagggtagttctatttattaggaaggtagagatggcagtggatgttggaaagctggagaataggaaagaattctgttttgaatgtaggcaggtatgctttgctctgacttccttctccaatgctctcatcctgtcctaagaccccctaaatcttggtattggcctggaactgacctcagcctgatgaggcatgagccacacagaatacaaggcacaaaactttctaggaccaccttctacacacacacacacacacacacacacacacacacacacacacacacacacacacatcactgtcctggattattggcctttggttccctctgaatccatccatgtgtagacctccccagcctctgctagaagagtgcagaattgagattgggcagtatctttatccccggggggattttagctgagggttctaactggcaggaagacacatctgggggccctgagtatgactgttgaaactggaactctcagcaagaaagctgtggtctgtggccagcctgcgagacacactgtcaacacacagagagctataaaggggagccttcccacccacactttaacccacttgcccactttaacttccgaccctgtcccacattatctgcagctgctatcagcccaggaactgaggtcacagtgtctttttccactggggtagcagagatctgttgatgcagctgttaggatggacacagaaacttaaccctggcgactggctttgagtcaggcattggatggacagaagctggtccgcctctgcagccacaagaatggtggtcctatacagtgcagactgccttggattcttcctgtctgcacatttccaaccagagtcccaggaccagcccttgtcggaggccacgtctaccaagacttttctggacaagagggaggggttgttggctctgctcttgagcagtttgctgctcatcaatggatgaacaagcctcattaatgtctttgggtacaaagcaccagggagaagatctagagagagtcctggctcccctttggctttgtagcatcttttctacagacgcagattcgcgtcttctatgtttgtgtaggttttgtttttttttccctaaagctgattcgtacgtgttagctaacagtgtgagcattgccagggctccctagatagaagctgtttagttagccctggctttccaacccgcagagtcccacactagcaaatgcatattgactgagtggtttcgcaaggggataaatgaggagactcatgcataaagcagggccctgtggaaacagatgcaggactggggcctggtgtgcagctcaataggagagaagttgatagtatatgtacctaagttcctgggcaagtaggatccatctagaagctggcatcctgcaagagcaagtgagagctgaagtcaccttttccatccatcagtgagtgactgaagacttaatggcctggtacaggtgcttgggacagacaaggctcctcttcagtgagagtctgctcctctggagcacctggggcaggggcaggggcaggggcaggggcaggggcaggggcagggcctcagctacagtcaccttattcaacactgaccctaaccttgggtcccagagatggcttctcgtgctctgggtaataactatgacctctcagggaagtgacccagcccattggacattggtgattccaaggcatggttggctcctctgagagaagtgtccactgagggagtagccctgcccttccgtgctatgccctgttcgtcctttctcctccctgtctcattagaggctatctacaaccccagccttctttgctattcccagtccacagaaccttggagacaattgtctgaaaaagggggacaggcctggggatgtcagcctagcttctctgctgccctgagtctgggttggtctcatgggaaggggtggataccttctctctcccctgggcagggcatgtgaagctggccttatgagctggtaggctccatccttgctgcccttcaccatgtgacctgtcccctcaggttgcagaggggatggcttacatagagcgcatgaattccatccaccgtgacctgcgggcagccaacatcctggtgtctgagacgttgtgctgcaaaatcgctgacttcggcttggccaggatcattgacagtgaatacactgcccaagagggtgagcagagtgtgtgagtgtacacacactcgcgcgcgcacgcacacacacacacacacacacacacacacacacacgaaagcctttgaacgtctcaactctctggagcccccttgaatgtctccttgctgttggagatgactagggagacccatggtccttgtgtttggtcctttcccacccagctcagcacttcctttccctagatgggagggggtggcagagaagcaactcaagccccttgggagtcttcattcagaatggccttggaatgctcagctatctcctccccatcctggagactccagtgcatataaatctagaaggatggaggagaagacctgcactttcttccccttgtttcaccctctgatccccagactaagttgagaaaatcctcctgtggaaggagggtgtcagggagcacaggttggaaaacacagctctaactaaagcatgagcatccaacccttgcacccgaagggttgcatggatgctcttctcttactgtgagtgaggaaaattgactttgcaggaggactctggtacattgatcaagcaagcagtactggtttagtgcattaatcagtggattcaggaggagagccacatcttaggggccgataaccccctcaggggacttccaactggctccccagacagtgaaaccatcaggggggaggtggccaatgccacctcagcctgaggttggctctcagtgccaaccaaggctgtagccatcacggtctgaactgagatgggccttgctatccctccacacagtggccctcagaggtgtctgtctgagtgtcaggtttgccttttgcaggaaagcacggactgaagcccgcccataccacggtccctgccgctggacaaggccgagtgagataggaaaggatgcttccatcccagatggacatgcacagggctggggacatagctcagtcagcagactgcctctctggcatgaagcccgtggtttcatattcagtggagtataaatggggcatgctggtgcatggctgtgatcccagcacagtggaaggtgatggcaggaggattaggagttcaaggttacccctggctacgtacgctctagttggaggccagtctgggatatacacaagactctgtctccaaaaaatcaaaatcaaacaaaacagtaagtcagatggaagcatatatgggtggtactggttttgttgttggttttgtttttgcttttttggtttgatttggtttggtttttggttttcaaagacaggctcctctatgtagcccttgctgtccttgaacttactctgtggaccaggttggccttgaactcagagatccaaatgcctctgcctcctaaatgctgggatcaaaggtgtgcaccacaccacccagggacatcaacactgtttttaagaactcctaggatagtagcaagtgactgtgtcttcctatatcctcatgtatccagtgtacacatcctgcaggccctccagtgggaacgggcagataggggcaggactctgtgggttgggggtagatggttggctgtccctggagctactgcactttcctggcaggggccaagttccccatcaagtggaccgccccggaggccatccacttcggggtgtttaccatcaaggctgatgtgtggtccttcggagtcttgctgatggagattgtcacctatgggcgcgttccctacccaggtaggcattgtccctgtccttcctaccatcctcctgggacatcctgatggtgactcgccaggctcactgactgtgggtatgtcacactggtgagagcagggtcctgtcacagggactgaagcccagccctgcattgtgggcttcctctccttctgcacactgctcagggccacaggaagagggagagggggaggaggaggagggggaggggagggagagggggacgtaatggatagggagagggagagggagagggagagggagagggagatggagattagggtggaattagatggcgtaagagacaggtgtaatggctcaagcttgtgattccagcccttgggaggctgagacagacagatctcaagttcaaggccagtctggcctatacaagaagacctgtgtgaaaagccaaagtagtactacgatcctggcacctatgtgaccttccagggttacactagccatagtgtatcagagcccactctttcccttctagtgccggtcagggcctagtctagtgccctcagggccagtgactgcactcctggagcaccaccagccctgaagctccctgtctgccctcctgtaggaatgagcaaccctgaggtcatccgtagcctggagcacggctaccgaatgccatgcccggagacatgtccaccggagttgtacaatgatatcatcactgagtgctggcggggccggccagaggagcggcctacctttgagttcctgcagtcggtgttggaggacttctacacagccacggagggccaatatgagctgcagccctagcaaccaatggtctcttcagggctcccagcctgagcctccttctggactctgactttgggttaatatgttcacacttagctcttcttccaggtaggttgcagaatcagggaagaatggtgtgcctgcttctcaagtgagggagccaggagacaaagatggcttcatggtgaggcatgagctctcaaggcacaacctcggtccacctttcactggctgtgtgcctttggccaagttactttgctgctctgtgtcgtctcttccttgaatgtaaaatgagcaaggattgtgttagaacttacctccagttgtgttcagaccccgatagtcccgaaatcagtctgaccagttagcgatggacaggatgtcaggctgtcataacccagagtgcaatcagagctcccatttctctcaccttttcagtctcatcagcaagtgcctccctgtctgctgcttcagaactatgggtcaatcctccaggtcccctggctgtgtgccccctacccatccctgcatgcacactttgggacttttctataataaagtcatgagaattgtacctttcccctggtctttaccagtgacatgaacagatgtggcacacgagatgtgtgtaggaggtggggagcaccttgccccaaccctaccccattcctcagcaaaggacactgggtgtgactgacactgtctttcctggccagcaggtggcgatctcaccccacaaacctgtatctgggactccatggacgcaagcaccttgagttccaagtttccctagaacatggacagaaagccatgagatggggcggtgatctccccaagtgtggaggctctctcgcctgtttttctgtctcccattcatcctgttttgtttatataggtggggtggggggataagtttatagaaaaataagtagaaagggtccagtctccataaaccctcaacccttttagatgtcagcaccttgcaatagtgagcccacttgctcctccagaggggctgggatcaacacacttcacacttgggttcacaccctacctatactccgtgttccaccaaagcacaagatgatggatccatcaagcccaaattatacagaatagtcctcctggcctcagaatcccccagtgtctcccctcatgccaaggttacaggcacccacgctcatgatggcattttacatgagcactgaggattcagatacaagtcctcatgtgcgccgggcaagcattccccctaagccctatccacaacccgtggctttgtatttcaatgttcccagctggcactgatgactgcccaaggatccggattttggcagctgagctgagtgagctactgagggatattatttctcaggaaaactggctctgtgtgacttccccatggctctccccaggtctgctgtagaggtgacatcaaaggctgacttactcctctcagggaggagggcctttctccttccaggtgatgctggaacccacaaggggtcgcaatttgcccgcactgactgaaggaagttccctatgttcacaaatttattcaggacaaagatccttccatatcccaatccgaaggtcacgtaggagagtgggtgagggatatgtaaagaaaaagagggaagcagagaaaataggaatgataggggaagtggctgtggagtgtccgtgttctcccaacacagtggtggccgtgtgagccactggcaaggggactacgtatgaaacatctgattatatgatgattgccccttgcccagagcttgtgaaggatacagactgagcctggggaccctaggaccattcttacctgagacaggcatttgttttcctagaacctgggtacatcacctacaaaatgggtgagagtgggtttctgggatcaggtaaaccctgagttcaggacaaagcacttcctcccacaggctatgtggtacaacaattcacacctctgggcctcagtttccccatttgggaaatgggcccacagcaggtgtgtcttgttctgagccttcatctcaaagtgataaagagacagagagacagtgcaggaggcagcccaggaaacaggagagacacacagacctcccacctggtcattggcataacccacaaccaacttgagtcagagttgaacatcattaaagaaaggttgacactccccccccccccacacactgtttagaatattcaaactatgcaaatgggacctttataaacagtcattgttgagtatggagtgccagtttatgcaaccatgggaagcactcatgctacagatgaagactctgaggcccagaaaggcgaagtgaacttaccatgcagctggtaagaggcatccatctttggagaaagactctgatgatgtcagggttgggaagctcaccgtgtgctggggtgggagaggaggaggtaggcctcctctggtctcacacagtccttgctgatttgtcggtcttccacggctgccttgtaaaggatatcgggaggaatcacagtcccgctccaaaatgctttctggaaacctcttgtctattccagcatgagcttggacctctcccaagtgggaaacggaggtcaaaggaggtgttttcctggggacctggggtgggtggcgtgggggacactccttggcctcagcttcttgatgacagatggtggcatgctctggggtcttcagaaagccggaatgtgatgagatagacatgaatgaactctccattcagaccggctgctcactgagaagtcctggtccctaggcagccactaggtgcttctctgaggagcaagagcacaggatggtgtctttaaagcagccacgcctacaaaaagagctgcatttgacagcacggcactacccagtttgtagggccttcccgtgctgagtctggccttggatgtctttacttatctagacagcagacaggaagagacacccagactatagtagttcactactgtacccctaggaaacgggatggggacctttacccccaacaccagccgggtgcccagcactgtagaaagaagccctggggggcagaggacaacattcatatgagaaatgggcaacaggggcatcaagcaaaccacaggccagcaagtggactgagggatcataaaaaaatgacaggaaggaaccaagaaagggagaggcaggccctgctgctggatggggtcccagctgtccctgtcttgaagaagtcactatcccgtgattcatagagtcacatctctgcctgatatcccttgagagtatccaggacactctgcccagttaaacttgagggtgcgtaagccatatagctgtcatggacagcagagactttattacctcctgaggtcacacttaaccctgagaagaaacatccaggaataagacagggcctctcacaaggggaccatctctcttcattccatgaagcaagaatactgtgctcccagacaagaatgctgggacattccccaggccatcagtgccacctgtgtgtcactgtgcctaggcttcagacatgttccccacaggcacttccatggggtggggtggggggcgtaggctgtagtcctgttctcactttgtcagtggacaagccaagaatctcaaggtgggcttcctgacagtccttcttgctgggaccctgacaggtgggcgaagtctttccctgactctgccgtgcctttcccagctagtatgtccccggagaagtggaaccagataacacagaaaactgtagcctggtcagagggtggcctcagaattcccagggcctgacctcagcccttgtctaccttgccacacgtgggtcaagtcatggaggatctagctgtgaaggagccaacccttggctctgccttagctgggctggggaactctggtcaattgcttttcttctccatctcacggggatggagatgtgtaatgttctgaaatctttaggcacaaggttctacatgcagctggatgtcaatacacacacattcccttcgcttggacacacttgataatggaaagttaggctcaccttccctggagtcacgggggtgagggtggggtggaggcctaacttgtcagattttagctccccaaccctcccaatgtgttctccctcctgtccagcttgcaccttggcctgtggacccaccaggtctgtgtaggctacacaagctgatggaggctgacaggagccagtctcagggctgggggaagattcctgaggactgatgaggtggaaggaacgctgcccagcagctgacagggataagggaggtaggagggcgaagagaatacactatctcagactgctgccttcgagaagggccagggtaccatctagggccatctctgttggagcccttgccagctccaaggtcagtctgctcttgtggttaaaattagcctcctgatcattgccccggactgtgagtggccttttcccatgaacctccaggacttggtatgtcaagacccagctcggctttgtgccctctgttctccagagagcaggagactgactacctatgagattgttctggaggtgatgatggcagggcgcaggtgtgtgcaggcatgtatgcaggctgcgtgtgtgcatgtgccagccaacccaggagacccaggcagggagtgatggtacaatcctgttagcttattagtatcactcctccattacactacgtctcactcaactcccagattcccgggtgacagctgatggtgtttctcaggatatttctggccccagtgctgcacagtagccccacccccacccctactcccacatgccaggcggtgtttgcatgtgtctgagtaagtaagccaggaagagcagaaggcatctttgactaggctctgccctctggtaagttaggcagtgtctatttctcactacgaccccagcccatggcgcaggaaaggctccactgtgtttgcactatacaactgaatggcggaggagccagtgttttactctttgcccacggtccatagataaggactcattaaatccgaataacccagggaccagggaagcagggttcagtacaggctggagtgcaaggaaaactaagacagagaagaatctcaatattcaccaatccaggccggacatgcccaggctccagcctgcttgccatgtggccttctgcaaggcagacccaagtttagcttccctgtggtaaatgcgttctctaacagaagccagaggggtgtgatgaagcctctgaagtcctcggtaccacagcatgcagccctgtaaggtggctgctagggttttacagattgagttggagtggggggccgtggctatgaattaaacagcctgaagcagataccctgcctgtgagtcctgctggcgactctgagtgacctctgatcaaagttaaggtaagtgtcagcagggaagaaaatatttgcagtgcctgtataacaaaggattaccgcaaagaaaacccaagggtggggtgggggcttcctgttcctaaacaccctggagacaaggggtagataagagtagagcagtgtcgggagagcccctcacagcctggaaacagagacagtgctcggtgcacaacgcaaaggaaacgcaaaataagcacaggtgcatcaggtcctgtcacgggacagcaaggtggcatgcgtgccaggacaatacctacagaagatgcagggacccactggtgtcataaggtgatgtgtgtgctctgtgcatgcttgtcacacatgcacacactcatgtgcacacacatagacacatgtgcatgcacattcatgcacacacacatgcagtcaagtgcacacgtgtgcacacacaaagacacatgcatgcacaaagacacattcatgcacacacacacacacacgcacgcactcaagtgcacacatgtgcacacacacatgtacacacacagacacacgcatgcacacagacacatgcatgaacattcatgcacgtgtgtgcacacacactcaagtgcacagtgcacacacacatgtgcacacacagacacatgtgcaagcacacagacacatgcatgcacattcatgcatacacacacacacacctgtggggttatttcttgcacatctggaaagctacccttcagcaaagcatacactttctccgaagacagacaaaggcctgtcttcagaacctcgacattcaggcatgtaaaggcttcagggatgttaactgactgctttttgatgagtgggctcttcaataggtcaggacaggaagatatgagccagaaacacagggtgggaagcagaaaccatacctggactgagtccatgcacaactgtatctgttagacgcatacttttgtaagcaagcaatggaggatcacatggtacccacccaagacaatctcctgacctctggagaggggtgggggtgggggctgcctgggctgccctgggagcgaaggtgctgttagctcttctctggatacactaatgagtttgaaggaagaaaaggccaggcctgtgggtcgtggcggctgatctgtacagtcttgcctagtggcaagaaatggacgatgtgacccccacagggttgggtcccaccctggagctcagtaccaggccttatgcaccagctgggctccaccccactccagtccatttctgctgcatttgccctgtattatctgtgttatcagttctctgttgtgtcactcgtccaataagggggaagcaggtgggggttccagggagctcgtccaccagccccaggcagtgcgtagtggctgaggccagcgtggggagggtactgtttgaaggcacccaccaaacccagcacagctcaaagacagctgtcatgttgtcccttccctctcctttcctacgctccaggcattgaatgtggccctactgtgcaccaagtactgactgaagtagtatcatctttatagagtcctatcaggtcaattccagagtgctccttcacagatgaagacatgctcagagatagcaagggactgagtcaccagaaaacacatggcagagtagggacctagggtactattactgtgtatccatgggcagacaaggacttctgttcaggtcccagtggaccacagcagtgtcagccctggtctcctcttgtgcctctcaccccaccagcgactcactctgtctctctgtccttggaagttaggctcaaggaggagaatgtcaacaaggcattgacaagcctgccgactgtaagtgggaatctactgagttgaggcggtgagaggaatggagagattgcttgatgggatggattgatgccctagcagggccccctggtacccaggctcctctgaactaagccaggctacttgccagtctcactgtccctccagcaagacaagtgcagtaaaagtccccccttgggaataaggaaagtggcaggtgtttctagcttgctcatgggaatgcaggaattcttgtacccagaacccagatgagctcacagggtcaggaatcggccatcactagccttcatcatcaccatcactaccaccaccgttatctccaccaccaccaccatcatcatcatcgtcaccatcatcaccatcatcacagttattgacaccacttccatcactattatctccactgtgcccagcaccatcaccttcatcatcaccaccaccatcatcatcaccaccaccatctcctccatcaccatcatcatcatcgtccctttcaacatcttcttgtcgttgatgacaactattccctgcacctctgcttgctccctccctttaaaacagaagggactgtataatgtctttcacatctcttccaactatgtaattatgacaaaccaaagtggagttttttagacactgttcttggggaaagagcattttccaagctggtgcaaaagcgtcagctagagaaggttttcagtctgggatgaggatttacaaagcctccggagacctgccagaggtgtttaggagctgcctactctttaaaaaccagccctggagaggctgctagcctttctccagacacgtttctcctagaaggccttacttttaagatcttcagtttaacagcacaaaggctagggtgtgggctcagggtccacccgcccccaatcccaagagctagcacagcttccagaaggacgaccctgtcaggtggccactcagagatgtgctcaggcatctaggatttggacaaaatcctgggtgaaaacctgaggagttcagacagcacgattctgtctttacagaggtcaccagaatctcggagatttagttttatcctcacttggttttggaatcacaattccctctgggttctgctgccatttctgagaggcagatggtgttctacagctaagcacagacccttagaccctcagtgcgggaggactccatggtcccttggtcatttctgtagacatttaagctgggatttctagggtcatccaaatgtgttgcatattggtgtttagtttttagtttagtttagtttagtttagtttagtttagtcctcctacctcctgagtcagggtgaggactacctcttagaaagcccctactctatgtaccctagctgtgggggacaatgatggaagcctaggaaagccaatttggggaaatctatcaccatcttcattccccaggcaccagtggtgatagctatatattacctggatctgtcccccagaaccactgattatgcagggaccctatgcagtacccaagaagagacatagggtagggtgggtatgctactgaggaggggtatggcacctggatgggttacagggagtcaaagggcagatgtgtcctgggagagacaagtaggtcatggaggggacagggtatgcatggcacaaggaatggtctaagggagggatgtgtgggttatacattatcacagagggctggaactggagccaaggacagtcacccccttaacccagagttccctactaacaaacctgaccgtgcttatgaagcctttagtcgtaaactccagacagcctggtagaagagaccgagaagatgggtggagagaggtcacgagccatacagctctggccatcaggcacctgctggggctcctcaggacgagggttggggaaagaggctggaacgaactgtcagagtccagccatgctcttcccatcagctctgcatcagctgagcatagtccttctccacctcactccagacttgccagcagccactggctgagggcctgtctgaagctggagacctcacccgtgtttctctaatccatacccccttgagagggctcagaagaggtcagtggggtgcagaggacaccgagatgcaggcagtgggcatattccaccagaccagcgtggcttctgatgtctgggtttgtatctttttctctccagctcaggtggtaaggcgggctgacagactaggccccttgctcccccggtacctctgccaaaggctgagtcagttgggtgcggggcactgagggcactgtgatgtgagagttccagttgggattttccatagggttctcttaggttcatatgatgcttttgggtattggactagaccctatggaattgccatggttactgaccaaaaggactacaggacttgggggtgtgactcagtggcagagtcaatgtgactcagtgatcatgtacgaggccctgagcttggtccccagctctgaccttgctattaaatgaatatatcaacattaaatttaccttgattgagtcaaagagcccagaagcctgtgataaatagacccttctctacagtctgagacatcctcgactcaaaggccagacgtgtgtgctgtggcaggggctgcgggagatgacctttgccatcttagtgacgctgtgactttctctctgaagttctgttgcggctgtgactaaccctcatgaaggctgtgtctatagctgctgctgccctcctggggcttgtggagcagctgtgttccttggtgaggattcaggtgtcgagcgctctgtccaccaactccaaggttgctctcatttctctctgaaagtttctgtgtgagacaaggactcttggtcccagacttgggtacaaagccctaacagaaattcctatgggctatgcgggggctgtggagggaggtatgggctccaagagtagagagactgactggaaaacctgcttctgtcacatgacttcagactgtgctgggcttcagtctccttagctgcccaatgtggagcctaatagtgactcctccaggggaatggggtcgggt

SEQ ID NO: 490 - DNA, 2094 bp, Mus musculus
cagcctggctgaaggtcaggtgcccatgaaacttcctcagaaacacctccggggctgaggagccagaagtctccagaagacttgactggagggcagagctcccactgagctgcttcttagggctgttcatggcggtctgatcacaacagggggcacacacacctctgtgtgctgttggcaggaagccacaagccactgaagctgactgagatgagaagaatccatctggggatgggattggcttttcttaactgggtccagagcttctggttgccgctagaaagttcttcaaccacacagaccctgggatctgcacagctatgttgagaagctactgaagccctgcaaggatggggctgctgagcagcaagaggcaggtcagtgagaagggcaagggctggagccccgtgaagatccgcacccaggacaaggctcccccacccctgccacccctggttgtcttcaaccaccttgccccaccatctcctaaccaggacccagatgaagaggagcgttttgtggtggctctgtttgactatgccgctgtgaatgacagggaccttcaggtgctgaagggtgagaagctccaggtcttgaggagcactggagactggtggttggccaggtcactcgtcacaggaagagaaggttatgtgcccagcaactttgtggccccagtagagactctggaagtagaaaaatggttcttcaggaccatcagccggaaggatgctgagaggcagttgctggctccgatgaacaaggccggctcctttctcatcagagagagtgagagcaataaaggtgccttttccctgtccgtgaaagatatcaccacccagggggaggtggtcaagcactataagatccgatcactggacaatggaggctattacatctccccccggatcacctttcccaccctccaggccctggtgcagcactattcaaagaaaggggatggtttgtgtcagaagttgactctgccctgtgtgaacctggccccgaagaacctttgggcccaagatgaatgggaaatccccaggcagtctctcaagttggtccggaaacttgggtctgggcagtttggcgaagtctggatgggttattacaaaaataacatgaaggtggccatcaagaccctgaaggagggaaccatgtcaccggaagctttcctgggcgaggccaacgtgatgaaaaccctgcagcatgagaggctggttcgtctctacgctgtggtcaccagagagcccatttacatcgtcactgaatacatggccagaggatgcttgctggattttctgaagaccgatgaaggtagcaggttgtcccttccaaggctgattgacatgtcagcccaggttgcagaggggatggcttacatagagcgcatgaattccatccaccgtgacctgcgggcagccaacatcctggtgtctgagacgttgtgctgcaaaatcgctgacttcggcttggccaggatcattgacagtgaatacactgcccaagagggggccaagttccccatcaagtggaccgccccggaggccatccacttcggggtgtttaccatcaaggctgatgtgtggtccttcggagtcttgctgatggagattgtcacctatgggcgcgttccctacccaggaatgagcaaccctgaggtcatccgtagcctggagcacggctaccgaatgccatgcccggagacatgtccaccggagttgtacaatgatatcatcactgagtgctggcggggccggccagaggagcggcctacctttgagttcctgcagtcggtgttggaggacttctacacagccacggagggccaatatgagctgcagccctagcaaccaatggtctcttcagggctcccagcctgagcctccttctggactctgactttgggttaatatgttcacacttagctcttcttccaggtaggttgcagaatcagggaagaatggtgtgcctgcttctcaagtgagggagccaggagacaaagatggcttcatggtgaggcatgagctctcaaggcacaacctcggtccacctttcactggctgtgtgcctttggccaagttactttgctgc

SEQ ID NO: 491 - protein, 499 aa, Mus musculus
SPARMGLLSSKRQVSEKGKGWSPVKIRTQDKAPPPLPPLVVFNHLAPPSPNQDPDEEERFVVFDYAAVNDRDLQVLKGEKLQVLRSTGDWWLARSLVTGREGYVPSNFVAPVETLEVEKWFFRTISRKDAERQLLAPMNKAGSFLIRESESNKGAFSLSVKDITTQGEVVKHYKIRSLDNGGYYISPRITFPTLQALVQHYSKKGDGLCQKLTLPCVNLAPKNLWAQDEWEIPRQSLKLVRKLGSGQFGEVWMGYYKNNMKVAIKTLKEGTMSPEAFLGEANVMKTLQHERLVRLYAVVTREPIYIVTEYMRCLLDFLKTDEGSRLSLPRLIDMSAQVAEGMAYIERMNSIHRDLRAANILVSETLCCKIADFGLARIIDSEYTAQEGAKFPIKWTAPEAIHFGVFTIKADVWSFGVLLMEIVTYGRVPYPGMSNPEVIRSLEHGYRMPCPETCPPELYNDIITECWRGRPEERPTFEFLQSVLEDFYTATEGQYELQP

SEQ ID NO: 492 - DNA, 90401 bp, Homo sapiens
  misc_feature (1)...(90401): n = A,T,C or G
ggacaaaaacaccaaccaaacaaaacactgaggcaaaactaaaaacaacagcatccacagtcttctacagattgcccccaaactattttgtctactgtctcagagagtaggcagtcggcttaaagtactcagcctatggctgtccatggaactctataccagtctgctcaggctgccataacaaaatgccacaagactgggtggcttaaacaatagaagtttattgtcttacagttctggaggctggaagtccaagatcaaagtgcctgctggtttggtttcttctgagtcctctctccttgacttgcagacagctgtctttccccccgtgttctcacactgtctctcctctgttcatacacatccctggtgtctctatatgcttcctcatcttataaggacaccagtcaggttggacacaggccctcctgaaataactcattttaatgtaatcacccctttagggctctatcccgaagtatagtcattctgaggtgctagggtcagagctccaacatatgaattttagggaaacacaatgcccttcataacaaactctatccacagaatttcgagatgtgcagaatacagactttaggaggactttagaaataactgagtttccagcctgggcaacatgacgagaccctgtctctatgaaaagtttttaaaaagaagccaggcaaagtgacatgcaactgtagccccagctacttgtgagggtaaggtgacagggtcacttgagcctgggaggtcgaggccgtgatgagctatgatcataccactgcactccaggctgggcaacagagtgagaacgaaagaaagaaagaaggaaggaaggaaggaaggaaaggaaggaaggaaggaaggagagggagggagggagggagggaaggagggagggagagggagggagggaaggaagggagaaagaaagacagagggagagggaggaagacaagggaagggaagggaagggaaatcactgagtccctctgagtccctcctttacctcagttcagaataaaggagccttgtttccctcctgactgtcattcatttcatgtgttcagtcaccatggctacagtgacgacggtaaatgtcttgtatgtcagaaacaattctaaatgctttgtatacttcagcttgtagaatcctcacaaagagataggtattactactatccccattttaaggctaggaaactaaccacggctaggttgggcaacttttccaattcttggagctgttgaatgtctgtggcagcgttcgagtccagggagtcttgctctagaatccaaggtgttaaccattaagctttttcagagacacatgaggacacacatgtaaagacccacactattcatgcatcttgcctttaatttaaaagaaaaggcaatgaacattttctgactgccttttgagggccagccactttacagcctgctctcagaagaactctaggaactcttgtaatctcagtttttgagaaaactgaggctcagtggtgaattgacacagctggaatctcacagctggtaagtttatgaaactaaaatttcaactttgagatgcgtgatggtaaagtgctcatcctgttggactcagttgcttccaaggctgaaaaaagttccttctgaacactccacaccagtggttttggggggtttatttttgtttttttgccctgtgaggcttgatggctgagtggtagtgaaaatcaacttagttggtcaaaaccaactttggaaaatgaaatagagatgaagtggtatcagcaaaaaggcagactaggcagtcccacccctgttcacccataacaactatgatttaacaactacccatgtatgaaaatggctctgagagaactccaaagtataattagaaagctgcaacaccccagtggattgcaataacagaggacagccacggagaaaactgctggaagcatttcatttgcatcaccccaatcccaagctggcacagctcggatgccaagaggtacacccttggtcacaacttcctccaatgggaaaaaaggatagcaggaccctggaaacctttacaactgaggacactaacagcccttactgctgttgcttgctgcaacaggcacctgcagcctttgccactgaataccacagagtcttcgccaatgctcatcctagctgacagagctgcccaaagtccatagcactgtgccctccagagccagagccatcactgctcctttcctgggacctgagtcaccactatgcctcccccagggctggagtcaccaccatgtgcattcttgcaccccatcgcattgtatatgtacccatcaatcagacccatcactaatggtggccatgtgcccactggccagacctagcatcaccatgtgcacccagaaatggcacctctgcatgccttagaatcagcatccctggaccttgtgccaaacccagcactgctcacgccctttccagccagtgtccttgtgcccacccataggtaaaggccttttcctaccaaagctggtttgtaaagtctggaagaggtggctactcctttatgtgaaggcacaaggcaagggtaaaaggtgcaccaaaaaatcaaggaaacatgacagcaacaaattaacacaataaatatctagtgaataaccccctcaaaattgagatctatgaatttcctgacaaagaattcaaaatatcattttaaagaagctcagtgagttacaagaaaacagagttcctgaactcaggaaaagagtacatgaacaaaaggagatgttcaggagatagaaataattaaaaaaaaaaaaaaaaaaagaaccaagcagaaattctggagttgcaggataccatcaatgaaatgaaaaatgcagtagagagcttcaacagcagacttgcacagaagaatcagttaactcgaagacaagtaatttgaaattacagtcagaggcatgaaaaagaatttaaaaaaataaagaaatcctatgagatttatggtatagcatcaagtgaaacaaatacacattctgtaagttccagaagacgagagagagaagtgaaaacttaccctcacttctaattcctgaaatttctggagattctgtgatgaaaatagaatcttctcttttctttgttgatagctagttttatcaagcccatatttggtttcactgattatctctttttttatttgtcttctatttcattgatttctgctctaattcattaatttccttttacttacattgtgtttcacttgttcttctttttcagtgattgtagaccaaccttgtattttttctagtattaatatttatagctataaatttccctctaattttttagctgctgccataaaattttatgtgctatactttcattttgactcaggtcaatgtgtttcttaatttttcatttaatttcttctttggggttatttagaagtgtgtcatttaatttacaccaaacaaatttacaccaaataaatttaacaaaattatttctgttattgatttctaatttaattccattatggttggagaagatactttgtttaattttactccttttatagtcattgagactttctttaagaccctatggcttacatagggtctatcctggtgatgttttatgtaagcttgaaaataatggatattctgggtggattgctaatatatgtcagtttaatcaagttgtttgataatgttgttcagatcttttttatcctttctgactttctctccacttgttctatcaattactggaagaaaattatcaaaatcttcaactatcattggtatattgtgtattgaactttttagttcagtcagattttgcctcacgtgttttaggactttttaaaaaggtacatgaacataattttgacagctctgcctattgcttgctcttttcttattatgaagtcacccttttttcccagtaatatgtgttatcttaaattctattttgcctgatattaatataggcaccccagttgtaatgtatttattgttcacatggtatgtagtttttttggatccttttacttttaatctgtttgtctttgaatttaaagtttattttttgtagccagcatagaattgggtcttgctttcttttcagtctaacagtctttgcattttgattggagtgtttaattcttttaaatttaataaaattttttatgtttggatttagatttagaattttgttattttttctacttgtcatgtcttttttgttcctctattattctttgactagttttattattttatttttaatttatctttgagacagggtctcactctgtcactcaggctggagtgcagtggcacaatcatggctcactgcaacctctacctcccaggctcgaatgatctttccatctcagacacctgagtagctaggaccgcagctactcccgattaatttttgtattttttgtagagacagggttttgccgtgttgcccaggctggtcttgcactcctggctcaagcaatcctcctacattagcctcccaaagtgctgggattacatgcgtaagccaccatgcttggccaactacttttatattaaaatatttttagtacaccatttaaattcttctgtttatttttttaactctgtttctttaaatcttttttccttagtagttgctgcagggattacaatatgcatcttcaatttatcataatctactttaaattcataccgatttactttttttggtgaaaaataaaaactgcacaattatagcttcatttcttaccctccctcctctgtgctgttattgtcatgtatattctatttgtacatatgccatactgtgttataaacccacagttataaaaccacagtatggcattataatttctgatttaaataattgtgtgtgtgttttaaaataagacaagaaaaagtaatgtatacatatacattttatatttttattatattatatattttcactttacctacatgcttaccattcccagtgctcttcttttctttctgtgaactggtttactatctgatattaatttctttcattttaaaggactgcctttaacttttcttgtagtgtaagtccaacagaactaaattccctgttttgtttatctggaaaaatatttatttcacctcaatttttgaagggtagttttatcagatagtaaatttgtaggtgaaagttcttgttcttgtttttgttgttctttcagcactttaaacatgtcattccaccaccttccagtcaccgttatttctgatgagaagtcaaccaccaatcatgttgtctttaatgtgatgtatctctgtttctctctctttctcttagtgcttgcaatgttatctcctttatttggcttttggcattttgactatgacatctaggtgtgattctctttaagtttttttttgttttgtttttgtttttgttttttaccttgggtttattcagtttcttgactctgtaagttaatggtatttactcacatggagacttttcaactttttaaaaaaataattgttctgtgcctctttctctttcctctccttttgggactcctattacatttgtgtttgaacactttatattgtctggcaggtctctaaggctctgtttacttaacttttcgttctctgttctttggattgcataacttctgctctatcttcaaatgtacagcttctttcttctgccgtctcagatccgctcttgaacccatgtagtgaatttttgtaattttcagctgtagaaatcccatgtgattccttttttataattttcatctatctatccaaagtatctattggttcactgttaacaaaattttctttaattctttgaacatttttccttaattccttgagcatagctataacaacttctttgaagttgtgtcttaatctactgtctgtgttggtttttctggtcacactttcctgtttcattgtatgtctagtaatttctggttgaaaactagacattgcagtgattctagattccattcactttcctaaaagttgttggttttctgttttagtaacttttctggacttaaattgcagaattaatctcctccatggtgtgcagccactgatactacagtgcagtttttattataatatttttctttgtttttcagtctggctccctaaaggtgtcctctattcttctattatatgatgatgagacaattatttagacagaagttatgctcaggtaccttgaacaactaagcctcccatcttctgctgccagagctgtgtgtggccgaagaaacacattcacatgtacaagtcctcacggaaggtgggagggtgagacaggggtgagggttgaaaaagtacctatttgttccgataggtactttttgtggcaaaaccctgtctctacaaaaaatacaaaacactagctgggtgtggtggcatgtgcctgtggtcccagctacttggaggctgagatgagaggatcacttgagcccaggaagtcaaggctgtaatgagctgtgactacattatggcactccagcttgggggacagagtgagaccctgtctcaaagaaggaaaaaaaaaactacctattgggtacaatgtttaccatttaggtgatgggcacactaaaaacccagacttcgccactatgcaatatatgcattgtaagaaacatgcacttgtaccccttaaatacataaaaacaaataaattttaaactaaacaaaaaaatttttgcacatcgtcaggtctcccttggctctcactttttgctgcctttttgggtttcttccctagtcagagatgtgcagggagtttattgtcccagccctctcatggcttgcttacttccaagttctcatcacaattctggctgatctcctgtctaccatgaaaagaagctataatctcaagccagtaaagctgcagatttttattttctccctagaactgattccatgaactttaacccataaaactgcagattctcatctcccccatcccagaccaaatctaccaacttctgctggtatagctactagttttctttttatctatttatttatttaatttatgtttgaggtggagtctcgctctgtcacccaggctggattgcagtggtgcgatctcagctcactgcaacctctgcctcccgggttcaagcgattcctgtgcctcagcctccctagtagctaggactacaggtacccaccaccacaccgaaataatttttgtatttttagtagagatggggtttcaccatgttgtccaggctggtctcgaactcctgacctcaagtgatctgccccgccctcagcctcccaaagtgttgtgattgcaggcttaagccaccgctccctgcctagctactggttttcagtgacagccctcaaaccaagtccaccattcccattaggtaacctgtgcttttcctcactcaggccaggggctggggagcttcaggcaagatgtccgtagactcatggccattctgatgcaggccatttttaagattaaacacttatcagatcattgtctgcttttggtttttctagtacccagaaacaaacattttctagtacccagaaattgttgtttttgacaattttgtctagttttatacttgttttcttcaaaaagaaattggccaacttcttagacccttctgaggtgaatcttggactggattggttttatgtttcttccacttactttattgcctacagcttttgattttgatcagagatgtactgatattaggaggctggtgaaggcacatggaaggagagctgaattttgcataagtcacctcaaatgtacaaaaataaatggcagaaccagtgatgctgaacgctgaactgggcgtttcagagctagggtctagtctcagtcccgccttgagaaaaccgctttgaggttttctaacaaaaggctccccagcctcccctaacaagtgtcactgttcccatcttctccccggggtcctttccccacctctcttccgcctttctcatgggcccgtgactgtgagggtgaaaatggctgaaattaactttcacttctgctcagacatctggaacccatgagcaaagtcatttccttgttttctttctgagtggctgctggaatcgtgtgtgtgtgtgtgtgtgtgtgtgtgtgtgtgtgtgtgtctggtattgttattttccaacctctgtctgttggggtgggcataaaggtgatgtcttatcacagatcacataagggccagcacacctccctgcaaactctcacatcccctcccactctaaccttgggtagacagaccatgtattttctttgtaggatgctgggtttcctgctctccactacattctctataccctcaagtccaagtatataaaagttgtccaaacgtcagctatttaggccctattgaaaaaatgttagaggcggttcaggcagcgtcacaacatcctggttcagtaaaagactcagcctagggatctgtctctgagagtctgtaggagtcttagtcacgaatcatgttcaaagccttctccttggcagcttcccccagtgacccctgatagaattattgcctccgcctctggtctagcactgtgccccgttgaggcctctgtggctacatctactacgctccactgcagtgatctgcttatcaggccccttctccaagctccttaggctgagactctcagaggaggatggagtgtagctgcgttggtatccccagcctccagcaggtgcttagcacagagcaggtgttcagaaaaacagtgctgcattaattgaattgaaataggaagactaagttacctcatctcaaatcagtcactttttaaatcagaagctcgcagagtttggaactcatgtttcatgtttggatccatgtagtaggtatcaggaagtgaatgtaagagtaaattaacaggagctgccatggactgagcaggcccagggttctggacattgttgtgagccctctgctaccacgtggagaagatcagctttgggacttaaagcaattagccacattcacatcagcttccaggtatttggagtttattatgtgctaaatactgtaatagatactttttatgcatgaatccatttattctcacaaaaccccttggggaagtgaaacagattatttccatagtgtcttaaaaccccagaactctgcgttgctgcgtctattgacatgaacacctgtcaaacctgcaactcatagctcagtattgtctcagtccaatccaaggaaatgaactccttgagaaagctgacattctggaccatggggtagaagctaccctgtctgcctcccacacccactctcaaggatccaagactatgaagggagaagagagagcccaccgagtgacttcctcttataagccaatatcaagacactagtggaaaggaaccagctgaccagtggctcactgtgtctggctggaccagcaagactctgacgtcatcacagaagccttcttggtcccattggtcctttgactgctgtgtacaggatgccacccaccactccagacaccactcaccactctagatgttgggatccttctcccgttacctccattattcttgttctctactcctctgagttttcatagccaagcaaatttccaccattgaagaggctctgagatccaagtcaactaactactggctagggtactgtaaaacacatgggaaattagcttttaccaaacaccaattctatgcccaccattcatacccattctaccatttaatgctgatagtatcctgtgagctagctattattagcatcatttaaagacaaagcaaaaccagtgaggctgaaagaacggctgccctggtgcacacagatggcacatggcagagcccaagccctctccatgagatctgcagcgtttgtccacacggcagggcaaattaccttgtagagtcagcatggaggtttgctaactctgccggacttggtgcagaaaaaataccagccgtgctgttaaaccaaaaccccaggagaaaactttctggtgacagaagggcattgtgacccacgttgcccagggccagggacagggcagctgctcatggtccttcctcacgagttttcctggagcagagggatacccccaaacccagggagcccacaggagcttcagaagggctcggctggagggcggggcccctgttgcacttgctcactggggactggggaggctctgatcgcagaccgggggtgctgccacctctgtctgctgccggcagaaagccacaagccatgaaaactgattgagatgagaagaattcatctgggactggcttttgctttaggatggtgttggaagttgctcgttgtcgctaggagcctgctccactgtaagggtgtcgggatctgaagagctatggtgaaacaccactgaagcattgccaaggtgaggccctgcgtcttccgggttctttatcgtcttcctttaaattgtgcaaatggtgctgtaaggcctgtagtggggcaagcaagcaaggacattgctgtgggtgccacagacggaggaagaggcatgaatggatcgctgcctcagctatgaatagattgctccatggtttgtgcatttccagttttgagaatttttaatttataaaaggtcatccatccagggtagattctgctttttggaaaaggcagtgaatgtgccacagaggagagaagggacgtgggatgtagagagggggttgagcgggcacacacaggccactgctgcgctcccggcgagtcactcggcctcttgataggaggtgatattgactgtgcagagctgacagaggttagtggtcacaggcggggagcatctggctcaaggcaaatgactgttgctttcgttttatttgtttgtttctgaatgaagttgttccatttttcaggcattcaggaatggggtaactgaatagatgtaatgatgatcttcttgtttaagagatctatttcaccaggaaacaccaactgtgaaaaggaaagcatagttgatcacatattttgaaaggatttgtgtaaattgtaaggttttgacaacgtttccatttatctggtaatgcgggtggatgaagttcaccctcatccacccacattaccaaggaactaaggaattgtgcgtttgcagtaacagagaagaaattgctgtgatatgtgcatatcctcctccctcgggagagtgggacttaattcccctcaccttgagtgaggtttggactaagagtatggaaagggagaaatagtagctctgtagaggagaaacctgcagatgccagcttcaccaagggaccaagcttagcatcaccgggaataagctgggctgctattgtgaactgccacgacagtgcggttcttcccgccaactcataaccccagtcaaatcatgagaaaacatcagacaaatccaaactggggaagattccacaacatatttcaccttcaaaaatgtcaaggtcatgaaaaacaaagaaagacaggcaaagcgtcacagatcagaggagacatgatggtcaggacacccaaacccagaattcgcatcctgtattggatcctaaagcaacaccgcaaaggtcattagtggaaaaataggtgaaattttaacaagacctggggtctcgctaatattgtggtaacaattactccttagttctggcaaatgtaccatggttacgtaaggtgttcacattagaagaacctggtgaaggaaatatggaaattctctgtgctatcccttgtaatttttctccaaatctaaaattactgcaaaataaagagttaaaaaaaattagactcattcttcctcagagcaggagtagccaaatcctgagcattcttgggaaaactggcgttcatggcctggtgatcacaccttctctttgaacattctggaatatagcaggccttttgaatttttgaccatccatcattctctctcccaacccctacctgattccagaatagctctgtatttgcctctcttcatagtatttctcatggatgattatattgttgttgttggtgtccaatgggttttgtgggggttgtttttcgtttatgttttttgtttttcagagatggggtcttgctctgttgcccaggctggagtgcagtggcaagagatcatcgctcactgcagcactgacctcctgggctcaagcgatcctcccaactcagcctcctgagtagctgggaccacaggtacgccactgtatctggctaattttttaatcttattttttgaagagatggggtctcgctttgttgcctgggctgatctccaacccctggcttcaagccatcctcccactttggcctcccacagtgctgggattgcaggcatgagtcactgtgactggcccagcatgcatttttgagcctttgctctgtggcaggggctgcaggatggaatacaccctcatctgcccagcgaagctcactgcactggtgcaggctcctggcaccccaagcacaggcccagctacccagacctgactcctctccaggaaggaagcagaaagccaggaatggagagaatgaggacccaggcccctgggggagtacagaattccagccaggaatctgccgtcctctgggctcaaccaccccacagaatctggtcagccaagtggctgtgagctgggctcgacagcccttcctcgagagtaaactgtggcctctaggatgtagagaggggactcaaagggccagatcccatttgagtgaggattctgaccttgtgagcccacctgcagcctggggtctgcagccttggggactggccaccggtggccagcatcctggcttgcagggttcacgtgtatagagaggtaacagcaagacagagaaacctggcccctcttgcaggcccagcagagcaggtgagccctactcaaaggtgatgctgcgcctgattagagaaaagcttccaaagcaggtgaggaggaagaaaaaatgatgaagccgcaggaagacagcacgtagatggaaatctcaacatactgagatggaaatcaatcacaaaactcttacaggaaaatcacagctaaaagttggtgattacatgtgggcctgcagtgcctttcctgtcacatctgctaccccactgccagcctgctgctaccccacagcagccctcccatttgtggaatgttccctggcgtgctcctgcttgcctgaatcccttccccaccttcccacctaggcaacttgcatttgctctgacgtccagggcaggtgcgaatgtctcctcccagtcacagtgcccaagcccatttgtgtgtccccagcaaccaccagcacacacccagggctctggtttgcaggcctgccaggttctctggaccaaagctcctgaggacaaggacatgccctacatgtgcctccaggtcccagcacccagcgcagtgcctggcccaccaggggtatctggtaaagtggttcttgagttaaagacacaagggcaaaaccttaaatgaaaatcaaggttaagacatgaggatgaaagcttgaaagaggaaaagcaaagataattgaatgatcatccctaatcgtggtgcaccccagtgccatcagcatgctggggttttgacaggacccttggaagaaagagaagaggcatctgaggcctctggcacattccacttcctgtaagacagtgtggtatagatgaaagcattggggcttcctgccagccaggtcagtctggctctgcacctgccagctgggagtgtgaagtgggagcagttgcacccactctcaagcacagacatgagaactgaacagaaccacggaatgggggtccagagcccaagacatagacgaggctcctccttgtccactgtggggcttgtgcaaccccttcatcaaagcgctggtgctttccacattgtaatcaaggaagttttctcacgttccttctcatcacaactagctgctggcctttttgcacactttggcacctaggatgctgaacctggaccagtgggaggcaaacaagacacacctgggatgcaaaatgtaaggaggctcccatgctcaggtcgttcaagtgcaggaaaagtttgtgtatgtgtgaaacgcacaatgccatgtggtgtctataagggcatttgaggttctgtgcttaatggatgaagtgggttctgagcattgagtctgtggattcctgatgagtttcctggtgctctgagctccgtgaacttgtaaacaagcttttgtgtaggtgggtacttacagtttttgtcagattcccaaaggggtctgtgaaccccaaaatatttggaatcatacagtcaaatatctaggaagaatactttaattttctctctcagcgtgttgtggatatgaggaagtggaaaggacttggacatagaagtcagacaaagcagccacatctgagtggtctcgtcctgcagtgtagtggttagacggctggccttgtcaaccagagggctccagtgcaaggttcagccctggcaatgtgagcaagtcactgtgtgccttcctgagatgataatagtttgaccccactgtatacgagcagccttacctgtctcgggtaggttaattatatcctctcagtcttatttcttcattcattgataatagcacatcacaggattaacagaattaaattacaaagccctaatttttaggtgagttgaagctgaggagcacacaacttttcttacagggtgcactcaattctcaatgtcagaaccaccagggggtccttgtacttcaaaaagacacatcttacatgacaacttctttgatttacttttatgcccaatattcattttgaaacctcacaaaggagagcatggtgttgttgtttctcaaaagagaaagtaaatttagtaagattgagagccatgaacctagacacagtcacagggcacataagatttcggtcaatcacagactacatatatgatggtggtctcataagatgaagacactgtattttgcctgtacctgttctatgtttagagacacaaatattcaccactgtgttactactgcctgcagtatttagtacagtcgcaggctgtgtaggtgtgtagcctagaagcaaccggctatgccacagagcctaggggtggagtaggctctaccatctaagttttgtatacgatgttcgcagaacaacaaaatcacctaatgacacatttttcagaacagatccctgtagtgaagcaatacgtaactatattttgggaacttcccctgtatccagatagtcagtccaagagctgtgtgtttggatctcacagtgcttgagatcctgagagaatctcatttcctgagtcagatgtgggcattctttcttggcatgggtacactgccgtggcttgtgctgaaggctgcataagaaacagaggttggaaactcacagtggaatttattgctgagatgacgttaagctgttcgcattccacccaggacctccacaggagaagcccagagaggatgactctcagactccagatccaggaaatccatgcctctctggagcaatggatgtcttacagacactgtgactcttcaaactgattattttcttctttgtgcttggactccaggacacttagaacccaatttgcatctaaccactagcagtttggtgacagcatgtcacagtttgtatttctgtgcaccagctttatacacatttttttttctgccctaacttaccctttggtctaatttctttatctgtttttctatcctgttgtattgtatgtatttttataagcggtctcaaatcttttctggaaacactaggaaatgaatatataaacaaatacaagcaggacagcatttctgaaagagcctgatatacagtgagggtgctcactaaggattagttccctatctgtgtacaaaacagaaaaattcactgagggagccaacctgcagtcaaatgtccagctgtgagtctattacagttatagaaatagcttatttttacacatattccaccttagattgatttggggggtgtttgtttttgttgttgttgtttgagacaaggtctcactctgttgcccaggctggagtgcaatggtttgatctcagctcactacatcctccgcctcccgggttcaagcaactctcccacctcagcctcccgagtagctaggactacaggtgtgcaccaccacgccctgctaatttttgtatttttttgatagagacagggtttcatcatgttggccaggctggtctcaaactctggacctcaagtgatctgcctgccttggcctcccaaagtgttgggattacaagcataaaccactgcacctggcctgtttttttgttttgttttattttgtttttgtttgtttgagatagggtctcgctctgcctcccaggctggagtgcagtggtgtaatcatggctcactgcagcctccacttccccagctcaggcaatcctcccacctcagcctcccaagtagttgggaccacaggtgtgcaccaccacgcctggctaattttggtttttgtagagatgggtttttaccatgttgtctaggctggtctcaacctcctgagctcaagcaatctgcctgcctcagcctcccaaagtgctgggattacaggcatgagtgaccatgcctggctctaccttttatgttaaagtttatataaattatttcattttaagattcttttattcctgccatttctgtggtgcaattggatttttacataaagttaaataatactttttattttggccaggcgtggtggctcacacctgtaatcccagcactttgggaggccaaggtgggaggattgcttgaggtcaggggttcgagaccagcctggccaacatggtgaaaccccatctctaccaaaaatacaaaaattagctgggcatggtggcaggcacctgtaatcccagctactcagaaggctgaggcaggagaattgcttgaacccaggagatctcagcagtgagctgagactgccgctgcactccagcttggacgacagagtgaaaaaaattaaaaattaaatgatacttttaattttatttactattttatttgaataaataaaaggatcctttaaaaagtattacacacgaaaatagggtcaaaagtcatagcccattttcttgattttatttggtgctttatgggaaaggctaaactctctctctttttttttttttaacacattagcatggaaaggaatcatttctactttgtggtgtctgtctgtctgtctatctgatgggctctctggcacctgccagcacactgggggaagtgtgaggtcaagataggcatcttgtagatgaagagcatggcgtgctggtaaacgtttaacaaccagctttccaggaaacaaatgtattgtatacatacataagtttatagtaacatgtactgatataaaggatgcatagcacttaatttacaaataataacaaaatatgcaatagtctctgtcctaaataccgcagaggtgattgagtctcatagaaagctctcgtgactttgcactgtcatatccgtagccaagcattggttgcagcagatgagcaagtgtggtgttggcacaaacactgaaatgttcattcatgttaaggagcagatcaaagtgaaacaacaaagagttggggcaggctgcagccttagtgccatgagcggcttctttgttgaactggataatagtttttcaatattcagaaaagtttcctcaatgttttgtgctactcacagtgttctagctacagacaagatgctcttttaagcatagaaaatccatgaaacaaatcactgccgacctgtagcatttgcctgttcctgttgtataaatactcccaccagggccaatttcaagttgccaacatgacttgcgtgaacatgggttcgagatgcgcagcagcacagcacgatagagtacttccgccttatagacacagtcagttaaagaacctcaaagcatagctattattaagatgcagtaaaaataatcaggaagtgatgaggtttaagtatttataacctttgttttaatagaatccatttagttgtatcttgtataattcaactttaattttttatcattttaattttatatagtttttttttctttttctttcttttttatttttctttgagaaggagtcttactctgttgcccaggctgcagtgcagtggcacgatctctggtcactgcaacttccacctcctgggtttaagggattctcctgcctcatcctcccaattagctgggattacaggcacccgccaccatgcctggctaatttttgtattttaagtagagttagccaggctggtcttgaactcctgacctcaagtgatctgcccacttcggcctcccaaactgctgggattacagacatgagccaccacgcccggcccgtatagtttttataccttaatcttgcataatgatttgaataattcagctcacaaaattcctgagaatttaacaaccggctctagcataccggcacaagctggcccccagtgcatcactgacggggaggccgagtgtcttgaggccacactgcagatcagggtcctgcctgcagccaagtggggacaagtggagaataacttgcctcctgggctctcctgagtcccgagcctgacagcggaggcccaggtgggtgaccctgctttgtgctcggtggcaggggaaggggggtgggcctgtgggcctggatggagaacctgtccccatggctgtcatgtccctacaccagctgctgccagccactgtggggttcgcaagtccccactcgcaaaacggctactgttttccacaaccatgggatacaaggatgtccccttgggctccttctcatctctactctctgctggcctctttgcacagattgatacctgggatgctgagccaggaccagagggaggtaaagacacacctggggtgcaaaactgaaggaggccctgatgcttgaggttgttcaagtgcagagaatgtttgtgtatgtgtgaagcacacaaccacacgtagcatctaaaaggacatttgatgttctgcacttaatagattaagctggttctgaccttctagcccctgggcttctgatgagtctcctggtagcctgtcagctcctgatcttggatgggagcttgtgtgtaggtgggcactcttctgcaaagtgcgtttatggcttttatctggtttcctctgatcagaaagatctgggggtgctggcacacccagacgactagtaactcccaaagggagaggtgcagctttgtcacctgcccctgtgtcaggtgggacgtgagatgctctatttttttctgctccatcctgtgcccaagccttatacagggtgacccttttcagagaggcctttgccaccaggtcagtgtgagcatgtggctgggtgatttcctgccgtggaccagggatctgtgtgctgtctgaagtaagcaagggtgctctttcttggcaaggtctgagggctgagacttgcaaggagacacctgctctcttggtcaccagactggaggttcctatgtgcaggtgtggaggatggaagaggtcactctgtcctctttcttgcctgggcctcacctctgctgaggctgctggctgccctgggctcgcagtgaaaggggccatcttccaccctcccctgctggtcaagtgcatctttccaggttccggcactccacgttgccacccagacaagtgtcctgtgggaactagcaagtgggaatcaaaactacccccagagaggctcctggccgggagatgaagggatctaccctggggctaaagtctccccagcctttcttggagcttaggtcctggctttagaaagatcccattcacatccaggcacagtggcacacacctgtaatctcagtactttgggaggccgaggcaggcggatcacttgaggtcaggagtttgagactggtctggccaacatggcgaaactgtctctactcaaaatgcaaaaattagctgggtgtggtggtgtgcgactgtaatcccagctactcaggaggctgaggtaggagaattgcttgaacccaaggaggcaaaggttgcagtgagctgagatcgcaccattgcactccagcttgagcaacagagcgagattccatctcaaaataaagaaaggaagggaggaaggaaggaaggaaggaagaaagaaaagaaaagaaaagaaaagaaaagaaaaaaaaaagaaaagatcccattcacctgcacaaaagccacacccctttgtggccaaggaaagggccacagaagaagaagtaggcccttcagaagggggagaagtaggcgccttcagaagctggttatccgtgtgtaatgccatcacagggacgtgcgtttaagatcttttatcagtcttcgtagctaaatacttttagttaattgcaggcgggaggggctactagctcaggctacatggagcatgtgctcaaaaactgtctccaatatggtgacttgctgtttgaggacggtctaagcgactgaggagtgtgccccctgtccccacccttgagatgaggcctgataagggtgctggcatatttagtgttgggcaccctggtgctctccagcatgtggtgtttggcctaagtggcccatgtggactttgtttcaaggattttacgacaagaaacaccaaaatgaggacatctctgtggccatgtttcaggcaagggggtaatggatacagagcatatgtacacacaaacacacatgcacagagacacgtacagacacatacatgcacacagacacatagatacagacacatacacataagaatacacacagaaacacacagacacccacacatatacacacatgcacagacatgtagaaatacctagacacagaggaacacacaaagatacacaggcacacatacaggtacatctacatgcttatcaaaaacaacagcaaaaccacctaccatgacaaatactattgcagcaaaactgaacaaataaattctgtgccataaagtttcctaaacctcatctattttgtagaaatctagtcacttgagtatcatccttcacaaagttctttctattctttctactgtacaaagttttctgttgtcaaatagcaagagatctctgttttctacttggaatgggcctggagaagggagacagcacccgctccctccaccccttgtccctgagcacagcatggtgacctgccaagccagagggtgacctggacactcataactcaatgcagggccaactgtagcctctggccggtgtccctgagtgagggcaaagttgtaataacacttgttctctcctttctccaatttgctcccaagctccattgctttcgttcaggccctcccccttctagactgggcagttccgcatccttggagctcatttctctgtcttcagaatctgatgctccaattcatcccatgtgtggctgccaaggtctttctaaaactcaaatgtggccctatcaccgcacagggtaaagccaccataaactcctctgtgtttgagaacaagggccaagtctcccattgaggcctccagggagtggacagtctgggtctcctttcttctccaagcacgctgggcccatctgtcctgtccctgaggactccctggcacacatgacacttcagagcttttgccaactccactccctgcctgaaatgcccatctccttcagagagcttctatgtatccttggaggtccagtcctaatgtccctgcctccgataagacctctccccatcttcctctcgccctgctcctgtccccgccaggcatgacaaatctcttcccacagtgggcccaacagggaggcagatggtagaacaggttttgggccaggtgccaggtgcacgtggctcttcatcctggttccccaccgcacacctggagagctgagtgcttttcctgaggtcacgcagaaggttaccagcctggctctggagctgtctctttgccacatcgtggggtgtctttaaggtgaccttgaatgtgcttgaagctgttttatgtcctatttgcagacctaggggaggacaatgccagggctttttgccttcccaaggtcacagcctgaagacactcagaaagatgtagttggctcatttatcattttttagaaaaaaagaaaacaacagaatgtgctgaatccttgtaactgttggccatggcactagtttcatggaaggtggaagggcaggttaggcttcttatgagggcgttcctggcctctggaggggtgtgggtgggctcaggtgaatgactgacagactggatttacgtatgttgagtgtgaatctcagtccacagcttggtgtgcaaaaacagaaaagctatctggtaatagctacatctctgttggggagaggaaactgacctctcaattcagggtcttcatacctttctccagggtggggtctaagttctgggagcctcatgagtctcaggaattctggggtggcctatttggtctttgtcatcagtccatgcagggggctgctagaatgtcatgtcagcctctgaccctggccaagccccctctcagagattccaggccacatcccaggttgagggatgcatcctcccactctggggccccccaggtgggactctcagggaggccacttgagacgcggttgcccaaactgactcaacaagatctctcagtcacgggctgaaagatctgcatcacgggctgaaagcaggaaagttcttttgtctctctttctgctttcctgtgacaatgggtgcagaaccatcgtgaatggttcaggtgcgggtagggaaaataacaaataggaggaagaacaatctcagaaaggcaggtagcctgtcccatctgctgacagagcagtgtgtaagcatcactgagcttgtgacattgatgttttttccaacatgcagtataaatgtacactgtgattttacaaggccaggagccaagtaacaacacccttggcagaggaagagtgaagtggggaaggaaactgaagcgggctagggaggaaggacagcttgacaactagttagaattggaaggacgatggactaggattgtaaaagaataaggcagaatgtcctaccttcccaccttggcaaaccctgcccctgggagtggtcctggatttgcagtggccctggcctggaccaccatgtagatgtcactaatggatcctcccaggggacgggcctgtcatggccctcaagaaaggcagggatgaccaccccaactgcaggggaagacaccacccaccctgagggcttttgggagcttttaaaagaaggcaagtcacgctttaaaagaactttgaagagacaggagcttagtggacccagtggagataaaaggtccaggtaaggagtggccaagcacttggaatttagaagaggcgaatcagaaagtcccaatggaccagcttgggggtttgggggttactgggtccatgtcaacatacagctcagtgggtgccaaagatcagccaggcctagggtgcagatgacagtgaggcaggatggtgacctggattaggactggagggggaacctgaggccaggagagcagggaagagattgctaaagacagtcaccccatggcaagctagttttctccccgagccagcatttctacacgtgagcactggccttgctgtctggctgggtgacttcctctctctggggttcagggcccagcactgctaatcgggggtagagtcaacggccttccagtgcaccctttggtggctctgtgtggcacatcaggcacactggtcaagtagggggtcatcaccaggccttgggtgcttctcaaacctaaagtcatgtggtcctcacaacagccccgtgatgtcatcaggaacctgcccactggcccagggctgggaaggactagagccaaagtgcaggctcaggactgtttgaccccaaagccagtgctctgaaccctccatctgtcttcattaaccaccgcctctgccactactgtaaggcaagagaagcgtgtcacggcgcgaaggctaagcacatgctgggaaatcacccgtggcttgcagacacatgcacagctactgggggtagatcaagagccaagaacgggtgagctcaagctgtgctcacatggggcgcgtgctaggtgactgtaggcctcagaaaacctgggatccagaacagctttcctccgctagggggctctggcacaagtttgcctgaagacatggccccatggcgaagccatcatgtgtgggaccttccttggccccctcttggtgagccacattcctgtccacgcagtagctccagcccccacccgtggcttttcacttcttccttgctttccacttctgaccaccctataccagaaggtacttcatgtcagtcctctcccgcattccctctgccttcgggtctcctggaattggaactgtcactagtcaatcattacttacggggatgtgcagaaagccagacactgtgctgggcctcgggcggcagaaataagacagccactgtagtgtcagctgtgtgcacccatctctccttctgacccaaacgcaactgtgatgggggccggtcctgccctttggggccatcagacaagggagcaactgacatttgcagaggccagaggagccgtggtggaggggttttctcagggctcgagggaggtgcctgcccatccactgagagctttgggaaggaaatgctgggcgccttttgtgcctcctactcatcaattccccccagctgcaggcaagggaggtcgttagcagcccagcctgtggggagcaagcaggccatgagctgcatgcagctggcactgctattacttaggaggcatcacaacaatgactcaggtgctgaccataacccttaaccaggtcacagtggctgcctaactgttgaagctgctacccctcctttaggttacaccgcacgaaaagttggcaatcctctctctcggtggctgctgtgggagcagctaacctcacagcacccgaagggatgtcatcgggaccccagctcggtttccagcatcagctgatgccagcaagaagccagccaggcctggggcttggcagcccagggactttaccatccaccatccacagggctgttgccctggacaggtcattgatatctgactcacagccaattcatggatgacgtgaatccaaaaatcagaggcccacgtggatttagacatggaaatgcctcaccagcttccatgagccagtctctgtgcggcagacttgaactgcacgggggctgataggaagcagggtgggcgctgggatgtgactgtgcccttgccagtgtttccagtctcccagctcgggttctgtggttgtctaagcctgggggtgctctgccgggtctgtggcgacccggctgccttttcagcctaatcaccagagaagccacagaaagagctggaccacttagaggggcagtctggccacagccacttggaagaacaggctgattttgtacagatgtgtcattttctcctgacttttaaactgtaaacattatataataccctagaaaattttgaaaatagatataaaccatcaataacactggcaacctaacacttttacctaagagctacccattttgatttatctgatgcgcagttttcattgctggaatcataaagacatagcaccttagattcttctcttttctttttctttctttttattataacataagcatctttcccactgctacttttgatcacttttgaggactcaaaatgatcatttttgggcctgcataatatttcactgtgtgaactctatcaccatttcaatcaggtgtttcgtttgcttccatatttttgtatcaccatagcaggtgatgattgaaaaaataaatgcagcttgcaaagtcattctgaattacatcgtggagctggagagtgttctttcctaatcccttcaaggaattacgatgatatggggagatgaaacattcatttgggggctggcgtggggtaagctttaaattgcgtttaaagtcagtgtgatagtgacttgagtttttcatctcttttctccagctccttgacggccatatttgctggccagggttactggtgtggtctttggccagagagcagactttcctctctgtgaaatgaaatgactcataaggaaacaaaccccaaggctttgggtacatttgtcccatcatctaaaccagggtttctaatcagaagtccatgaatgattgtggggctttgtcgggggagaggtcctgaagctgagcacaaaatttggcatgtttgtgataagtgtattttatagggatagtgtctgtagttccatcaggttctcaacgggggctgtggccccaaaaatgttttttaaaaaacccagctttctctctctgtctctttccccctttctgggaatccgagattgaaatgaaagaaatcgaaagatctttgcctacatacagaggtccagtaatgggatggggaatatattatccccgggatagcgccactgtactccagccaggatgacagagactccatctcaaataaataaataaataaataaataaataaataaataaatacataaataaagtgcctctttgttaaggcagttgcttctatttctacttttttaaccaaagctaattgctaatgtgttaaagtacgagattctgccttgattatggccgtccgtggttcttaactaaaggaaatgctttggcattttaaaacacatggatccccgtaagctttgcatttctcaccagggagtcagactgacacacaaatatttgtggttagttaattgttctttcctgctacaaacactcaccataggaggtgagctgtatttaccaaactgaaatgttactatttgaggctgaaggagccaaagaaaccttgaaattcaagagaccaaacccaaaagttccacccaacggagtgggagacttcagctcattgaattcctgaatacagctcggccttttgtcttcacacagcaatgagaacacatggacacaggaaggggaacatcacacaccggggcctgttgtggggtggggagagcggggagggatagcattaggagatatacctaatgctaaatgaccagttaatgggtgcagcacaccaacatggcacatgtatacatatgtaacaaacctgtatgttgtgcacatgtaccctaaaacttaaagtattaaaaaaaaaaatcagtttctgttaacaacaaactctggcaccagtcagcgggtttgacttcctaaaaaagtttgatttgctttctctcttagaaattctgtcttaaatttccttaaacgcaagtgtgtatacctggagcaaagaacatggggtgtaattcaatttctcttctcctttcttcctctgggaatctctgctaggtttcccacttattattgttgaaaactggcagtctttaaaggggatggacttcctgaaatacggcaaacagtcatgcaacaaaaaggagaaaattatattttcattttgggcgtcttagatgtagtgcaacattcaacatgagatcaatgtgccctcttgaccccaaagtattggctaatgatccataatcaatatttaggataacactggttgggagtatgaatgacatctttccaccattgtcttggtaaatgaaactatttactctttctggcagtggatgctgtcgggaggtggaaaagtaagcattttcttacgtttgggttttctgtgattgtttgattatttaatttattcgttcaaagaagagaaagatttactgcatgtctacaatgtatcaagtggtaagatggggcctgaaaatacaaagataaacaaccaaacaaacaaaatggcttttccttgaagagctcaggaggagtctggtttagaaggcagacacgcaagttctatgctactggtctgtaagaagcgctgtgggatcagaagaagggatgacttaatgggtacagagttggtgatgtgtggatgacctcgtgaacgaagactagttcttcaagcagacccgtggaggacaccacagaaaactgtgttgtttgtttagctcttttccagaacttgttatgatctcttaacaaggtctagccaatatcattataagcacgtaaaattcctcatcctaaaccccaccctgaaatcactctgacgacatgtcagccatctgacacagatgtggatagtctgaaagcccaacagttctaatcatttaggttcaatttggtctcaacagagatttttacatgggacttcatgttttacaaattattttagtattatcaatttgatcctttaaggcaggcagaaaacatatttccaccctctactttatagataaagccattgaggctcagagagattttaaaattttactgcaaattacacaggcttctggttttgtttgtttgtttgtttgtttgagacagagtcttgctctgtcacccaggctggagtgcagtggcacaatctcggctcaccgcaacctccccctcctgggttcaagtgattctgctgtctcagcctcttgagtagctgggactacaggcgccacccaccaccatgcccagctaattattgtatttttagtagagatggggtttcactgtgttggccaggctggactcaaactcctgacctcaagtgatctgcccgcttcggcctcccagactgctgggattataggcgtgagccaccgcggctggtcagattattcaattttaaggtcttacgggccacataacatgattgcctttctaaaagaattatttattcatggaagtctgaagcaagagtctcttgaagttcttttttgtccttgataaaatatttacttttcttgttttatcctcctacgagatccctactgtccatgcccacggcctagattggtctctggccttgagccttacagagcatgctgggtcccagggcttgtcctcaatgcaccacacgcagttggctcatgaactaggacctctgtgtcttgaagtgggagtggatggtaggaagggggagatggaaaagcaggggtacaaggctgatgctggcagcaatgaagaccttggtgattcgtggaccatagtggagactgagagggagtggagaggcgaagagaaaccagagcatcattcctgatggagccctgtgttacccccaggctcctttagggcatgagagtgccagggctggaccatctccaggctgcacactttttctctgcagctgtgagcagagcccaggctgtctgtccctcagcatcccctaaatctgcgatgcaatcatagcccctgaatgttagggctggaggcaactcagagatcatccacccacagccctcgctgcacagagacagaagcaatgagatgaagtgactcgtacaagattgcaccttgggctgcaaaattcataccaagtgatccagggaggcctttgaggcattgcattcccaaagtgccttctaaatagttagccagagttatagagtggtgctcagaacaggttgtggacgtttattgaattccatgtgatttaagtgtggttggcgggcagtccacaccaccgccgcgcactgcatgagaaccctgtgtgaagggggcttggggtaatggagcagctgggcccgacccaggtggattcagagtctcccatcactcggagaagcctgcaccttggaaataattcaactccttggtctgacttttgcaagggaaatgtttggggcattttataggtctccatggctgtggtgttttatgacattgaacccaataaaactcgtaatgacacaggatctgccaaggggatcggaccttcccttctggcacaaggaaccattctgttttggtatcccaggaaatgagtggaggaaaatccttgttatttcaagtgaacagggtctgggcaaggtctctgtccctggtcaccttgaccatgtgctacctgtcactgagtctaacggttgctccaattcagctgaaagacaggactcagcaaatagagccttgatctgtccacagggtactcctgtccactgttccagcaaatgtgagaaaacccacttgtcctttgcgagagagaggcaatgctgtcttagtcccatcctaaaggcagaaggacgctaaacaagggtgtttgcgggctacaggcaagagccccgcaatggcctccccgagggatctgaggcccagcaggccatcccaggtctcagaagccttgtaagagcacagtggaggacccttcttgcacgctgagctctgagcagtgaggggaacagctgggagagaggctggggtacaagtgacacagtgcagagatgctgctcccagccgaagctgccactgtgggccttctccatccacccagcccctgtaattgcactgcccccacctctgggctcgagtagcccgtgagcctgctttctggacccatcctggcaagttgctggtggatatacctatgcagcagggcaactacaggcttaggagggctccattccagccctggctgagcatcagaatgggggtgagaggtaaaaaatacagattcctggccctgtttcatactttctgtatcatatgcaggagcccaagaagctattacagtcccagatcatttctgatccaacccaccagtcagcaatacctgctcaaatctaggagtcactgacctcagccccctccccttcctggggagctcccactccagggttgaggcacgcacatgactttcacctcttctggagtcctcccctccacattccccaacaagctgctgctctgagattcttcccctagtctctccacacaggccagcagtcactgcaaacgcccagttgcaatgcaccaagaactttcagggttttgccccgttttgctggttggtgccaggagatggaagctctcgagtggggtgtgctgtcccctgggctgggtggaggtggccacagcagagaaggaagatgggtcctggaagtacaggcggtctgggcttacatcctccctgtgccactcccggctgagggacctcgagcaagcttgacctccgtcagtcttcatttctttacctgtagagtggaggtctggaagccggcctcctgggatgctttgaggatgaccaggagctgagaggtagtgccaggggtcagccatgtcagtggctccacctgagtcctcagggcctgggggagtgtctgggacgaagtaagcagccggcgcacaggggtcctccctgctcccctttaattgcttgcgtctctctggggcattcttttactgtctttggcttcttcctttgctgcagccctcatctggatgcctgcctctatttcccccttccttccattttctttaactgcattatttttctgtctttagaggccagtcacttacctccttaattttcaaagttttgtcttttctaatattgtatcagtgcttaaaatgcaattttccccgccactgtagtgcctcatgtcatatgtgctgcgctgcatgcggggatggcccagaacagcttcctgcagtctgtgttcttcagaacagtggcttcaaacaggaaatcaaacagggaattgctttagttgttcatgaaatcaagtgggctcctgctggcattttaaaaacaaaatcatatagaatagagaatacccaggggcattgcctgtaggaaaggctttgggaggcttttgtatcctggtgtggggatgggtgtgcactcgcgtgcctgggatgtcaggcactgtagatggaacaaaagttcatgcccagatgaactgataagcagatcgtggcctgtacattccatggaataccactcagcctttgaaaggaaggaaattccttcacatactgctacatggatgaaccacgaagacatgacgctaagaggagagagtcagacacaaaggagaaacactgcaattccatttaaatgagtccctggagtagtcccattcagagaacagaaagtagaacgggggtgcgagagcctgacgtctttctcactgacagccacagtaacaaagaacagaaagcccgacagacactgtcgtggatgctcttagaccacaccgcacagtggagacttcacagaccccgagtcctgcacttggtgggtgggtctcacgaccgcccttcccccttgcggtgcaaagaaagttcaccgccctattgctgtctctcccagaggatctttctgacctactcaaggaacatttattaataatctattgagagaaagacaatctagtaggtcttatgcattttctatcttctcccatttttccatgaacgatatctgttatagcagccctgttaaactaactccccgacccagcccccagcccctgacacctgttactctaccatctgtgtcgatgaattgggctactttagggacttcatttaggtggaatcatacagtgtttgtccttttgtgtctggccaatttcacttagcacaatgccttcaaggctcacccatgttgtagcatgtgccagaatttccttcctttgtaagactggattccattgtacatatagcccacactgggcttatccatccatctgtccatggacactggctgctgccacattttagccactgagcaacactgctgtggacacaagtgtacaaatacctgctcaagtccctgctttctgtcattctggatacacacccagaactggcattgctggatcatatggtaattctatgtttaatttgtcgaggagactccatacaggactttgaattttactctgaatgagagggtgacactggggagttctgagtagggaagcgatgtgatgggacctaacatttttatagggtcacagtgggctgcctttgggaataggcaggtgggaggacagggaagaggagagcagggaggagttgctgtgtgtatcctggaaagaatgaaggtggcttagacccggctctcggccaaggcagagagatgtccattcctggctgcctgtggacgggagagccaacagaaatcggggttgcatgtggatttgtatgtgcagaatacgagagaaagagcatgaggaagagaagatggagctgccattcacagcgatggaaattgaccaggaactcacctctggccattttaagtctgagacatttactagaagtccaagtggccacagcacttggtgacattgtcagctggtcctctgacttctaccagccactttccctggcccctttttggcttgagcctcccagctgccaagcacgcctggatgttccagatgttttcaggttcccagagcccttgctgtagcagctcaagccttcctccccggcctcatctgctttccccgtgatgtttgagagcttttctcaggtgtgtgggaggaaacagcatgttgggggccaggagacagccacccagaccttgacaaggcaggggacggcttcagctcccgaagaccctcttgcgttcccagccaagccagaggcttacaggctgctgaacgcacctgaggcagcacccatggtgcagccctggtgctgcaggccaagctcttggtcctgtcacagggagaaagtctatgccccgacagcttgaacctgagtcaagggtcacctttcagagctgaaattgacttcttggaaagccagagaaatgcattttcccatagcattgagggcaccccagccctgtgcccactgagggagggaagggggcttctagaggcatcatcagagcaagatgtgagctggctttgctttgacctcactgtcagggcctgccccagatgccagcactcagagctcactctgcagaagagggaaccgaggctgggaggggcgagagagtgtgcagggtacgcagtgggtgaataagtgagtcaggtagagagcccagttctcctgggccccaggtgtgccagcagcctgcacagagtggccttggcttggcggtctttccccacaaagcatggactctcagaatcagaccccagctgagacgaagcaccagatggattgctttttagacggtgcatcctgttagagcttaggcttcccagagtgaatacgcactttcgtgtgagtttttgcaatgcattcacttttttagaaaacttccctgtagatgcccgctagatactgggttctgattctgaacacagacaccccactgtaggtggattggtggggggcagaagattttaatctttgggaggattgaggggtgtctctctcccttgcacctctgaaggtcactgtcacgctgttgctggcatctcagcatttccatccacttctctatttccactaacaatgccctagctctgccatggccacctctcaccgatctcctgcggtggcctcccatctagtgtcctgcttcacccgcaccccacaatctcctccacacaacagctgcagtgatccctttaaaggtaagtcagctcctccttaaaaccatacaatggtccaacacggcatttggaaagaaatcccaacccttccccagctggtctctgggccctgccctcctctcaccatccctggctgctctgctccaagtgcagggagcctctttctgctctgggaatctgccaagcctgtgcacttttagagccgtctctctgctctgccctctgtgctttgcaaagcctctccttgccactgaagactccagcatacgtcgcactttctgggagaggtctttctcttatctaaatacccctgggcctgtgcgatgattctgtcccgtcatcctgtttgaatttctttgtggcacttacctctcctagaaatcagtggccgtttactttgctagtctgccatctgccttcccctctgctctcctccctgcatcaactagaatatgggctccacggagcaggagctgccagctgtggcctccagcatgttgcaagatctgtctcaaaagttcttgttcaggggataatggattcctcaaaggaaggaatcagaccctctctgggactcccctgggtgctagaggacctcgctaccttcatgtggggctgctgggagccaacactgtcacagcgtttctggacagcaatttggctgtctagaccagaagctccgaaacagttccacggtattgaaccaaagcaatttttcttctgagagcctaaactgagggaaaaattctaaaatgtaggcaataattcatacacaaatattagatgaagctatatacatacatccacatgtagtagggaaatgtcaaaagtggtatttactattagcttgaatgacattaaaaaggtttatggtacagtattaagtaatatgaaacatacaaaagtttatgtacagcatcgtaacagttcatgcttatttagaggacttgtgccagtcaccacatcgagaactttatttacattttctaattctctgaacaaccgtgtgaggtagttattatctcaattgtattgactgagaaaatgagacatgaacagatcaaggaagctgacaaatatggcgtagtttgtaaactgtaatgtgaggatttgaatccagagcctctcactccaagcactccatttaaactctactgtatgctgatttgagtttcataaacaacttgaaaatgtgcatatcccttgccgcccccactatcagaaagactaagaagaaatacaccaaaatattcacagagattgcctctgggtattggggttctgggaaacgttttctttataatttcctgtatttaaatatttttctgtaaagagcacacatcattttcatgtaaagttttgaattttatcaaaagattagtagtcacacacaaaccacagataactttggctaattaatatagagtcaaaaatacttctataaaacaagctatttcaatcaaacatgatgtttaatatgattaaggagggctcattccactgtgaaaagacaacttagcattaagaaccacatagccaggcacggtggctcacaagtgtaatcccagcactttgggaggctaaggtaggaggatcgcttgagcccaggacttcgagaccagtgtggtcaacatggtgaaaacctccctctataaaatttacaagaactagccaggtgtggtggtgcatgcctgtagtcccagctacttgggaggttgaggtgggaggatcacttgtgcccagaagattgaggctgcagtgagccgtgatcatgccacacacttccagcctgggcaatggagcaagaccttgtctcaaaaaaaaaaaaaaaaaaaaaaaggaagaaagaaaaagaaagaaaagaaaaggaaaagaaaaaagaaaaaaggaaacataatcaaaggcatccctgtaaaagcttgttgtaacctaaagaaaaaggaaacttcctagatatcttctgcaagcctatagccagattcagaagtgagagacgcctgctaacattgagataatttaactttgttttgggaattcttgccagtgtaatacaacaagaaaaggtaatacaacatctacacatttcgaaaaaaggcataacagatgatctgtttgtctttcagggaaatctaagacaagtaattgaaaagctattagagctaataagagaactgaaatagacaaaaatcaatagctttctttttttcaacaataacattagcaatgccaattctccaaaaattgtatataaatttaaatttaatgccaataaaaatgaatgcaggaattcatagcttgtcaaaattatagccttaagttaaatcagaaaaatgaatgagaaagaataatgaagaaaatcttttaaaaaagaactgaaactgtatcattaaactggagtaattaatttatgtggttctatgcaggaaaagacagagtccagaaataggcccatgattatgtgggaattgagtaagtgataaggaaggcaattcaaatcagtaagaaaaatggcttttaaaaaatttattatctaatatttgatttgtcaagtcattaaataattatctataccctaaagatatcctgtattttttctaaaagatttaattttcacctttgatttacaattaataaaattttttcttgagacagagcctcactctgtcaccaaggctggagtgcaatggcaccattatggctcactgcagccttgacttcccaggctcaagcaatcctcccatctaagcctcccgagtagctgggactacaggcgtacatcaccatatccagctaattcttctaatttttgtagaggtgaggtcccactctgttgctcaggctggtctcgaattcctgggcttaagtggtacgcccaccttagcctcccaaagtgctgggattgcaggtgtgagccactgtacctggaccatatttatgtctttaatcaatttggattcaatagtcaagaatggttgagcagtaaggccacagttttatgtgaagaaaaaagttttctcagcctcatttatcgagtagctcataccgccctggagacgcacagtgcctccccggcatgtgcatgagggtccgtctgagactctccgttcacttcctgttctatttttacactccctggtccgttccatcttcattactgcagcttttagtaagtgtggacatctaggaggggactcctctctatcttggttttttttctcttcatagatatcttttctatttttgagccttttcttatgcataaaattttgaaaaccagcttgtaaagttcctcaaaaacaccctttggaatatagattggaaacacatttgatttttaagtaatttggagagaatatgcctcttaatgatgagtcctcctaatcatggtaaatccatctttccttctgtttaagcccttctttaacatcgttcagtaaagtttacgtctccatacaagtttgcacatattttattaggtccatttctaggtaaattatgtgtttagttggcattggaaatgagctataaaaaaaaactacatttttctaaatggtcaaaatatatgaataggccgtatacagaggcaaagaatccatataacccatgagcatctcaaatataatcaagggaaacaaattaaaacaaaaagatttaatttattacctattccactagtaaaactaatgtttgacaatacgagttttggtgagaatatggggaaaatgaaaactctcaggtattgctggtgggatgataaatgggttcgatcgctttggggagtgttttgggaacccatagtgccactgagggaacatagcccactgccctgtaagtccataggtaaattaaatatctaaattccctgtgttgttcagagaaactctcacatatgtgcaaaacagggaatgtatgaggttgcccatcccaatgcatttcatcattttgaaacagtgtcccttagaaaatgaatgaataaaaggaagtttattcacttaatagaaaaggatacagtaaaaaaaaaaaaagcactgggaatctgtgtattacaacaaacaaatctcaaaaacacatatttctgaaaaaaaaagcaagttgcaaaaaggttacatacattatgaagccatttttaaaagtctaaaacatacagagtagcaatatatattgtttataattgcttatacatgtcgtaaatgtccaaaatcatacatggttaacacctactaactccatgatcattattaattttggagagaaagagaggagaaaataatgaccaatctttagttgtatcttcatatctggaacataaaaagagagaggaaaaaaagagaaggaagaaagtgtaccaaaatatgaatatctgtttgatcttagcagtgtcacattattttctgtgtttttttatacatttaaaatattcatagctagtggtgaaaaaatttcttaaatagttgtatatttctatcatctaggagtgaggaagacatttgcaagtgtgaacgacacaggaaagattaataggaaagattaataaattgactaggtagaaatgatagcttttactgcataatacataccatgctgtaatacataatacaaacacaaagttcagttgggcatggtggctcacacctgtaatcccagcactttgagagaccaaggcaggaggatcacttgaagtcaggtgtttgagtacagcatggcgaacatggagataccccgtctctactaaaaagacaaaaattagcgagcatggtggtgggcgcctgtagtcccagttactagggaggctgaggcaggagaatcacttgaaccccggagaaggagattgcagtgagctgcgatggcgccactatacaccagcctggatggcagagcaagactccatctcaaaacaaacaaaaaaaattagtaagttaaaaagcataacctaaattaagaaaaatatttacatttatgacattaatgtaaaaattaaacatatttatcacataaagaggtcttccatatcattgagaaaatgataaataccttaatgtaaaaagtggtagaagacgtggatgatcaaatcataataagagaaacacaagtggctaataagtacatgataaaatcaatagaaaagtaaattaatactatgttgttcatcacttttcactgagcagattgacaaagttgtttttttttttttaatttgttataaaccattgtccagggactggagaaatggcttccttcatcacggtgagaatgtaaaccagtcttacctttataaacattaatttagcttcatagatcaagatctttaaaaatgtgcatattcttaaacaccataattccggttatggaaacatagcttaaaaatattggacaattgaatatttaccttacaacaatgtttactgtgggtttatttataacagccaaaagttgaaaataacttatttgaccattagtgattaaataaattaatggtaaatttgtacaatagcatgcagttattcatatggttcaaaattacatttatttatatataatttatactgtactgttcacagaaataaccaagttatgacacaatataaacagtttggcccatttttcaagactatatgtatatgtaacacctttgaaaatgcatacactgaacattcacaacgattttccattggtggtagggttgtaactgattttttttcctttgcgtagatgagaattttctaattttctacatgtgcagtacttgcttaataaaaaatgagattgaaaagtaaaagaccacttttttgtaagccagctcagaaaggatgaaaagaataataacccttgtttaagaaagtacagggaactacatacttccatactgctgtacgaaatgtctgaaggacaatttgccaaaatatatcggaagacttagaaaggttatgtatgctcttgagcgtgggaatcccacttgtgggatttttaacctcaacaaaaattaagggaagatatgaggaaagagaaagggcatgagcaaaggacatttttgcagcatgtttatgatcttgagaaaatggaaacagctggggtgtgcggcagaagaagtggggaaaatgacaacggttcattaaacctcacgatcagatgctgacagcccctcacaggttgctgcagacaaaacagggaacgacaggaaaaagatgaccgtgatacgctctgctaaaagcaggtcgcaaaacaggatgtagataatgatcccattttgcttttttacaaaaaaaaaaaaaggccatggaaaattacatatcacgaatgttcagagtggctgtctctggatgatggcattggagttaattttatctttcactctattttctgaatttcctatatcaaaagcaaattgatggtgtgaaggggaaagcatatttaatgtgattcctaaaaggctcagccctccctgcatggattgagcactgaaagaagagggttctgtcacctctttcgtcctgacccttgccttttctaatgttgctcagaggcacacagacgtatttgctttaagtaattgcttgtctgtttttaatatcacattttgaaaaggtatttagacaacatgagtttattactttctgtttaacccaaatccttcagaggtacttaaagcaaaatgtaaagtcctcttatccctttgtgaatttcagtccccagaagtctcactgttagtagtttgatttttaccaaaaatgtccaggtattttcttttcatctgcaaatgtgttaatagactcctttttttaaatttcacacaagcaggattatatcatacaaaacattctgcaatttactctttcatgtaacaataatgtatcctgggtatttttctttgccagttcagatctcttttatccttttactaatttatttacctatctattcatttgcttaacttgattttattattatacaagttatccatgaatattgttttcaaaaatttaaacagtcagaaaaggtataaactgaaaactcaaaagttcgccttccctgccaccactcatgtgccctcctcagaagcaaggaatggagcagcttttgtggggttttttgttttttctctgagacagagtctcattctgccgcccaggctggagtgcagtggcatgatctcggctcactgtaatctctgcctccctggttcaagcgattctcctgccttagcctcctgagtagctggaattacaggcacccaccaccatgtccggctgatttttgtatttttagcagagacagggtttcaccgtgttttcattagagacagggtttcaccatgttgcccaggctggtctcgaactcctatcctcaggtgatctgcccgcctcggcctcccaaagtgctgggattacaggtgtgagccaccgcacccagctgcagcttttgtttttaaacattcttttcattacagttacaacttcaagaaatactaatgccaatatctctgagctaaatacactgacagatgcagaatgcacttcatcatgctgtctcttttcttacctggctttcacctgcacactcccctctccatttcctagatttttatcagctgttttgtatcctagtgattggctttatgactttaaataatatatttaaatgtttacgtctcaattcattagctttaggcagtatctgaagttaacacctgctcacaaacactgctttcaaattcacatcctacttttttgttatactgttatttttacatattaaggcttatcatatatatattctggctggacttggtggctcatacttgtaatcccagcactttgggaggccaaggcgggtgggtcacctgaggtcaggagtttgagaccagcctgggcaaaatgatgaaaccccatctctaatacaaatacaaaaattagctgggcgttgtggcacatgcctgtcgtcccagctacttgggaggctaaggcaggaggatcacgtgaacctgggaggtggaggttgcagtgagctgagactgtgccagtgcactccaccctgggggacagagcaagactctgtctcaaaaaaacaaaaaattatattctgttgtgttcagtgcttatataattttactgtgtttcatcagtaggttagtactcaaaactttttcagttgaaaatcaggcactacaataatataactatgtaaattttgttctgtagaattaagtgggataattgaatacatagagaaggccatctgatactatgtcattaaaatttgccatttgagggagaatttcccaaatatcaaggttttatgaagcctctttcgttttcttttatgtgcttgggggtcacactcggctatccttatttcttataactcatgtcattcttatttgcagttttgttagaggacgtcctagtgtcgcttattctttcctgtacgtgcatgctcgcaaggggtctttcactgtccttaaggcttaatgtggacgtctagacagcaataagctttttctaccagcttacaaaactcaacacaccaaagactatacaaaactcaatacccttcaatggcttgcaatgctctttttaaaagtcacctctaagggggtgtaaataacattccacaaaattcacccatttggggcacaattatgcatttttgcaaatatatactcttgtataaagtccaccacaatcaaaatggacaacattttcaccaccccaataagtttcctttagccctttctgttcataccccttatgctacctccaaccactgatctactttctagaaccatagctttgccttatctagaatttttctttctttttttttttttagtggggaaggagtttaattgacataagcctagcccacacaggagaactgagttgtcactgaaattagtctccccaaaggtgtgaaggtcaggacttttatggacaatttggtgggcaggggaatagataatgggtgttgctgattgcttgtaaaagaaatcgtaggggtgtggaaaattgcccttgtgagtgagtactcctttgggtggggccacaggacaagttgagtcatgagttttgagtttgggtggggtccattggttgccagaatgcacaagtctgggtgtaaaaaaaaaaaaaaatctcaaaagaccaatcttaggttctgcaatagtgatgttatctacaggaccaaatgggggagtcagaaatcttgtgacctctggccacatgactcctgagcagtaagggattacagaaattatgcctacattttagcagaattcaggtccccccataatcctgttcttgtgggctttcttagtcttacaagggtgatttttgctccctgagcaaggagggggttagttttggggagggactattatcatccttgctttttctttgagacagagtctcactctgtcaccgaggctggagttcaatggcgtgatctcagctcactgcaatctctgcctcccaggctcaggtgatcctcccacctcagcctcccaagtcattggcactacaagcacatgcctccatgcctggctaatttttgtattttttgtagagatggagtcttgctgtgttgtccaggctggtctagaactcctgagctcaagtgatctcccaccttggcctcccaaagtgctggaattacaggcatgagccactgcacttgatgatcattcttgcttttaagttaaactataaactaaatttcttccaaagttactttggtttatggccagcaatgaccaaggagagcttggaggtcagaagcaagatggagtcagccatgtcagatttctcttactgtcataattttgcaaaggtagtttcaatccccctcacacacacttgggcttcagcacccctcaatcctgaggtgttagctacggagatgagaaaaggctaatgattgctctaacttcttcctgctgacagggggcatatttgggggaggggttgaccccagggtaaaaggagtggaagtgtcttgcagttgcctgtatgtattcaagtgcaacttgttggggtccaacatgtgtataacgaaaacattggtgctcttatccacagatttagtacagcatttaagaagaaaaataatgagccgtaaaaaggaacgagattatgtcctttgcatggaagtggatggaggtggaaggcattatcctcagcaaactaacgcaggaacataaaaccaaacactgtatgttctcaattataagtgggagctgaacggtgagaacatatggacacacagaggggaataacacacactggggcctattggggagcgggaaggagagcatcaggaaaaatagctaatggatgctggaccgaatacttaggtgatgggttgataggtgcagcaaaccaccatagcacacgtttacatatgtaacaaacctgcacattctgcacacgtaccccataacttaaaatttaaaataatagtaataataataattagccctaatataaggagtgaaagtgtaaatcgcccagtgggttcaccttgcccgctgcctagacaaagccaatttatcaagacagaggaattgcaaaagagaaagagtaattcacacagagccagctgtgtggaagaccggagtcttattattactcaaatcagcctccttgagcattcggcgatcagagtttttaagaataatttggtgggtggaggaagccagtgagtcgagagtgctgattggttgggtcagagatgaaatcacagggagtcaaagctgtcttcctgcgctgagtcaattcctgggtgggagccacagatcagatgagctggtttcttgatctgggtggtgccagctgatccatcaagtgccaggtctgcaaaatatctcaagcgctgatcttaggagcagtttggggggcgggagatcagaatattgtagcctccagctgcatgactcctaaatcataatttctaatcctgtggctaatttgttagtcctacaaaggcatctagttcccaggaatgaaggagggttcttctgggaatgcgctgttattgtcttcatttttaactacaaactataaattaacttcttcccaaaattagttcagcctatgcccaggaatgaccaaggacagcttggaggttagaagcaagatgcagttggttaggttagatctctttcactgtctcagttgtaattttgcagcggcagtttcaaaagtcctagcttcaggagtccctgtagaactgacctgaagcctcaaggaatccaggtgaataaccccaaaaatcaaccaaatatggggtcatcagcagaagctcaagaacaatggatgaggctggaatctaataacaggtgtgctgtagctgttttgaaacataatttttctctctccagtttatttttactaaagacaagaccaatttatttgcaaaataagcttgccttattatactttgcctaattatttacataaagtgcagcaagaataattattggccatataggctctttttttctaactggctttgctggaatttttttcataaggaatctcagattagaccttttaaaagtctcttgagcccagccaaggatttatttgtgcctgcagatacttgtatgaattgggtgaattcctttcttcttgaggtcccaacaaagcttggagttcctgggcctgtcagaaagtgacattctttatttgccacaggttgggaatcctgtacaggacaaggtaggaggccagttcctccaaggggctttcatcagctctgtaggtcagcctcgatttcttaaagcagtctgaaaatatgtcatttcagtcaaagccttggtaaaataagcagtgtctccaactgtgtcttgctacaaaagaaaacacattcttattgaacttactcaagtaactatattgccttatgttaaaaatagtcacagataatttccaaattctggagaaggcaggtaaagagaaagaaatatgctctaaattttgtttacaggagtatattttgctcaattgttaaaagttgtattctcagtagaagttttctttactctgaaaaacaaaacaaaaagaatcagcaacattttaagtgaaaagtcgaaaagatttttccagttactgaacgttttggttgtttccagctgggagctaattaatatgagtaacaatgctaagaacatatatgtcaagtctttctgtggtcatatgtttttatttctcttggataagcaacaagaagtgaaatatctgggtcacaggttaagaagctcccaaattgtttcctaaagttgtttcgtttcaccttaccatcagcctcaggtgagcattctagtttctccatatgcttgccaacacttggtatgatcggtcatctaattttagcatctgggtggttgtgtggtggcatttcactgtggttttagttgccattcccctaatgactgacgacaccgaacacctgttcatgggtttgtgtgctgctcagctgtcttctctgttcaactgtttgttaaattgaatttttggcttcttttatagagtttaaaagttaattatatattctcatatagatacatgtttttcaaaaatgtcctgcctgtctctggtttagctatttcttttcttaatggtgtttttaaagtgcagaagttcttaattttgaaaagtctaatttatcaatttttcttgtatactttatgatcttctattctaagggaataatctattctaagggaatagaaggtcacgtttgtatgcttctgactcatattctttatatcctttgtgacaccaaggtcacaaagatttccttctaggttttcttctaagaatataatgtacctctttaaagcagcttttaagattgtttttatttatcattggttttcaacaatacgattataatgtaccttggtgtggttttcttcatacttggggttgatattcttgagtcttcgggtctatagcttctatcaaatttggaatttccatttttggtttctttaagtttcatagtctttctggtagcccagttacgtgtcttctgactgcgtgctaatttctccccagtcactgatgctctgttgtttatgttcacctttttctccctgtgcttcactgtgggtactttcaattgcagtgtctccaagccctctgaccttccttctgcagcacccaatgtactattcatcccatctagagttttggttgtttgtttgtttgtttttgagacagagtctcgccctgttgcccaggctggagtgcagtggcaccatctcggctcactgcaaccacagcctctcgagttcaagtgattcttctgcatcagcctcccaagtagctgtgattacaggcacctgccaccaaacccagctagtttttgcatttttagtagagatggggtttcaccatgttggccaggctggtctcaaacccctgacctcaagtaattcacctgcttcggcctcccaaagtgctgggattacaggcatgagccaatgtacctggtcatgtttttttttccttttataaaaaattttaatatttatttatttatttatttatttgagacaaaatctcgctctgttgcccaggctagagtgcagtggtgtgatcttggctcaaagcaacctctgcctcccaggctcaagcaattctcctgcctcaggctcccaagtagctaggattacaggcacgcagcaccatgcccagctcattttttttttttttttgtatttttagcagagacagggtttcaccatgttggccaggctggtctcgaactcctgagctcaaatgatcctcctgcctcggcctcctgaagtgctgggattacaggcatgagccgccacttctggcctctcttttttcttaatttcagatattgtattttttttaatctctaggagacccatttaatttttttatgtcttcattttctctcttcattgtcttattgctttcagttatatatttgaaccagtttatatatttttgtcatttctgttttaaggcactagtctactaatatcaaaatgtgtgcaatttctgctcatgttcctctcaattaacttttctcctagttgagagtcatgtttttctgtttctttgcatgcctggcaattgttactggatgacaggcactatgagtgctgaatatgattagtgagcgctgaatattatcgtgtttctttagagagtgtcacacttgcatgtggcacactgttaagttacctgtggataaaattggtttttgaataacagttctgtgacttactgtaccttcagcaagcccttaagcctcaaggagcctgagtttcttcatctgtaaaatgggaaggtatatgtctgctgtcagggctacatataatacatgaaaagcatgcagtaaaatgcccagccttgagtcagaaggtgtactaggcactgtgccagcatcattagtattcatgtttttatgtgataggcaaatcctgcaaccgttttatgagttaattttaaatctctgcctctctagcaggacatctgtgtctctagatccactcagtaattacaatcaacccaagcatgttaaaggcctgagaccttttcttttctttttctttctttaacattttccaatctcatgtttgaaagcataaaagagaacctttcagtctaaatgttctcctgcaccctcaaacccgatggaggtgcttctcactgcacgctcccttcttacacattccacctctgggttctgccaaggaaacattggagaaacagctccaaaggattgaatgatgtccagggccttttaagagaggttcaagtcgtgaccagatgtgtatctgggtaagatacgtgtgaacctccgtgggaaagaccaagggtttgaagtcagagatgtggctcaaatctctcttctgtgcttcagtttcttccctgtctgccggaggaggaggaggaggaggagaaggaggaggagaggagtaggaggagggggaaggggaggtggaggagacggagggggagagggagggagatggggagggggaggatctatctagtttacagggtcctcatgaggctcatgtgggaaaatgctttgcaggctggaaagtaccacagaggtgtgagttattataaaaagggaagttatttccctctgtcaaaaagctatgcagaaatatactaatatgtaagaaatgtttgtatggaggacagaaataattcatttcatggagagacaagaggatcactggcagtaaaactgcaggcattatttatgggagactcaaaggagggaatgccccgtgttggcgggcctgcctttcaatccttgtcacaagtcatgatccagaagctcggccaattgaagaaagggtctccatgaagtggagctcatgacctgcctgcatcagcatcactgggggcattttttaaaaatgcagataccagcactgctggggctggggttgggagtctgcaaactcccctgctggttaaaatacaaactgaggtttcagaactattgtgccaaagaatcataactgactccattgggaagtaatgacccatgatttgatttctcatttaatttttcaaaatgcaaacaatgcaaaaagttaaaaattgaaaaataggttaaggcccatagtctcatcaatacaagacacaactgtagttggattaacattttggcatattgctaacatattttaataatcactactgtgagagttttttaaaacataaatttacatggtgttccccccccaaaaaaattcactcacataaaggaattttatccgtccccagaattacctaatgaatttcaagcttctctgttagcagaatcaaatgtaggtgactcgataaacaagtgtctgtctttgacttaacacagctttataaaaatgccttcttccttccttcctgaaggtctgctcagcaccctcaaactttttaccacctgaaaatcttttctatcaattttaccacaatggggggaggtgaatttccacaaaagatcttttcactttaaaaaattgaaatggccacataatttctcctcctaactgtgccgaagtacctaaaagtcacaggttggcattgctaggtcagccttttgcaggggccacacgtgcccaaggcccttacacacccagccaggtgttacagagcagcctctcaccatcaggctctgtgctagtgctgggaaaagattctgctggcatttaaaagtattgcacaaggaggccagatgcagcggctcatgcctgtatccaacccagaactttgggaggctgaagtgggaggattgcttgagtccaggcattcaagaccagcctgggcaacatgatgaaatcccacctctacataaaattgtttaaaaaattagccaggcatggcagcacgtgcctgtggtcctagctactcgggaggttgaggtgggaggatcacttgagcccaggagttcaaggctgcagtgagccatgatcacgcctctgcactccagtctgggtgacaagagacagacagatgaatgaaagaaagaaagaaagaaggaaagaaagaaagaaagagagagaaagaaagaaaaagaaaagaaggaaaggaaagaaagaaagaagaaagaaagaaagaaagaaagaaagaaagaaagaaagaaagaaagaaagaaagaaagaaagagaaggaaaagggaagggaaggaaggaaaggaaaggaagggatatattgcacaaagcattagctgtgaatgactgtagcacacactctacaatccagcaatggaaaagctttgttttctgaacgtgttttctatcttcatgtgtttggaaaaacacctatttctgaaatactacccaaccctgttgggagtatgcctggtatttttttctagtgttcccagtttctcatcctttgctctttcaactcccaactaacaagtgtggaaggactgatggaatcagagcacgcccattttgtaaccactaatgggacttttaaatgtcggtgaggaacttgtcaatggaggaatagggatgcctgagcctcgacctatcttagcatcactaaaatggtgcaggtaaacactgtgagcctcctggtaggatgcaacatggagcacagatcacctcctcgacagcatctctaccaagaggggctgagcttgaatctaatggagcctacagaggtaactctatgtgtaagaaggacgagagggaagagcaagtgatgaaccatcacaaggacgcaaaatccaaaatggagaacattctataggactggcctttacaaatcaaaggcttgaaactaaccaaagtcagagcagaagggactcctgtttaaaggaaacctaagacgttgagttatatacgaaccttgtttgaatcctgagtaggacaaactaagcaagaagctatttttaagtcaattgttaaaatgtgattatgaattgggttcaatggctggatggttagatgataccatggaaatattgctagttttgttagatgtgatgaagtaacattggggttatgtgagcaaatgtctccatgctttagaaacaaatgcaaaatatggggtggtgaaatgacttgcttcactacattgatttcatgttgtttccaagtttcattcatttagaggaaataaaacgatatgatgtaaaatactgcaacccagaaaacaattttaaagataattattgaatgtgggtgatgagtgtagaagagttctattattattaatattattattttatttatttttttgagacagtctcactctgtcaactaggctggagtgcagtggcaggatcttggctcactgcaacctccacctcctggtttcaagcgattctcccacctcaacctcccaagtagctgggattacaggcatgcgcctggctaatttttataggcacgtgcctggctaatttttgtatttgtggtagagacggggtttcaccatgttggccaggttggtctcaaacccctgacctcaaatgatctcccacctcaacctcgcaagtgctgggattacaggcatgaaccactgtgcctggccaatattcttgactttagtatattttggaaggtttcataaaaaatagttttcatctaaaaaaatctgttgtagccatccttctcaggtctggctagcgttttctcccaggtggaagtaatttctttttgctgagctcacaaaacactttacccaggcctctctttggtacagaatcatgcccactctgaactgatggaatcgggtgcatgcctttcctccttattttcctgtgagagtgggctccatccttgtttcatgcctgtaccttccgctatgcctgacatagttcatggttgacagcaactgaatgtctgtggctgaatgaatagaagaacctcgttgctaggaactgttatcggggctgtttcaggttcacatgtggagaggtcagtattagggcaaaggtgaggaagcctcatttcagtggtgttgtcctgagttgagacatgaaacatgaattttaactcaaattctttggccccttctttaattcagagccataggccaatcaccgtactttcttcatttacaagatgagtatagcattggtggtttgtactgggagaatttggaattctggatgttggtgagatgctccatatgggatctcatgccggcagctagcatggcattgtgatcgcgacacccagggtgagtcccagctttgccagtaggtacccctgttctacctggatgctacccacctatgtctggcaggtcaaatcagaaaggcaaagcctccagcacataacatggcaaggcttccagatacaaaatagcaaaactattttgccacaggggagatgatagggaatctgaactgtcccctccaagggacacagagcctcaggcagggccacaggtgcacctgttttgtgcagagggctcaagcagccctggagacagtaacaccctccagctgccagctctgccaccttcagcatgaccttaccaagccacctcgcctcgccttcttcagtggtaaaatgaggataactgtaaccaatttatcaaggctaacatgtattagaaaaaaagaaaaactcgttatccgtcaagtgcttttcaaccatgtcatgctagccaagtgcaaataaggggtttctagtttctctatttttagttgatgcctccaccacaccccttgtttgactgaagctgtgtttcaggctttgagcatctcccaaagcaaacattgactgccctgctctggtgaaagtctgcattagagggcctagctggtttcaaataaacaaacaactcccctttcccacttcccctcctcttgctgactcccccgactagacacacatgcacacggtgcacatgcatgctctctcacacatgcatatacacgtgcacacatagacacacacacacatatatacacacacatattcaagcacatacacacatgtgtattcacacgcatgctctcgctctcacacacacacaagtgcacataagtgtgtatgcttcctctcccactctctcacaaacatacacagactcacacccttcccacaatgcagcaaagccatctggagccccagccagtgtgtgatgcgttttgcctctgtctggacttctgcacttcctggcttcacccaacctgaaactgctgggtgcagcccgagcaccagtgacagccctggttgtcccatggcctcttgaggaacccaggtctccagtcaaagccactggagtagggggacccatagagacctgaggtactcatgagacccatggaaaatcatctgcacacacactgctaaggagtcaaaggacagaagtgtaagtagtgggtcatttaatcttaggaattttactttctgtccggttctttgttcaataaattgaacaaccaatgttcaattatgttgtctcagtggacacaggtgtttgccaggaagcttaaagtcaatggcaatatggctggccagactaagaaagacaagagggctggtcacctgggcagatgcggaagtatgagtccaagtctggggaatatactaggagctgctgaccactggcccttcgttgagtcagggaggctgagagaggccacgaaaggcctgaggttcaggcagccctggctggccacttaacggtcattgtcaagaactgcaggctggccctggctccaggccttatgctcctctgttgctgggcaaatcactcaaatcctccttttatttttctgcttgtatcaataatatatgcttagtattaaagaatttaagaaatatatacaattaaaagaaagaaagtcaaagtcacatgaagtcttataatccaaaatccatttagaaaatactttggggggacctgctttgcattagcacacacaccgttttttaagtccgctggttttttttttgttttgttttgccttacaccacacctctgttttgtactctcccttcctctaacaataaccacagtaaacaacttggtgttcatcctccccagcctctttctgtgtaatatgcaaacatatctacacgcctgaatagaggtttcttttcatttggtgtttgcaaatatgggattccctcatgcacctctttgggtcttacttttctcgtgtaacaacatggtaccgaaattcctcttgacctcactggtgaagatccagcacattttttttagtagttgtgtgagagatttatagagtgtagatttattcaacaagtctttaattgctgggcagttacattgttgttttctgtttgggattttttttcgggggaggggattgtttttccaactattactacaacaaacattttcatctctcacatgtgtctatataatgatgttttattaacctgagatagtccagagtgggactgaaaatcaaaaggtatgtgtgcttttttattttaacagaatttaaaagattgccctttaaaagaatttaaaagattgcttcttccaataatatttcatgttttgtctaataaatatttattaagcccacactctgtgccagacattggtttagcaatttggattcagcaatgaataaaacaaagattccagctctcacagaagattaatcctagaaatggagcgtgaaggaacaaatgaaacaataattataacaaacattttactatttgggtttgtgttgcactaacttcctatttcttatctttacacatttttctattgaatgaattatatgctgcaatatacttcctgtcaaaagtttatgagctttgtatatattatgaatagacatttatctgatgctttgcaatctcttacccaatctattgcttatctacgaacttcatgagtagtttcttataccatctaatatttttaatgtttatgaatttgtactttttttgttctctcttcgcttctgggtattttatctttgttagtagttgtctccaaactctgggttatatacacagtttcttacatttcttttaattacatttttgttttttatttttttcagtcatacacctagaatttattttttaatatcatgtgaggtaggggttcaattgtattttccttaaggtaaatagtcattttcctaataccatttattaaaataaactatccactttctactgaattaaaatgctatctttttcacatacgcgattcctgtatttaccaaaatctgtttgtatgttttttattctgctctgatgattgttgtctacttttattattccaatttcatgcggttttgattacaatcttctatttcataattataaagctaggttaagacttaatttagtcatgtaaagcttcagatgattttatgcaattacaaattataattttaattaaaagaacattccatttatattaggaacaagaaaaacatcacaatcaaaaaagagaacagagtataataattacaagacaatgctacataaaactatggcaacagattggaaaatgtagatgaaattaaagatctataaaccatataagtcatcaaaatggcacaaagaggagaaaaaatgggaatagatcattcctatagaagaaattggaaatgtctttaaagatttactatttgaaagggccccagacacagatggcttcacaactgagttctatttagcctgtgaggaacagataaccccactgttatgaaaccactcaagaagatagaaaaaaaaaaaaagagagctcctcaatatctgttacaaagccagcgcaccttaatgctaatgcctcatagacaaatctcccttgggaatatagattctcattctaaataaaatattagcaaatagggccgagtgtgatggctgacacctgcaatcccagtactttgggaggctgagatgggcaggtcacttgagctctggagtttgagaccagcctgcatgacatggcaaaaccctgtctctaccaaaaaataaaaaatttagtagggcatggtagcacatgcctgtcatcccagctactcgagaggctgaggtgggaggatcaccttagcctgggaggcagaggttgcagtgagccaagattaggtcgtgggactccagcgtaggcaacagagtgagacactgtctcaaaacaaaataattagcaaataagaatccatccatgtgccaaatagactaatatgctgtaatcaaatagtatttttccaggaatgtacagatgtttcaataacagaaaatttaccaacataatttattacattgacaaattaaaggtgaacatacatcatattgatcgatattgtataggcacctgctaaaattcagtagccagccgcaatacaaacccatcgtctctctctctcttttttttttttcgagatggagtctcactctgttgcccaggctggagtgcaatggcatgatcttggctcactacaacctccgcctcctgggttcaagtgattcttttgcctcagcctcctgagtagctgggattacaggcctgcaccaccacacctggctaatttttgtatttttactagagatggagattcactgtgttagccaggctggtctcgaactcctgacctcaagggatctgcccgcctcggccttccaaagtgctgggattacaggtgtgagccaccgtgcccagccaaacccataatctcttatccaaacttctgaaaccctaaatctctgaaaactgaagtgatacttgtaaccctggcactataattcacttagtggtaaagctgatctgagctcacataaagaaatacttagatataaaaagtgttggtctttaaaactgtgaattattatgtgttctgtatgtaaggcatacttgaaaaaacatacttgtgaatttttcgcttctgtggcttgctgtcctatatcgaaatttgttatagtgttttctttttcaaggtgggtttgaggagcaatgacatgaggaatgtgctttcagctctctggaagaaatgcatgactgtgtttcacttaatcgaagacgccactgataggaaggctagcatttaattatgtatcactaaaagagaaaaaaaatgctgctactagttatactgcaaagcatcctccattgtgagacacctcccagttcagagatattgaaaagtgaaaaaaggtccatcttagaattgatgaaatatggtgtgtacatccaaaggaaatcaccactaacaacacgcccttctgacacgcgtggggacttgggtgcttcctctctatgatgtctgcatctcgaggaagagcccgatgtaagtgcaggagtgcagtggtctcaggtcagactggactccagagctggctctcacgggccagttgtttgaccctgagcaaactccttaacatataaatagcagcccctggaatgaggatggtgacaacatggtggtgttgatggtgtcaaaagggcctgtcccacatctgccatcctaaaattctttaccaaagaaaaaaacctgaccacatcttcccccctttaaggagacccctgatattactgtgaggccgcagctaggcctcgatgcctgtgctatcaatctgtcctaaatgtatatagtgtctcacccaaaaatctgagagggagagaacgttagtcatcttctaacaaagcccctgctgtttaccaaagagctaatgggtcggagagaaaatgtcactttcccaagtgacacagccagagacaaaatgaaaactaaacccagagccccagacacattggtgggctctttctagaacaccacgtggcctcccgctcaggctcctgtcacctgaggaccgggatccaccccagtggtttccagcggttatctccagccagaggatttctgtgtcctaaatgcagtgctttctgctgtatgggcccccgaaaaaagatggacacccatttagctcacccacccgcttctacccacgttctgactttgaggtctttgctgcacccacttccaccccacctttctaaccagcctcccggaaggggccagggatcccctctgtgcagaagatctgaggccccgctctctcatgtcctctgtctgctgtgtgtctccgacaggatggggctggtaagtagcaaaaagccggacaaggaaaagccgatcaaagagaaggacaagggccaatggagccccctgaaggtcagcgcccaagacaaggacgccccgccactgccgcccctggtgagtgattgcccacccccaccaagagcagattacttacttctcctatgccttaatgtccaagtttgtaaaatgggtatagcaaaagtgccttcctgatagggatgtaacgatctgcaatgtataagcaggtgtgccatgcaatataacacgcacaggacccggcctggttagctcccaataattcttagccagagctcatttctcgagggcagccttgaaaagaaaaagaaatgtaaaaaggtcagcttggggagagggtgtcgtaaggaaggatccgggtatctagctgcagctactacctctcttctccccagcagctcctggagacccttgtcccctatgtggcattgctgctggcattccaaagagcctgctttcctgggataagcatcatgaaacaggagggtgcctgtcctcacctcccgagcaggctcttaagttttcctggaatcccatgggcattttaaatgaggaaaactttccaaaggaaaaaaaaagtgaaatttcaagtgaaaaggtcttattgctggggaatgcattttcctagtcatgcagtttgatttgtttataaaacacttagctccttttgatggctacagcatgtctgaagatgcatttttttttttttttgagacagagtctcgctctgctgcccaggctggagtgcagtggtgggaccttggctcactgcaacctctgcctcctggattcaagtgattctcgtacctcagccttctgagtagctggaatcacaggcacacatgccaccacacctggctaatttttacatttttagtagagacagagtttcaccatgttggctagattggtcttgaactcctgacctcaggtgatccacctgccttggcctcccaaagtggtgggattacaggtttgagcatccgtgccgggcctgaagatacatttttagatgattctttgtgctctctccactccctgaccagtgacccccttttggtttggggcagttgggagccttgccgcgaccccctctcctgtgctgtccacatgtccacgtggtcatctctttatcctaacagggacctgatggggagacggggattactaatcccacttcctagatgaacccaggcatcttacctatctctgtcccagtttagcgccggtctcagcgcacaaccacaagatgtttattgaataaataattgatcaaatggggaaacttggacttagactgattgagtaatttccccaaaattatatgataataagtagtagcacctggaatttttttcacttaaaagagtcacataatatgtatatggaaaaaattataattactcattattccactatgtagagtcaccagagttgcctcgagacccttcttccgtgtgttcatttcatgtgttcctatttttaagagaaacatacatgcacatcattttgcaaaatgctacttcaaaattgtgttcaataaatatggaattaagaaaagaatatttgtaacatatgtcaggttgaaagaatacaccaaaacgcacacttgtatagccacctcccaacttcagacaagaaagagactcgttcctttgaatctccctcctccctcccctgtttgtacccttcaccccaggccccaatacccagaatctgtttatcattccttagctttgctttttaatattatcacatatgtattacccctaaacgatatttagtttcattattcatgttgtaaactttaaatcaactacatcaaacagcgcatatgcttctgagactggggttgtggctccgtgttacgcatgtgaaacatatcgacgttgatgcacgtggctattgctcattaattttattgcctgagtatactgtaatttgtttattcttctgtcatgagggttagttccacgttttaaaattgtttatgtatcggtcgggcatgatggctcacgcctgtaatcccagcactttgggaggccgaggtgggaggatcacttgaggccaggagttcaagatcagcctggccaacatggcgaaaacctgtatctactaaaaatacaaaaattagctgggcgtgatggcgggcacctgtaatctcagctacttgggaggctgaggcacgagaattgcttgaactgaggaggcggaggttgcagtgatccgagattacgccactgcactccagcctgggcaacagagcgagactccatctcaaaaaaaaattgtttatgtattatgatttttgctaggagccctcttgtacacattcccttgtacactcttgtacacatacacagaagtttctctacaggatatatacctacaaatatgtttgtcgagttttggggaaatatgctttttaaatattttttcttgtcaacaaatacccgtttgcagtttgatcttgtaatggtagagccaggatgttaagcccaagtggttgggctttccctcattgtccacagctgtctcatatccacattggggcatcccccagcgcggtcagggcaaaggcagcagagggcgggggtctgtctgagggtagtgctggtccctgggtacagaatgtccctgagcagcccccacaggcagctgcctctcctccttcagtaggtccctggagataccctggctgcccggctcagcagtctcaacccccaggccccacccacgcagcagggactgaaataactcaagtgtgtgttttctacccaaggttgtcttcaaccaccttactcctccaccgcccgatgaacacctggatgaaggtaagaagggtggtttgggaagctgaggctccacagccctctcccctaggtggcagctttgtggagttggaaaaaggttgagtcaggagcagcttgagggctggagaagagaaaacggggaagctgagagaggccccggctctgtgcctcttggggcgtctcttcaggaaccaagaacaagtttcttcagtatgcctgagcctgggtgggacttttaaaacatgaaagactttacaaactgtaaacaagaacaaaaacaagagtcccagggaagacacacagcatcatcaaacccaagttttaaaatatgctaactctcaaacgcaaagggctgggccagtggctccaggcccttgcctccagcccctgtccgctctatgtggagggcaccttcttgtttcccgctcccagtcacttcgagagtcccgctgctgaccacctaaccacccacgcccctccctggtccccagactccacttggttttttttgagacagagtctcgctcttgtcacccaggctgcagtgcagtgacccaacctcagctcactgcaacctccacctcccgggttcaagagattctcctgcctcagcctcccaagtagctgggattacaggtgcacacaaccacaccgggctaatttttatgtttttactagtgagggggtttcaccatgttggccagattggtcttgaactcctgacctcaggtgatctgcccgcctcagcctctcaaagtgctgggattacaggcgtgagccactgtgcgtggcccctagactccacttctgctctggtgggctggcctgctgggtactgtagggaatgagctcagcctttctgggccagaggctccacccctggggactcccaagagggtggcctccttcaaagtgacttcccacagcctcctcatcatccatgtccacacagcatggggaagggatgcctcggccagccgggccccacccattaacctgctcatatgatgtgtactgggcattcagcacacagagcccagctctgtcccaggaatggcgaaggggtgacaacaggtagatgcgaccccttccctggaaaagctcagaatctgtcacacttgtgagcagaacctgaatcttaaaacttcagggaaccactgtcacccattctgaccctcgctttcctgctgagaagaggtgaccagcccgaggtcacaacactcagctcagtgacagagcggagccaccccacccggggaagctaagtgctctccaggtgaccttcatcaggtgggtcctgtggctcccagagctgtgcagagagcctgcgtcacagcagggctcacttgaagatggtgctccaagctcctgagccctcttcctgccttccatccagggcccgccagcaaggtggggggcccggcagggtcactggcagccatagacagtgtggctggggctctggacacagacagtggagaggccagggctccagctgccacgtggcaagaccacccctactggggatagaggcaggcggggcagaggaagaaaaggataagaggaggcttatgggcctccgagggcaggtgtagaataagaagatgagggctcccagcactatgtccgaatgtgggcctgaggccaccagcagcccggcagtggctgcctccctgtggctgacctctggccatcagcttcctcacacacgccttgtccaggtcatagggcttcttagtgggtccacaacggaggacaggatgggctctggggggcagcccatccctggtggggtcacagggctgggggtgggggcctgtgctgggtgagaacatcatttccatcatgggcaagcagaagcctgtcctccttggtagccaggctcaccccagccccaccttcccgcttgtgggcctgagtggtggtcatctctcccttgttcattttagacaagcatttcgtggtggctctgtatgactacaccgctatgaatgatcgggacctgcagatgctgaagggggagaagctacaggtcctgaaggggtgaggttccaggacaccatcccctgtccctgcaggacccccctcccccacatctctcctttctccacccaccacatcctccatggctgaccctggaagtcttctccatcgccctgcccccagccctggccccagcattttcttgaacttggcccttttgtcttcctctccaaaatctttccggtgaagtaatttccattcacaacctcctgctcatccttcaaagtccacgttccatgccaccgcctccatgcagccctcctgactcttttgggcatgtggaccttgtcctttatgcaggctggtctggctgttccgtgaaagccttgcatttaagccagttgtgtccatatttgtctccttttcaagacaggagcccacactgatgacacacaccaatcccgctttagctcatttcccatgtccttctcagaaactccttctaggtcagctctctctcagtggccaggcttgtcctgtggagctctgagggtctgatttggttcttgaagttctccaaaggccctgagccaagctcacgaaggtcctgactgctgattctatacagtccacgccaaccgtgtttttctcaagcctgtccccagtccctcaccaagctctgaacacgtcccattcatcaagaggaaggctgctggctggatccttgtgccctcttggctggtcaggctgtgtagataagctcttccccctagaacttgcccagatagccactgtaccactgagcagtgggcacaagccccttcctgcctgccgtactctctacccctgcggattctctgccctccagggagagatgactttgaggaggcctgagagctgcccagtgacgggcctacaggggccatgatctcatctctgtttcccctgctcccattagaactggagactggtggctggccaggtcactcgtcacaggaagagaaggctatgtgcccagtaactttgtggcccgagtggagagcctggaaatggaaaggtaggtgggcacgggaacccccctcgagccaagatgcagtcactgtttctgctccctgggctgttaggcagggcagggccagagtgggactgaccagggagcctgcaggcactagcaaagaggggacaggaaatgagctctgctgggaaaggcctctctgctggctccagacgacattcagaccgctgtgtgacactgagcaagccgctcttcccagctaaacaagagcggtccttctcctggctcccctggatggaaccggccccagcgtctgatggcctcgaaggctaccagggaggcactatgaccagcatcccctcccctacagcctccatgggcaggactcagggctcagccctcgggggctcccaggagggtggcgttgttcagaactgattaatactcccaatcttctaatcccccagcccccatcttctcccatgtccccatggcactgggaatttcggactcggccagccagagcccccacgaatctgctcacagggactagctctgcctgaggactgaggcccagcaacgagtcttctctggacactgtgggccccgcttctttccctggaacagtgtggggaaccgtggggctgtcctgcacagaacaaccccataccgaaggggacatactggggtccctgctcagagagtctcggcagtttgcctaattcagatctcagactgcaaggaggaggcacgtgcctgtgatacgcagctgtgctttggagagagtgatcaggggcatttttccaaagcaaaattaacaaaggtcaaccaactagtgttcttgtttcgttctaggaaaacagtgagtccagggctgacaggaagcggaactggaagggcagcggggcagagggcactgactccatcacggtgtgaggagcagcagctcagggccgactgggaccagaaatgctagatttttatttcttggggacaggcagtgcaggagggaggctgtgtgggaatactccgaggagcagggtcgctctgagtttcacctgttcctgccgttttccaggtggttctttagatcacagggtcggaaggaggctgagaggcagcttcttgctccaatcaacaaggccggctcctttcttatcagagagagtgaaaccaacaaaggtaggcttggtggctttgcctgccttccttgccctgctcctcccgggaaggcgcctccagaggcctggccctggagtgagaggggaaggggtgactgccaggagaaccagcagcttccgggcttgtgtccctcccaattcaggccctgcccgggagttgacatgggggctgtccacacagtcctccctgtcccggctggaaaccacctgggcacaggaagccgggtggacaggggtggtcccacgccagactggccctgctgcccagtcagcaggaacaccgaggccagtgggggccagggaagggggaaccctgagcccttaaccaccagcctctttggaatcaaggattagggggagctcaaagaatccttcaagatcatctcagccagaggctgcaggtagcatatgttaggaagtggcctgtgccgtgatgtaagagaagagggtggtaattgtggggagcccatgccagtctagacactcatgagttcaaatccactgactgagcaaaacagctgccatcaccctcaggggttttctctctttctctgtcatttggctttctttccttcttaatttttttggtgtaaaatataaaacacatataaagcttgcatgaagtatgaatgtgtaattctaaatcatatagggtaataataaacaaatccctgtgtaatgacagccaagagaaagagcatcccagaccaccaggagccccctcactcccccacttgggctccttcctgattcaacccccaccctcaagagctacctgctgtcctgacttggatggaaatccttccttgctcttctctgtggtttcgccaccatgtcttgtctgttttttcagcttgatgtagatagaatcactgtttttgtttctgtgtgtcttgcttctgtcactcagcagtgtttgtgggattctatgttagtttcctgggctgccgtaacaaagtggcacagactgggtggcttccaccacagaagcttattatctcacagctctggaggctggaagtccacgaccaaagtgtcagcagcgttggctcctcccgggagctctctccttggcttgccgatggccgtcttctctgtgtcctcacgtggccgtccctccatgcatgtctgtgtcctaatctcttcttgtaaggacacctgtcagtttggattagggcccacccatatgacctcattttaacttaatcacccctttaaaggctctgtctccacatatagccacattctcaggaccgagggttaggactttaacatatgaattgggagcgcacatgattcaaccagtaacagattcattcatgtggttgaggatggtgagcctgttcatgttcattgctatacagaatcccgggtgtgaccattccagagtcaagttagccattctcatgttgtgggcattgagttgtttccagtttggggctgttaatgcatgtgttgcaccgaaccctattatggtccctggtgctcactggccactagcttttcgtctgtaagatactaatccacttgacagatgaggaaagggagcccctgaaacaggaagtgacttgctgggggccaacagtaagcatcagagcccaaagcaccagtgaccacatcatctaagaggctgagaggcttcccaagctctacaacgtggcaagctagggtgacccaggggcttcccaggcagtatgaagaatgctttgctcatcaggaagctgtccacagggaccaggtacagccttgtagccaattttaactggagaggagatggtgacagtgacatcagaggaggaaagggagagagagtgtctggaatatgagtctggttccctgtggttggggcgatgagaatggacagagttgtcacctggtgggagcacccttgggctgtccattggttccatctgtggctcaagaacagcagccagagtggaaacccagagtatgaaaagctgtcatagcaccctgtgattctctggggacatcatgaggccttggtgccccacaaaggggcaggaccaggttggggagcaggaagggtgcattggaaagctggggtgctctgtgcaggatttcttggaatatgccaatgaatgcatatacatacatatacatacacatagatatatgcattttatatttatattcatattggatattgtcactatttcatttttgtggcagagcacctctgtacaagaaataatttgggaatcactggagatgacataagtgttttattgttgttccaggacatttcaaacatacacagaagtagagaaaatagtttagtggaacccctggtacccaacagccagcttcaacaattatcaactgagccagtcttgtttcatctgtatctcccgctccacccctgttctttcgaagtaaatcccaaacatcatgtcatgtcaccctggaaatgatatttcaaccattgcctattgctaaggtgaaagcctccccaccccctgcccaatctggtgtggaggaagaaggggttctctatgagtctggcatcttttcctgtccatgtccaccccaggaagccagtccaagctgggaataggccatatgggaccagggctgcaggactgttcaaccatcatcaccaccacacgcccatacacatgcacacatgaacacacatgcacatatgcacaaatgcacacatatacacacatgtgcatacacaggcatgtgtgcacacatacacatgcaaacacatacacatgtccacgcatgcacatatacacacacatgcacacatatacatgtgcacatatgcacagatgcaatgaacacgtgtgcaacacatgtacacaccttacacgtacatatgcacacacacacacaactccaaagcaagacccctctgcttctccgagccacagcagtgaatgcaagacagggatggaagcaggggagtgagttctacccttcgtggcctccggggtgtccttgagcctctcaagcctcagtttactggtgtctatgtgaggatagactagtttcacagctcaaaggcaggcggtccttcagtgctgagaaatcttcatctcagagccaggccctgcctgcccagggcagtccagacataccacagaggcaggggatccaggttttgtgaaactgaagctgataggatctgaggtcgtctttacaaaggacaccaaattgtcagaagccatcagggacggggcctcagagcagccaggcaagtgaggggtctaaagcaccagcttgggaagcgtcactgcgtggagagcgggctcctgggctcatcgcccgaggcacccgacacaagtgcagcctacaaaatggagagaaaagcccttgatgaatgaactccctaaggccaggctcgggttccttagagactgggggcacagctgcacccgggcagggtcggggagacagtttgcagcctctgggctgaggctggggtgggggtgtggaggggctgtggcaacagcatggcgtacgcctctgggtgtccttttgcaagtaggtgatgagagaggcacattggctgagggaaactggaggatggaagggggttgaggcaggggaactgacaggagaggaaagagccttaagtcaaacaggaccgcggaaaaccaagcgtccacaacgagaacgaggggtccgtgcctgacccctggcggggaggcgtggtactgctcgtggtaggcgcggactcggggaaccgggagccccccagcctgccgcgaactctgctgggccccagcgtcctcatctcccaaataatgggtaaggggcggggtaaggtcatggtacccaagtagctggacagacgcattttataaaaacatcaagttcatggaaaagcgtttcttacctggaaattcttacctcctaaattgtccttaacccttgacatctgctaccacttgcctgcgggaaaacattaacctagaagacaaaataacaggtgtatgtaacaggcagcaaatgactttgaacagagcccctgggcatagcttattacggtgtccgccatggacatgggtacttgcagctgtgaatggctatctgcttgtaggagtaagagataccctctttagccagaaaataaagcccctagtcactccaacgagactagatttctcaatagtccatgacaaagggtccccgagtgaccagatgcccaagtggggacctacatgattgctgagaaactgtgctgcctgccgcagggctctgtgattccctggctgagttttgcaggatagtggggggatgccaaggtcagagtcagatggaacttacaggggaggcttccaaaagcatggaggttgagatgcagggaaaggaaacttgtggagggagtgctgataatgaagaacagaattggggaacttttttcaaagctttaaaatgaggcccaaatcccagtcccgttttttgtctttgtgccttacttctcgtgtgtgtcttcatgaaccctccaggtgccttctccctgtctgtgaaggatgtcaccacccagggggagctgatcaagcactataagatccgctgcctggatgaagggggctactacatctccccccggatcaccttcccctcgctccaggccctggtgcagcactattctagtaagagggggcgtgcaatgggggcagggacttgtgccaagagcccctggatctctcgctaagattcccaattgtgtgagtcattggtgccaccttgggggatggaaagattatcccaaagttaggcctaaggaggtagcaactctgagcaccgggaattggtggccctaattccctctcctggctcagcagggaaccccttagagagtagcaagcattttcagtcttagagtgagcaggtcgattttagagatagcatgccctgctttgcgcaaacgaagagaaagagttgagtgtgtgtgcatgtgcaggcgtgtgcacacacccatgcagggggtggggtggctggggagtggagggccagctaggaatgatacagctcccaaggtagagcctggctgctctggtaacccccagccctgtcttttcttccctaatgcagagaagggggatggtctatgccagaggctgaccctgccctgtgtgcgcccggccccgcagaatccctgggcccaggatgaatgggagatcccccggcagtctctcaggctggtcaggaaactcgggtctggacaattcggcgaagtctggatgggtgagtgtgtgcacacgtgggagcatttctccccccattccacctgcgccgcatcctgagtccaggttcagcattttcatagcgtgtcatccctcccccagaagtcttgagagggagcgaggacagaggcgaggacactcattttacagaggaggaagtggaggtgcagagccgcgttgtaacagctgggaccgcttatggtggtggcagagcaggaacagaatccagctcacccagccccgaagtcgctccctccttcgttctctgcctgaagctggctttgacaatgagctgcagcggcgcgttaactccccttagcttttcatcacccagatggaaacaggaggttaaacgtgatgagccatgatgttccagagcctgagtgcacaccgagggcagccgtgggactttggccaagtcactgaagctccaggcctggtgtcctcacatttccatcgctgctgacacctgcccccttccccccccgcccaccaggatataaaactcgtgttccgttttatccctggattggtccatgagtcctcccttacctggggctggtccatgagtgctcccttacctggggctgatgcccacggtgcttttggcaggagctgtacccaggtccctgccaaggcccatgtcctctagaaaagcaagtagagttgtcttttgcccttcaggggacttcatggagtacagggagagtgtggagatacagatagtttaaggagtgggacaggatcgccatggggcttcagaaggagggaaggagacccccatgcgtcatcctcctgcccagtgtaccccaggctgtgtgcttatttccaccaaggagttattgtgtgatagaagagactcattatgtaggggaggggtgggggaaggacacaggttccgtgcaggacagaaggacacaggcccagggtgtggggcaaataggtgaaatgccccccaggcagggtacattcctccactgcctgaggccccatatagaagggacctggaacgcaaggtacgcaccacacaaccatggcctccggaactgcatgttccagctctggcacctggaatggggtggcacctgggcacttaccccgattttggttaagggatcacctccgagcaagctctctgtcttctgattggcttcttcactcccccgggctcaggttactacaaaaacaacatgaaggtggccattaagacgctgaaggagggaaccatgtctccagaagccttcctgggtgaggccaacgtgatgaaggctctgcagcacgagcggctggtccgactctacgcagtggtcaccaaggagcccatctacattgtcaccgagtacatggccagaggtggtgccccccgcagagccgcatcctcagagcgaggcgggagggccgggcttagcaggaggaggagggtccgctgcggtgggttcaccaggccagggggtcctgcagatctagggcatggcacggtgtggggacagggagggatggagggagggggagggacagagggagggtgagaaacaggagggtgaagtggttctgacagagccatgttctcagcccaggagcagttcagacagcatttctggagtgcatcttctgtgcctagcactctttgatgcctgctgggagggacagagcattgcaaagtcagacgaacaccaggccaggcatgcagggacagtactagatccaggtctcctgcctcctggtcatgcaaccatttacaactgtgtgaatattttacaaggatggccagagaggttgggcttgatggcctctgaggtccacggcgtggccaagttctcatgccactttctcaccctcctatgaccctgaccgcacactgctcctataggatcctaacatgcccatgttgatatagctccctaacaactgtcaccaaggggcccccggtcggaggctgtgctgggggtgcctctagcctgcccctagggcaagcatccatccctcccagctttctgattccagggggagctgcatttgtcccctgcaccaaacctgggggacagttctctccattctggtgctttcttgctgatgcctggtcctcagaggcagagggtgtctgccagcagggatcaagggagcgaggccaacacggggggaaagacaagaaggggcatgaaacttcgagtcagaactggggtcccactcgcagctcccggctgggtgacttcagacaggtccctgcacctggctgaaacctaacttctgggcaactgctggtatattggctgcctcccggggtgctgagactggcattttgtaaagtggaaggcactcggcagcagtaggtagatccttcctgatgcaccgagagatctgagggtgcaaactcccacttcccgcgcccatggggagccactcacaccagagagaggctggcaccaccaggggcgggtcactttgcagaagggcacttgcaacttctcttttcttaggatgcctgctggatttcctgaagacagatgaagggagcagattgtcactcccaaggctgattgacatgtcggcgcaggttggtgaagtaccaggtgcagagaaagggcggcatgtgccacctgctgcccacaatggctgctcgtgccttaccaccccatcctctcagccagcaggagaagtcagggggtactgaaggccaccttcctctaggcagatatccccaaggtcacccactgcacttggacttgcaaaccctggccactgtgcctcctgccccacgcagctgtgagggagcccagggaatggagccttagacccgggctgctgtgttggaatgaggctattctgttccgaaggaagagagggcgaatgaatgtcatgggaaacacacagagttagcaagagttccattgaacccggcaggcaagtgtgttctgttgtgacctcatctcttccttagatggtgcccacaaacatctcctgtaggacttcccatcccaggggccctcagcctttgcacagccctggcgtcgaccccaggctgatgggcaggcctgagctacacacagatgccagggacatgacttctctgagccctggaggacagccccaccttctgccaccagggaattgcgagtgctggacctcctcggctacccaggactggtcctcagtgtccctcacgttcacatgcagaactttctggactccatggggtgaagagcagagtggagaggagggttttagccgagagctctagctggcaggaagcacatctggtggccctgttaaaactggaactctcagcagaaaagttttggtctgtggtcagcctgtgaggcacacacgtgcgtacacatacacacacacatacagctgccaccgagaggaaacgctcccacccaccgcccacatcagccctcccacctcgcccctcgcccagccttacccagtagcgccgctgcaggaactgatgccacaacgcctttttccgctgaggtgggcagacagccatctgggcaggctggttttggaaaatgagtgctggtaaccggcttcaaaccccagggcagtgataagcctgcccactgctgctgcttcctttccccttccttctctcaccctccgctgtctcctattcaatccccactacacccccttgggaaatctcgtgtgacccaggggcaaaggatgtgaaaagccatcggagtttaatacctggatgtagccacagaatcgggggtgaggagccagaaaatcagaacttcccagaagggcagcctctaaccacatgctgaccatgccaatggctctctaagcacacatgtacacacacacactctcacacacataaaaacacagactcacacacacacggacaaacacaaacacatacacagactcacacagacacgcaaactcacacacagacagacacacacacacacacagacacacagactcacacacacaaactcacacagacacacaaatacacagactcagactcaaacacaaactcacacaaacacatttacacaaactcacaaactcacacacacaaacacacacacaaacacgcaaacttacacacacatgagcagacacacacccggcccttctgggctcttcttttcttactccataggaagccatgcaaagtctcgccagacctttcttccaaggccagatctggccaaccccacaggaaccctgcaatcacaatccctcgggccccactttgcagccagatgccaccggttcccatgccccatgcctcgccacccctctacctcctctgcccaggaagccttgaacacttcccacctggcagaatccttatcatcatccatggctcaagcgtaatgtcatttctatgaaggtttccctggacaagaaactgccagagagcccttagctcaggtgttcccggaagcactgttcttgctcagcagatctgggcagcttcttcttgaaagcagatctgggccctactcaacattttttaaaatatatttctggtactgctcaataaatattagttatcagaacgagtactgttagatgctgcccagatatatttagtactcagttttatattccccacagtcccatactagtaaatgagtattgattgcatggtgtaccaaggggatggatggatgcatggatgggnnnnnnnnnnnnnnnnnnnnatggatgcatggatggatggatggatggatggatggatggatgcatgcatggatggatgaatggatggatggatgcatggatggatggatggatggatggatggatggatccatggatggatggatacatggaaggatgcatagatggatggatggatggatacatggatggatgcatggatgtgttgatggatggatgggtgggtggatggatggatgcatggatggatggatgcatggatagatggatggattcatagataaaccaacaaaatgcaagcataaggagaagtggaatcaattctagtgctggcttcttgaagtcgcatgtctgaagaggtaaatggggtctctgctttctgcctcagtttcttcgtccattgattgggtgaataaagccttagtttcctcagctaaaaggtgccaagtagcaccagctgctatccctggcccaggctggtgatcaggggaggagagacaagtctcttcttcttcacagcctctgtccacctggatctgccagtgctccctgggtgcccccacggggcaggcgctgggtgaggttcttggtcacaaatcaacctcgtctaatgcttgcctcaaccccctgccctggagaccacatccctcatgttccatgtcaggactgtggcccctcggggaggttaagcagcttgctagaggtcagcgacttcccgagggcctccagctccaggagctgtgcttccagccagccagtgagagctgcctgtccttgcctcctgctccccctccccctccttccttaccatttcttctcttctccctccctctccttttctcctgcctgtgttcttctatcttccatctctgcagacccttggacacagctgtgtggagcgagaacgaggagggggaggggcacaggtagcccctgtgtctctgatgcccacgttgctgcgttgctgttctgggcttctaggagaggagtttattcggctgaggagcaacacagtcacctttctactccatccaagaaacagctccttccccagcagcccacaggggctgtgcgggggacacagtgtgggctcggtcttggcgtggaggcccccaggctgtccttcaccatgtgcctgttccctcagattgctgaagggatggcatacattgagcgcatgaattccatccaccgcgacctgcgggcggccaacatcctggtgtctgaggccttgtgctgcaaaattgctgattttggcttggctcgaatcatcgacagtgaatacacggcccaagagggtaagcacagcccctaaccacaagggaaacctagggccttatctttcccagctcctcaaagccgcctttaacttctcccagcacagccctgagggaagacacctgagggctatacggtttctacagctctagatcagcatttccttcatttacccaaatgtgttcagcagaatggtagtgccctgagacctcccatggaggaacagctttaggataaggtaggtttggagaaacagcagtccaccctactccctgtcttggagattcccagtgcacatcaacatattaaaggcactgagaagtcctgcagcaaagaaacagtttatgtttgcctcacctagtgcctcccaaactaatttgagctccaaatactattttttttttttttgagatggagtctctgtcacccaggctggagtgcagtggcacaatcttggctcactgcaacctccgcctcctgggttcaagcaattcttctgcctcagcctcccaagtagttgggattacaggcgtgtgccactacacctggctaatttttgtatgtttagtagagatggggtttcaccatgttggccaggctggtctcgaactcctgaatttaggtgatctgcctgccttgacctcccaaagtgctgggatgacaggtgtaagccatgcccaaatactatttttatatagtccctattaaccttccatggaattaggctttcacagagcacactgtgggaaacacagctctcatgtgcgatcagcaaaccaacctgtattagggtgtccacggagcactgttttactctgtgcatataactgaggtggaaatctacgtcacaagagaatctgaaggggtcacatatatttatcaagctagcaagcagtgtctgctgagcctatgagtcagatgacaagcagacaggatatggcttgttctctcgggaacttcaggctggctggggagaccgagaaatggaggccaggggaggctgtgaagtgccaagccctgaggtctgctccaaatgctggccggggctgcagccattgaggtgcttcacagggcagccggatgtgagttcttcctcatagcggccctcggaggtacaagtgtcaccatttccattttgcaggaagggactaacggaggcgcccgcaggtttaaatggcttgcccaggccatgtcttttaaattaaacaaggcccctgtaaggtgaaacaggccccttccatcccaggtggaaacgtggtggctgcccattgaggccatcactctctttttaaagaaccaaagtgggtgactgtgtggtattggtgtccatatcgtctttctgtgctgctgatgccgtgtctgcactcacctggtcatgtgtcctggtgtgcggtagtggctcccccgccatgcctggccgccccgccctgtgaggccccgcagtgggggcttgatggaaggacagcaggagcaggggtaggggtgaggatggagggtaggggccaccggccgtggcctcccaaagcttgcatggcttttcccacaggggccaagttccccatcaagtggacagccccggaagccatccacttcggggtcttcaccatcaaagcagacgtgtggtcgtttggagtcctcctgatggaagttgtcacttatgggcgggtgccatacccaggtaggtggctcaccccgcagctcgcggctccctgctttcccggccggccctgatggcaggtcgcctgtgcttggtgcctgtggctgccctgttcttttcagagtgagtcccagagcgaagacggagacccaggcatggcatctggggtggagctctgccccctgcatcactattgctctgggccacagggctgtgtctccttcctccagcagaggtcaaatgagtccctcaaactgaaatcaagacaaagggcacatccgaactcaagtttactcccaatggcttgttctcagttgaggacaggttgtgcctaccttggctttgcacccatagtggattccccaaagccccttcctgtgtggccagaatcgtggacgacagcccccagccccagtcgaagggctccagccacttggcccccacaggtgggcaggctccgggtcacctgctgctgtgtgcacctggcagctgcccatgagtgatgggcttggctgtgcccctggtggtcacaggtaatcaagagagggagggtcccatcttcagaggacctgccccgtactcaggagaaaatctacagcctcatttctaggcattccccaggcaataaaaagtaaataaagggctgtttagagaccgggcagccaggcaacgcacgaggctggagaagtggtctgggactgtgggcactgctgtcccttgcccgggcccactgtgccccgcgggacgctcagggcccccaacccaccgaggaccccagcccctcatccccgcttgcggtctcctctgccgcagggatgagcaaccccgaggtcatccgcaacctggagcgcggctaccgcatgccgcgccccgacacctgcccgcccgagctgtaccgcggcgtcatcgccgagtgctggcgcagccggcccgaggagcggcccaccttcgagttcctgcagtcggtgctggaggacttctacacggccaccgagcggcagtacgagctgcagccctagccggccgcgcccgcctgcgccccgtgcccacctctgcgcggacgaccccgacttccgtgccatcccagacgggccgcgaaggcggggtgtcgcctgtgcccttttctcagacccggaatccagtgggcagaggcagcttcgcagggggtccccggacggactccttcaccgactgcacccccgggcgagttacgcggcctctctgtgccgcttcatttgtagagggctgtaacagtgacctcgcacggtcatccggagtactaagccccagtaaggtgttcaggactggtaagcgactgtcatcaagtaaggcccccgtgctgggcaccccccgtgctggccgcgtccccgcctctgcgccctgcgtggaccccgccctgccccgctacagaagccagactgggtcccgcggacgccagcaggggcaaccccagcctaggctgcgctccagcactgcggggcttttctgcaataaagtcacgagcgttcgagctgttccgtgtcgttacctgcgacaagctggacatcgcgtgcaggacgagcacggggcgcgggcgtggcgcagccagggagtcccgcgtggtctgggctcccggcggttgagcggggcccgcagggggcgctgtggcctcataaatccgtggctcgggcccgcgccgggagctctgggccgggaaaagccaggggctgacgctgtgggccggcgctttggggacggctaggacgcgagcccagctccagaggctccgagtccccaggccaggtgcataaacaaggatcgggtgacgatggggcgtaaaagcgaggaacgtcggcggctcccactgcatggaggctcttcacttggcatgtttttgttttgtttttaatagaccgatttttttttagcagttaggtttacagaaaaaaaaagtgggaattaagtagacagtctccatatctcgcccatttcccctattactaacatcgtgcaatggtggtgcatttgttatcactgatgagccaatactgataaaatatcattaaccgaagcccaccttttgcatccaggttctcgctgcctgttgtacatgccgtaggtgtagaggaaagtgcagagacttgtacctaccgttctgggtcccccacttgaaagccccctggctccacctgtgcacccgcttccttccccttgaacccttgccacccagcttgtcagtgttgactcctctgactgtgagaacaccccgaggtaggactatacccacccgcagtacagaggtggaaactgaggcagaaagtgctcacacacacccctcttaagcggtaggatgggggcgtaggtgggggaaactgcaggtctgggcagcagaggattagagtggggacttggtgggagaacccccagaaagggggcagtcgctgcaggggtgctgggtgaggacagccaccagccaggaaggatgcggttcacatagcgtgatcacctacagtgtgtggattctccagcagcctggggtgggtgcatcaccattactaccacgaagctgtttctgcagatgatgaaacggacagactccatgccaccaggctcctctcagccagttcttggccctcacagcccccactgaccgtgggcaagcactggatgggagcacagcactttaaggaggtctggggggggcagacctggggcctcgctgaggagcccagagggacaggtgtccccagctgctccaggatgctggaggtggaggaacctagaggtggaactctgtcccatacagtggggctccagaaattgtggggcctctgatctcccccaggacctggtcacaccagggtgctggaaggaggaaactgcctggccaagaacctggtgccaggggacgtggctggtggggggtaaacaggagcgtgggacaacaaggtcagtgggggctcctgctagtgggggccactgggactcatgaatgggagggccaagctgacctgctggggctcctgtggggtggggctgaggagggagctaagatcacgggatgaggaatgagcccttccttcacctcatgagcagggaccatatgccaggacaccacctccccggcccctgcagcccctctgaagtggctgccatgactcgggagctatcctcgagttgcaaggcttgagactgtctcctcacctccctggaccccactgtcattccctaaacatgagtcacccagtgctttgccaacgtcacctcaagtttttgttttaaaatgcaggctgggcgcggtggttcatgcctgtaatcccagcactttgggaggccaaggcgggtggatcacctgaggtcaggagtttgagaccatcctggccaacatggtgaaacccgtctctactaaaaatacaaaaattagctgggcgtggtggcaggtgcctgtaatcccagctactcgggaggctgaggcaggagaatcgcttgaacctgggaggcagaggttgcagtgagctaagatcgtgccattttactccagcctgggcgacaagcatgaaactcagtctcaaaaaacaaaagtaataataaataataaaataaaatgcaggccgaaagcctctccctctcccacggagattctgattcagtgggttgaagtctggatccggaaacgtcctcttttagaagcaccctgagtgattcctgtgcaagcatttccagcttggaccagcagttctcagccctggctactcactagggtcaccttgggtagaatggggttggagtggggggaggcacattaaaaagtgccagtgccagggttccgggtgagcatactttatccagggcctcagcatactttaaacatccccagctggtgctaatgtcgatcccggattgggaacccctgggcagggctgtgtgaggtcggaagtgctccatcccagcgggcctggctccaagtacctgggggccaggctgatgttcaggtcctgaaactccaggaccagcagatgcctgtggctttttccagctctggtatgcaagtggcaacctgcggaaattagaaaagaaacccagaagaccagcacattctcagaggcacgttctcaggcaaggacacccacctctcctccggcttggttttcctgggaaagatgaggctggagatcttgaaggatgagggagagtttctccacgaggggtcgcacttgcccgaatggtgcccggagctgaacctgtatcctggtgtgttcttgttcgggacataaatatgtctattaaggatgaggagctcagtcaattctcagccagaaagtgaaatgtgagagtgtgggggggaagagagatggagagaggaggcagagagcgcatgaatggacgaaagcctcatttcctgctctagggctttgccttccttgtgggagggagggtatttcatggcctggagtcggccttctcccaaccataaaactgcacatatgaggacattgccggggggcccatgcctgagccatccgggtcatatgattgttgtcccgacacccagagctctggtgaagggggcagcccaggtctgggaaccccagacctctccttgcctgtgaaggagctggtgcctttccctttgcctccattcctccattccagagccaggacacaccctcagcgttgctgtgaagtgagcaacagcagggtctctgagtcagacagacctttcaaaatcaggcacttcctctccccggatgtttgacctcggagactttgcttcatttctctgagcctcggtttcctcatctgtgcaatgggcacaatgctgacacctgcattgtaggcttgctgcgaggtttgcacaaagcagctcacaggaagcatttaccagagtgcctgtcttatgctaaatgctcagaaatgttagctctcattagggctataataacccccaaagaagggcctccagagaccccgatcccagctaagcccccttagccgggcttccctggcctctgccatacctcccctgcctcgggcttctagctctgcggttcagagctttgttctctctttgctgctgtgatctgttttgtctacagtagtggccccttatctaaggtttcagttaccagcggtcaactgcggtcccaaaatattacatgcaataagatattttgagaaagagagagagagggaggccacattcacagaacttttattctagtatattgttataattttctattttattcttagttattgttgttaatctcttactgtgcctaattcataaattaaactgcatcatagagatgtgtgtataggaaaaacagtgtatacaaggttcggtactatctgcagttcagagcatctagatagtttgggggtcttggaatgtattccctgtggataagggggactcctgtactttcacgctcttcccaccctcggggcagaacttccaaaagagcacacggggtcagaagccaaggacctaggcagcctggcactctccggctgtgtgactttgagtgagtgactccattcttctgaaccctgatttccttgtctataaacagagggcagtgaggcctccttgcagggttgctttaaggatttaaggagtattttggaaatggaatagtgtattcgtttcctaggactactggaacaaataccacaggcgagtggctgaaaacttaaaagttgattgcctcacagttctggaggctggaagcctcagatcaagctgcgtgcagggtcggtttctcctgaggtctctctcctgggctcatagatggccaccttctccctgtgtcctcatgtggtcgtccctctgtgtgtgtctatgtcctcgttgcctcttcaagaataccagttatattggactagggcccacccatacgacctcactttactcatcgatttttaaaaagcctatctccaaataccatcacattctgaggcagttgggttagggtttcaatataggaatgtggagaagaggagatacagttcagcccttgaaccataacacataagcatatgtgttatttctgcttttgtttctttcactctacctgccatgtggtaggtatccatgtattcttgtgactcattgattagtttcaaaatcaagaatatttggtgtgaataaatgtgccatctacaaataagaaagacccaaaggtaagctggaacaccagtagagcagtcttaagcaaattcacgtatgaaaatccggatttcctccaaagataaaaccgcctttaatgaaatattttataaaagtttccaccacttattccattagatactaaaaaaccaggactcgagtttccccaggactcatgatgtcgtttgttttttttttttttaaggtagtaaaatacatacacataacataaaatttgcaagcataggcatttgctgagtgttccatgcagtggtacattcacactgctgtgtaggtgccacaccatcatctccaggactttctcatcttcccaaactgaaactctgtctccattaaatgctaacgccccattccttcccgcccccagcctggcaacccacactctactttctgtctgtaagaatttgattctctagggacctcaagaatcgtgcagtatttgtccttttgtgactgggtcattgctcttagcatagtgtcttcaaggttcatctatgttgtaacatgtcagagtttcctgcctttttaaggctgaataagactcccctttatggatacatcacgtttggcgtatccattcgtcagtcgatggacacttgggtcgttttcaccttttggctgttgggaataatgctgctgtgagcctggtgtgcaaatgtctccatgaacctgctggaccagatggcaactttaggttgaatgttttgaggagccgcacgctgcttttcccatcggctgcgccattccgcattcccatcagctgttcacagcttccagtttctctgcctcctctgttattctctgttgcttgaaatagttgccatcctagtgggtgtgaggcttgtggtattgttttaagagcaataactgcatgtttttaactttggtccccatggcacctcagccctctttgaaatgcccccacgcgttttaggggttcagggatgttcgcttcagggcctggctgggaggagcccgctcacgctgggggcaggagtccttccctctggaagagcccctggctctgttcttgggaaagaacctttttctttcttcccctgggcaggtctgccctgtgctgcctcagggtcaaggggcagttggtcgatatcctcaccagacatctccaggcgggtctgcatcctggtgggcacgtgctcagacccccaccccaaaatgttcacaaagactgcctggacacacagcatctcaggcaaagcaggcaagaaccatgcctagctccaggcactcagtctcaggtggcaaggacagagagcagaaggcagcgccactacgacccacgggcagatcagggaaagcagaagcaccgggcccctgacctgggctgtgggcactctccacaacatcgctgggattgcagagtcacccgacttaaaggttgaaacttcataccattcttagaatctttagacagctaaagagaccttcatactcagtcaccgtgtatcgagtgtaaagtgctgatgactcgagcaatcccaagaggtaggtgtctgatccttattttacagaggaggaagctagggcccagagagggtaagtaactggcccaaagccacacagctgataaatggcagagcagggacccactgctcgcagcctttcttccagaatggcatagccaccgcactccacattttacaaaggggtttcccgtgccttgcctcgggggctcctcacagcagcctcttgaaggtgtggcatcttcattctgttcagtctggacagaagaaaggcagagatgctgagcctgtcacccacatcacatccctagaaatgatggggggcagtccttgaatcctgagctcagctccatggccagcacttgaggggccccaaaggatagtgagattaaacgtgctcttgagcacttgaggaacaaggcagacataacccatggggcctgtccagtggccctcagggggcaaaccttttaataaggttaagcaaactgctgagaggatgacaggaaggttcgtgaaagcctggtggaaaagattccaggaagagaaacatctggtgcggatggggccaccaggcttaatggatccgcattctcattgcagtatggcagcccctggaggggtgaattggccagtccccgtgcaggaggccaggtgctctactgatgattcagagagaggcagctccacctgacatcagtcggagaccaaaaaaatagccctgggcgagtattcaggagagcacagggagatgttaaaatttgtgggtgcacacagaaaatttccaactggcaccgtggggacttcgtggcctctcaggctttcacttgaccctgcggagatagcagagccccactcccagggagctctgccatgcaccctgtttgacggaagcaaaggcctccccacgctcacagacacagatgctgatgtcagctcccctgccggtcacaccaccgagctgtgtgatgtgctggggactatgctcacacggcaggtgcatggtcccattaagccagcacgaccgcccttaggagtagatcgttactggtcccattttgtagatgaaaaaatggaggatccaaaaattgaggccatctgccaagcccacgcagctgggacacaagcccaggtcagcctggcctcctgccaggcctcagcagagccgcctccagccagagcttctcgggaggggcggggaacaaggctctgaggctgcaggtcacacagtgagcaagagccagagctggagctggccccaggcgccgccaggcttgtgccccgcccacacccctctggcctggcctccttgccagttgcaggtcatgtcgtagaagagcaggctttggaggagtcaggcagggcttacttcacctcttggttctgcctgctatcagttatgggattcttggcaaattttgtaacctctctaagcctcagtttcattacctttaaaatggacataagcatacctgtctcaaagggaagctggggatgaactaagataatgtacgcaaagctttggccacaatggggtgcacacagcaggatgtcaatatatgcacactccctttccccatacacccttgacagcagaggcccaggccagacagcaccttccctgggggcacctaggagcctggtctgccagtcccctggtctcccttcccagtctggtcccatcctcctccatttccaatcagcagcttggcccctgggccaccaggcccctgtgggctgcagaggctgacaggggctgatgggagccagccccaggggggttgaaggctgattactgaggactgatgaggtgaagagggactgctgcctagagctgacagccttgcctgggaggaaggacaggcaggagggcaaggagaacactccagtctcagcctgacatctctggaagggctaggggtccatctaggggcatctctgttggtgccttcttttctgtgccaaggtcactccactgctcttggttaaaattagcctcctgctcactgctctggactgagtggcctttcctcatgaccagtaggacctggtcttgcacaggcagggctgggctacatgccctcggctctccaaagagcagatacagtacatgcccggcgccttggaggctggagcagggtggggtgtgtgcatgcacatgtgtacctgtgcccgtggtgggtgtgcctacaagtctaactaaccaaaccagggtgtctaggaaggtgacagttgtggaattgtgcaagcatttcatcagcagcatcattcctaggttgtgttatttcttgcttatctccaaggctcccatgtaatggctgatggcctcagcttactcatttctagccccaagcattaaacacttggcccaactccacccacacatcacccctgagattaagaaagtgctctcaaaggatatttgtcaaatacgcaaaggaatggggacaagtcactatcttattctttgtccatatcccatacctggtaacatcttaatccaaaactacacactcagtcagggctcaggcaaggatgatttgagctgggagaaaagccagctgaggttgaaaggaagagaagcacagtggtcaaggctctggggccagttggatgtgggctcaagtcctgcccagccacatggccttctgcaagcagtcacctccctaagcctgtttcctcacttgtcaagcacatttgctaagcagcagccttgcccagagtggacgagacggtgcctctccagtgctcagcagaatgcctggcacagttaggtatacaacagaaggaagttgttagtatttttactggatgtcagcgaaaaaaaaaaatgtggattaaacccttagaaacagaggatagcattgttgctaatcctgcagagggaaacctgacgaaggacgttgtgaacaaagttaaagcaagtgtcaggcaggaagataatatttgcagtgcctgtataacgaaggattactgcaaagaaaactgaagaagttcttcctgttcctaaacaacccaaagacaaatgagccaacgataagaatgggcactgcacagaaagaggattagaacagctaataaataaagcaaacagtgcccagccacaccagtccatggaaaaatgcagttgaaatagtagtgccagatacttttaccatcaggtggcaaaatggcaatactgcttatatccaataatactggtaaagatatggaaaactgttgctctcataaagtttaatggccgtgtaatttgataaagccttttggggaagcatttttggcatccaaaatgttgacgcatacacacactgatgaagctactgcatttgtagaaaactatcctacggtaagatatgcccttattcccaaagataaacatacgatattctttactgcaacttgtttgtaattacaatgggaacaacttaatggtacaagagggtagctgaaagaagtggggcacaattttttttccttgtttaattgtccgaagggccagctagaagggcataattattttattaactactattctgccattaaaatgaatgggcatgccagggatggtggctcatgcctataatcccagcactttgagaggccaaggcaggagggtctcttgaagccaggagtttgaggccatcccctggaaaacatagcaagaccctgtctctgcagaaaatattaaaaaaaaaaaaaaaaaacttaaaaaaatgaatgggcacatccataggttctgattttgacacatggccaagactatcaagtgaggggaaagggtgcagaaaaacacatacatgcagcatgatgtacacacacacacacacacacacaattttatgttcatcacacac

SEQ ID NO: 493 - DNA, 2231 bp, Homo sapiens
gggaggctctgatcgcagaccgggggtgctgccacctctgtctgctgccggcagaaagccacaagccatgaaaactgattgagatgagaagaattcatctgggactggcttttgctttaggatggtgttggaagttgctcgttgtcgctaggagcctgctccactgtaagggtgtcgggatctgaagagctatggtgaaacaccactgaagcattgccaaggatggggctggtaagtagcaaaaagccggacaaggaaaagccgatcaaagagaaggacaagggccaatggagccccctgaaggtcagcgcccaagacaaggacgccccgccactgccgcccctggttgtcttcaaccaccttactcctccaccgcccgatgaacacctggatgaagacaagcatttcgtggtggctctgtatgactacaccgctatgaatgatcgggacctgcagatgctgaagggggagaagctacaggtcctgaagggaactggagactggtggctggccaggtcactcgtcacaggaagagaaggctatgtgcccagtaactttgtggcccgagtggagagcctggaaatggaaaggtggttctttagatcacagggtcggaaggaggctgagaggcagcttcttgctccaatcaacaaggccggctcctttcttatcagagagagtgaaaccaacaaaggtgccttctccctgtctgtgaaggatgtcaccacccagggggagctgatcaagcactataagatccgctgcctggatgaagggggctactacatctccccccggatcaccttcccctcgctccaggccctggtgcagcactattctaagaagggggatggtctatgccagaggctgaccctgccctgtgtgcgcccggccccgcagaatccctgggcccaggatgaatgggagatcccccggcagtctctcaggctggtcaggaaactcgggtctggacaattcggcgaagtctggatgggttactacaaaaacaacatgaaggtggccattaagacgctgaaggagggaaccatgtctccagaagccttcctgggtgaggccaacgtgatgaaggctctgcagcacgagcggctggtccgactctacgcagtggtcaccaaggagcccatctacattgtcaccgagtacatggccagaggatgcctgctggatttcctgaagacagatgaagggagcagattgtcactcccaaggctgattgacatgtcggcgcagattgctgaagggatggcatacattgagcgcatgaattccatccaccgcgacctgcgggcggccaacatcctggtgtctgaggccttgtgctgcaaaattgctgattttggcttggctcgaatcatcgacagtgaatacacggcccaagagggggccaagttccccatcaagtggacagccccggaagccatccacttcggggtcttcaccatcaaagcagacgtgtggtcgtttggagtcctcctgatggaagttgtcacttatgggcgggtgccatacccagggatgagcaaccccgaggtcatccgcaacctggagcgcggctaccgcatgccgcgccccgacacctgcccgcccgagctgtaccgcggcgtcatcgccgagtgctggcgcagccggcccgaggagcggcccaccttcgagttcctgcagtcggtgctggaggacttctacacggccaccgagcggcagtacgagctgcagccctagccggccgcgcccgcctgcgccccgtgcccacctctgcgcggacgaccccgacttccgtgccatcccagacgggccgcgaaggcggggtgtcgcctgtgcccttttctcagacccggaatccagtgggcagaggcagcttcgcagggggtccccggacggactccttcaccgactgcacccccgggcgagttacgcggcctctctgtgccgcttcatttgtagagggctgtaacagtgacctcgcacggtcatccggagtactaagccccagtaaggtgttcaggactggtaagcgactgtcatcaagtaaggcccccgtgctgggcaccccccgtgctggccgcgtccccgcctctgcgccctgcgtggaccccgccctgccccgctacagaagccagactgggtcccgcggacgccagcaggggcaaccccagcctaggctgcgctccagcactgcggggcttttctgcaataaagtcacgagcgttcga

SEQ ID NO: 494 - protein, 501 aa, Homo sapiens
MGLVSSKKPDKEKPIKEKDKGQWSPLKVSAQDKDAPPLPPLVVFNHLTPPPPDEHLDEDKHFVVYDYTAMNDRDLQMLKGEKLQVLKGTGDWWLARSLVTGREGYVPSNFVARVESLEMERWFFRSQGRKEAERQLLAPINKAGSFLIRESETNKGAFSLSVKDVTTQGELIKHYKIRCLDEGGYYISPRITFPSLQALVQHYSKKGDGLCQRLTLPCVRPAPQNPWAQDEWEIPRQSLRLVRKLGSGQFGEVWMGYYKNNMKVAIKTLKEGTMSPEAFLGEANVMKALQHERLVRLYAVVTKEPIYIVTEYMRCLLDFLKTDEGSRLSLPRLIDMSAQIAEGMAYIERMNSIHRDLRAANILVSEALCCKIADFGLARIIDSEYTAQEGAKFPIKWTAPEAIHFGVFTIKADVWSFGVLLMEVVTYGRVPYPGMSNPEVIRNLERGYRMPRPDTCPPELYRGVIAECWRSRPEERPTFEFLQSVLEDFYTATERQYELQP

SEQ ID NO: 495 - DNA, 2613 bp, Homo sapiens
ccagccgtgctgttaaaccaaaaccccaggagaaaactttctggtgacagaagggcattgtgacccacgttgcccagggccagggacagggcagctgctcatggtccttcctcacgagttttcctggagcagagggatacccccaaacccagggagcccacaggagcttcagaagggctcggctggagggcggggcccctgttgcacttgctcactggggactggggaggctctgatcgcagaccgggggtgctgccacctctgtctgctgccggcagaaagccacaagccatgaaaactgattgagatgagaagaattcatctgggactggcttttgctttaggatggtgttggaagttgctcgttgtcgctaggagcctgctccactgtaagggtgtcgggatctgaagagctatggtgaaacaccactgaagcattgccaagatgtcatcgggaccccagctcggtttccagcatcagctgatgccagcaagaagccagccaggcctggggcttggcagcccagggactttaccatccaccatccacagggctgttgccctggacaggtcattgatatctgactcacagccaattcatggaatggggctggtaagtagcaaaaagccggacaaggaaaagccgatcaaagagaaggacaagggccaatggagccccctgaaggtcagcgcccaagacaaggacgccccgccactgccgcccctggttgtcttcaaccaccttactcctccaccgcccgatgaacacctggatgaagacaagcatttcgtggtggctctgtatgactacaccgctatgaatgatcgggacctgcagatgctgaagggggagaagctacaggtcctgaagggaactggagactggtggctggccaggtcactcgtcacaggaagagaaggctatgtgcccagtaactttgtggcccgagtggagagcctggaaatggaaaggtggttctttagatcacagggtcggaaggaggctgagaggcagcttcttgctccaatcaacaaggccggctcctttcttatcagagagagtgaaaccaacaaaggtgccttctccctgtctgtgaaggatgtcaccacccagggggagctgatcaagcactataagatccgctgcctggatgaagggggctactacatctccccccggatcaccttcccctcgctccaggccctggtgcagcactattctaagaagggggatggtctatgccagaggctgaccctgccctgtgtgcgcccggccccgcagaatccctgggcccaggatgaatgggagatcccccggcagtctctcaggctggtcaggaaactcgggtctggacaattcggcgaagtctggatgggttactacaaaaacaacatgaaggtggccattaagacgctgaaggagggaaccatgtctccagaagccttcctgggtgaggccaacgtgatgaaggctctgcagcacgagcggctggtccgactctacgcagtggtcaccaaggagcccatctacattgtcaccgagtacatggccagaggatgcctgctggatttcctgaagacagatgaagggagcagattgtcactcccaaggctgattgacatgtcggcgcagattgctgaagggatggcatacattgagcgcatgaattccatccaccgcgacctgcgggcggccaacatcctggtgtctgaggccttgtgctgcaaaattgctgattttggcttggctcgaatcatcgacagtgaatacacggcccaagagggggccaagttccccatcaagtggacagccccggaagccatccacttcggggtcttcaccatcaaagcagacgtgtggtcgtttggagtcctcctgatggaagttgtcacttatgggcgggtgccatacccagggatgagcaaccccgaggtcatccgcaacctggagcgcggctaccgcatgccgcgccccgacacctgcccgcccgagctgtaccgcggcgtcatcgccgagtgctggcgcagccggcccgaggagcggcccaccttcgagttcctgcagtcggtgctggaggacttctacacggccaccgagcggcagtacgagctgcagccctagccggccgcgcccgcctgcgccccgtgcccacctctgcgcggacgaccccgacttccgtgccatcccagacgggccgcgaaggcggggtgtcgcctgtgcccttttctcagacccggaatccagtgggcagaggcagcttcgcagggggtccccggacggactccttcaccgactgcacccccgggcgagttacgcggcctctctgtgccgcttcatttgtagagggctgtaacagtgacctcgcacggtcatccggagtactaagccccagtaaggtgttcaggactggtaagcgactgtcatcaagtaaggcccccgtgctgggcaccccccgtgctggccgcgtccccgcctctgcgccctgcgtggaccccgccctgccccgctacagaagccagactgggtcccgcggacgccagcaggggcaaccccagcctaggctgcgctccagcactgcggggcttttctgcaataaagtcacgagcgttcga

SEQ ID NO: 496 - protein, 552 aa, Homo sapiens
MSSGPQLGFQHQLMPARSQPGLGLGSPGTLPSTIHRAVDRSLISDSQPIHGMGLVSSKKPDKEKPIKEKDKGQWSPLKVSAQDKDAPPLPPLVVFNHLTPPPPDEHLDEDKHFVVYDYTAMNDRDLQMLKGEKLQVLKGTGDWWLARSLVTGREGYVPSNFVARVESLEMERWFFRSQGRKEAERQLLAPINKAGSFLIRESETNKGAFSLSVKDVTTQGELIKHYKIRCLDEGGYYISPRITFPSLQALVQHYSKKGDGLCQRLTLPCVRPAPQNPWAQDEWEIPRQSLRLVRKLGSGQFGEVWMGYYKNNMKVAIKTLKEGTMSPEAFLGEANVMKALQHERLVRLYAVVTKEPIYIVTEYMRCLLDFLKTDEGSRLSLPRLIDMSAQIAEGMAYIERMNSIHRDLRAANILVSEALCCKIADFGLARIIDSEYTAQEGAKFPIKWTAPEAIHFGVFTIKADVWSFGVLLMEVVTYGRVPYPGMSNPEVIRNLERGYRMPRPDTCPPELYRGVIAECWRSRPEERPTFEFLQSVLEDFYTATERQYELQP

SEQ ID NO: 497 - DNA, 174600 bp, Mus musculus
  misc_feature (1)...(174600): n = A,T,C or G
actacacattttaacagggtgtggtggtacctccctcccttcaatcctggtattagggagtcagaggcaggcagatctttgtgagttcaagatcagcttggtccacattaagaattccagttctagggagggagagagagagagagagagagagagagagagaggagaggagaggagaggagaggagaggannnnnnnnnnnnnnnnnnnnttctgggattataggtgtgcatcaccacacccaactttaaatttccttgtaaaaagttttagtcaagcattgtggtgcacaccttttagcacagtgctcaggaggtagaggagtagaggcaggtgtctctgtgagttcaaggccagcctggtctacatactaagttacagaacagaaagagattctctctaatatatatgtgtgtgtgtgtgtttgtatataatagaagaggagaggagaggagaggaggattgcctcctaatgtcaggtttttcttctctgatgtcattacagatgatgaagtaaaatagttaactcaaaaccttctcaatctgtcctggctgccctgtttttactttgtttggagatagagcctcgtgcatcccaggctatcctctgagccactgtggagccaaggatagtcttgagcctctgatccctttgcccccatctcgccaacactgaaattacagccacagcacctgctttttctgtgtttattattgctgttgatactattttttattggagtatgtgtctgccattgtgctgtatgtgttctggagcctgtgaggaccaggaaaggatctactgaagcccaccacttgttaggttcctaaagtcatgttattaatgtgtgtgaaccctcattcaagcaggctcatgtatgtcacaactttaggggttggttctcggctcccacggcgcacagaactcagatcacctcaggcttggaagagaagcaatgtaatctgctgagccatagccctctctgtgctgcgttaatcagaccaccacaattcattcactcagtgtttatccgcattgctgagtgctcttcatggaatgttcctgaagaagggaagcccccatccctgctaggaagtcctgagtctaacaggaggcaataagactgtgtagactggcagaggaaaggctccctagggagagtggagcttgaatccaagcagccaaagttagcatgtaggataatagagacagtgccaagtaagaagagaggacaaatgtgcttgggagatgccaggaagtaccaccaaccataacttgggtgaaaccaaagccacagagtcagcatggagggagacctttgctgaaacccaatgtgggtttgttttgttttgttttgttttgttttgttttgaatctcttctgatttggtgcaggctgttgtctctctccatgtctccacgtctccccaccttctccagccagcccaccaccttcacctttctggttcagaggctgaacttcttcctttatcaacatttgtccccagcgtagacaaaagtcccttctttggtttagaagaatcagtcacataaacacaaatttatgaacagttagcaggtatggtagttcatgcctgtcatttcagtacctgggaggcagaggcaggaggattgcttagaggttcacttgtgtatgtgtatctatagcaacctggtgtggtggctgacacgtgtaaggccagtgcgctcagaaggtggaggcagggggattaaaggctacacagtgaaactacctcaaacattaatgacaacacaaagtgaaggcgaaaacaaaacaaagcattccccacccccacccctcaccccactgcccacctcccaaaagaaatgcttacaaaatacggagaaccacaaagtagtttataagggaccccttgctctttggggcttgtaaaccctggctcattctaagtgagatccccaaaaaagaggtcattgctgggatccaccctgcctagcccatctcaggagaggttcaagacccaggagggtcttttgaactctcaatcctttcaagtagaagccaattctactcagtggcctaaccccacagcacggtgactttatcatttcaggaaagacaaagctggataatccccaagggacacctaaaggcccatgctttctgctgaaggccgccactgtgggagcaattatgtcaaagctttaaagcagacactaaaggccgggaaagatggtggagggccaggagggaggctcagcttcctggggaccttggttctgacccctagaaactcagtgttctctggtacagatggtctctcttctcttcctgctttctcttagctctccttctgaggctcagtgttctccattctcgtgagagcaggcctaagagcctcggctttctctgcctccaatgttgtttcccaagccccgcccatctaaacctccagttctagggcagtgttcttttttttttttttttaaatttgtttgatttcgttgattggtttgtttttgttttgtctgtttgtttgtcttgggtttttggagacagtgtttctcggtgtagtcttggctgtccttgaacttgctcttcacaccagactggtcttgaactcagaaatctgccagcctctacgtcccaagtgctgggattaaaggcacatgccaccactgcccggtgtggacagtgttttttcttttttttttaagatttatttatttattatatgtaagtacactgtagctatattcaggaaccccagaagagggtgtcagatctcattacagatggttgtgagccaccatgtggtggctgggatttgaactcaggacctctggaagagcagccagggctcttaaccactgagccatctctccagcccgttttttctttttaaaaaagatttatttttaagccgggcgtggtggcgcacacctttgatcccagcactcgggaggagagcaggcggatttctgagtttgaggccagcctggtctacaaagtgagttccaggacagccagggctacacagagaaaccctgtctcgaaaaccccccccaaaaaaaaagaaagaaagaaaaagaaaaagaaactcctgtgtgctactagatatgcacatatgtagatacataagtaaattttaaattaaaagtactttccccctgtgctggtcactgaacttagggccttatatttgaaaggcaagcactcaaccactgtactaaatccaaaacccattcactatctttgttttgttttgagtctcccatgattcaggatgtccccaactgactctgtgatcaaggacaacactgaacatctggttctgcctccagttcccaagtgctgagaactcagctgcgttccaccacacctgggtgctggctttgagacttgggaacaagcagaagaaacttactcaaagtcctgccattttgttttcagactccagctaaccatagggagaaactaagttcaagatctcaggccctaggggacctggggacttccctgtagctgaacagcttctgctgtcaacagctgtctgagtccagacatctgagggacaacttgtaaggagacagttgtccgagttcagacatttcaaggacagcttccaagccttctggcagggtcaaactaagttcatgttccccgggcccaggaacccactacctaacctgannnnnnnnnnnnnnnnnnnnnnaagtatgtgtgtgttgtgtgtattctcgagagcgtgtgtatctgtaagggggcccacagaggactgaagattccctgaagctaaagttacagaaggttgtgagctgcccttcttggatcctaagaactgaacctgggatttctggaaaatcaggaatataaagtgttttttgtttgtttgtttgtttgttttttggtttttcgagacagggtttctctgtgtagccctggctgtcctggaactcactctgtagactaggctggcctcaaactcagaaatccacctgcctctgcctcccgagtgctgggatcaaaggtgtgcgccaccacgcccggctttttctttttcttttctttttttagtactattgtattttatgtgtatgttttgtctacatgtatgctgtgcctgatgggtgcctgttgcctgtggagaccagatgagggcatcgtatcccctaaactatttacagatggttatgaaccattatgtgggtgctgtgaattgagcccaggtcctcaaggtttaggaattaacaaatttaaaaagttgtttttttttttttttttttttttttttgctatggttaacataacccagtcttggcttgaatctcctatgtagccaagggtgaccttaaacctcagctcttcctgcctccaccttctgagtgctgggattacagacgtgtgctattatataaactcagtttagccaggcgtggtggcgcacgcctttaatcccagcactcgggaggcagaggcaggtggatttctgagttcaaggccagcctggtctacaaagtgagttccaggacagccagggctatacaagagaaaccttgtctcgaaaaaacattaaaaaaaaaaaaaaaaaaaagctcagtttattgggtgctggtaaatgaacccagggctttgtgcatggtaggtgagcattctgacaactgggccacacccctaccctccaattttgaatttctgatcctccagtcaccatctcaaaaatgctgggactagagacatgagccacttcatcagcttatgatgctccaggagaatcaaacccaggacctcaccaaggctaggtaagcactctcctaactgagccatatccccagctaccttctcccctcttaaaatgtgtattctggacacattacataagatgagcctaggctagggctggtttgttgactaggataataagatgattaagactaggggacagagagagtgatatcatagaaaccaagggaacccagaacttccagagggaagagtcaacaccaggtacgacagacgagtcaagaaaaataaggaccaaaggctacctcattagattcgtaatgagaaggtcaattgtacatgctaccatgacggctttattggagggttgaagacaggtgaaagcatgattaaattaatagctggttggctaatgacaggcgagggagggaagacactgtagattattatttgggtagctcggttgtgcaggactcagggagacaagtaaccagatgcagactcagggctgaaggcaatggccctttgattttcagtcaagaattattctttggtcacaggactgggagaaatcaaattggtgctgactggaagctccttctccctgatagccagctctcaaaatgttggaaggcactatgtaagctgctggagggtactgggcggttaccgacagtcctacccaggtgtaagtactgtggattcccacagctgttggctgggcaatggtggcactaatatcgtgaaggtaaccgagagctgtgagattggactgaaggtccaccctgtatgggggaactcggatctcatgcctcaaaactagccaagaactggggagctcatagaccctaggggagaacctatgactactattttgctaaagggatataaatataaaccatcttctaactatttctccttacacccatagataagtacacaccttgactctcatcaaaaagcttctttttgcggcacacagaggctactccagaaaaccacaacttaccaaagcatagaaagcacccatctgcaaatgggacacgacatctatacccaagggtttcaggagagggggtgaatacaggaagagccagaggaccgggaggactgtcgtaagatagtatatctgtacatgaactatcagcagtatggttacctgcatgtgaccacatgtggagcaggaagctaattgcttatatcttgaactgcaagcatgaagcagagtgagagagaaaaaaaactggaaaaggacgtgagttttaaagcctgtctccagtgacacacttcctccaacaagaccacatcaccaaaacctccccaaacagcaccaccaactggacaccaaatattcaaatatatgagcccacaggggacattttcatataagccaccacatttgtccaaaaggtcaactcaacacccacgtatacacagacaaccttacagcataaatacatacacacacacacacacacacacacacacacacacacacgggaaggggtggatatgacataaatatattgtagttatgtatgaaattctaaaagttgaacaattacattgtcattgtttgttcttgctttgccttgtgagatctgaagctgttagaagggctgtccagatggaggggctgttgaatgggctgcacaggggccagctagcagaacctcactgccatggagtggggtgaaagagaatctgaaggctgccacagacctgtgccagtggagtacggaactgtgactgcagacagacaaatagtaccgtaggcacagtcagcgccaggaattttcatggcagagttgtgattctttctcacaggagcttactatgtagaccaggctagcctcgatctcattgagctttgattcttgaaagaatgaaggaacaggtggtgaggggaaatggctcttcaggttgaatgttgatgaattaaagaagaaaaaatgtaagccaggtggtgcacatctactcccagccctcgggaggcagaggcaggtgtatctctgagtttgaggccagcctggtctacagatcgagttccaggacatctagggtgacacacagaatccctatctcaggggtggggggagtggaatgcaaaacagagctgtttgtgttttctggggatcgaacaatttgtatgcagactttgtttctgcttcgagaggttgcagaatacagcgggtggttgctgacagcatggcttcacctgaatatgttactctgctttacatcctcagtgtagaggcaataacattaactgctccatccagtctgtgtgagaattaaacaggctcagagatgtaaagggcttagggtagcggctggcatgaagtaggtattcggttagtaccatcaggtcaaagatgaccatgaagaaacagactgggagcatagtgaggcagccctttaatcctagcagttgggagcagctgggagatgggttgctgttagtataaggtcagcctggtcgacatagtgagttctaggacagccagagcttcatagtgagaccctgtctcaaaagcaaaacaaacaaacccctcaaaagaaagaaataaacagaaggagtaaggaaagtccctcagcatcagaaactgccacatgaatggaacaaatagaaaacaagaagtcagtctcagattagatagatctgcaaaatctagggggtaaaatgagtctctcctagccgcagttaactgataatatctcacatctattttcaacctctacagaacacctaccccatccaaggttgtccatttacaaaacaaaagcacagagtgctttttctctcttctcttcccattcccctccaaggtgactaggcagaaaccagggctttccctcctcttggcaacccactgcaccccccgccccccagcacgctaacttgaacagctccagtttcggtttatctggctgtggagcccctggggctctccaggctgcaggttgtaacctgcagctagctgtctttcctctctcacctgtcgctgggtggtgacttacaggccttaagaatcttctgcatcttcaaggaggatcaagagaccttgagtccaaagggagactaaccacaattcctcagggcctttgtcctgaatttccatgtaaataaaatttcctgttgaaacttcttaaccttcttttttcttatctcactgccccagtttaaaaagctagagtggggctgggcattgaagctcacatctgtagtcccagtagttgggaggctgaggtaggagcttggagcctagactcgtctcaatttatggcaatcttcctgcttcggtttgctgagtgctgggattatagtatgtccagtgctattcccgtttgatttagtgttactaacatatagtaagggtcattaatgcaccccaaatctgacttttgtgttggctaaacagaacatgtttgtaggatagacttggtgcacaaaccaccaaccagcagtctctgtgaggctgataaacagtatttacactttggtttcattgactcacacgataaatgtcactgcaggttgggtgacacagggtctccactttacacattaaaaaagatgaaatttgagtggccaaataagttgaccgtgaccacaggttggcaaatgagtgggatttgagttaagtttgtttccataacccaaggttatgactcagaggatgcagaggctgtggtcaaggttgaatgcatccatttatcctgaaggataagtcagtaaagaaacaagagggggacaaggcagtcagagaaaatcatcaaaatcaaggatcaaacccagaggtcttaaaaaggagaggaagaggttttcagatgaagggtcagttcttggacaccgtagtctcaatacagattgctagagtttaagagtcctgcagaatctaggtgaggcgaggtgcaaacctttagctccagcacttagaaggcagaagcagatggatctctgaagtggagaccagtctgtctactgagtgagtttacagaccagctagggctagatacagaggcaggcgagagaggcctcaggtctgttattccagctacttgagagggtgagacaggaagattgcaagtaaaaagctaatttgagcaactcatgtggacctctatcaaaacccaaagcacaggggctggagagctggctcactgggctctattctctgcccctatgtggtggctcgcaactctctgtaattctaggtccaggggatcggatgccctcttctgaattcagcacaggcatacagatatacattcaggcaaacatccataaacataaaaaaagaagagaaaaagaagtaaaaaaacaaaacaaaacaaaccccaaaaaccccacccatccaatgaaaaactataacaaaactccaaacacggccattgagatggttcagtgggtaaatgttctggcttgctagccagataactgaattccatccctaggacccacagggtagatagaaggagagaactgactcttgaaagttgtcttttgacacatgctcccacatgtgtacacacacacacacatccaataaataaataaataaataaataaataaataacaagtacattacacagaaggggaaaggcccagcaccaacaaggcagtgtatgtattttcccagctcactagcccattcctattcttagaagtgccttttctttctttcttttttctttttttgagacagggtttctctttatattcctggctatactggatctcatgctatagaccagactggcctcaaactcaacagcgatcagcctatttttgcttcccaagtgctggggttaaaggcctgtgacaccatggccagttggctttctctttcttaataaactatctctacttttattatctcaaaaaataataaaaggaaggctgggaatataactcaaggatagagcgcttgcctaccattcataaagtgctaattttaatgtccagaaaactctccacacgcacacaaaagagaagttaggtgttgcgggatggacagggaaaatcctgcaacagataggaaggaaggaagagagaggaagaagtaaagaaagagaaggaaaagaaaggagagggaggtacaggaacagcggcacaattgtaaaacggtgacagatgactacaagttccagagagcggcgcgcgaattttcccgccagcgcctcggcctgacttgtgggaactacacatcccagcatgccccgggacgcaccggtcctcgcccctcgtcggtcccgcccccttttcccccacagcccccgcccgccgggttggcctcggagagtttgtccggtggccgaggtagacggaggtgcagtgagaaccccggcggtagcacgatgggagactccaaagtgaaagtggcggtacgggtccggccaatgaaccgacgaggtgagcgcttgtcccgggccgggggcgacaggtgcctgtggtggtagagcttcggcgtcccgggggtctcggcgggctcccttcagcgcgcgtgcgccctcgacggcgcggtcgggccctcagccctccgccccgccagctgtcaccgagctctccaggcctggggcagctccggcctcgcagtcctcctgtgtacgcagctcttagggcggacagccctacttttcgattttccacgttctcccttgaacctgcaccttgtggctgtttgcagaaaaggaaggacatgcatgccttcttagttcttttctggtttatgactgtcgagaggtttcctttttttccttttgcttgaagtgatagtcatcatctcaacaataaatagtctcagtgccaagattcttgggaaattgtatctttcagacatgctctgaagtctgtagggagggtagagaaagtagataaacccaggacacgtaaatcatctatccaagttggaaagactgaagcccaacttgaatccggggagtagctgctttttgcctctgtagcttcaccagagggtgactgggcagggtacttaaaatgaggtgatgtgtttgaaaacactttctagacaagtcttgttattgaggttgctgccgcgctcccgggagatggaattgctgctaattgatttagactactgactagctagagccattattaagtgcaggagtcattttccaaggtttctagtttgttttactgtgtttaaagtctagtgtgtaggaaatagtttttctgtctccttgcccttttgtgtatgtattgaggtaagtaggtgtaaaagttaacaaagatttctctggttggttgttccttgggaacttggtgtctctgttttcttgtcgttggtttgcctacttgaacctgctgaagtctatgaggcaagcttttcccctgaagacagaactttttttttttttttttttttttttttttaacagcatttttttttttttttaaagatttatttatttatttattgtaagtacactgtagctgtcctcagacactccagaagagggagtcagatctcgttacagatggttgtgagccaccatgtggttgctgggatttgaactcctgaccttcggaagagcagtcgggtgctcttacccactgagccatctcaccagcccaagacagaactttttaagctctcagctcattgcctcctaacatccaggttctcacaaaacagagtgagtagcttagaagtctgaaagttttcagttctcccattttttgagtatccagacatctttattttagatcacttcacctcattgtgatcattactgcgattaaaaaaaaactaaagaaaaaaagaaaacagccaaatgaaatccgacatatctgggaatgattcggaaaggaagggttcagcacattcttaaaatttcctttttgcaaaacccttggaaatgtcagtgctgaaggaggcctctaaccagccaccacagcagggtttggcacagatagttagagccggactcttccttgttttctcttactgggaggaagctactgtctttaatttgctatgcttgtaattctgacagtggctgttactaatgctcagagttttgagatattcgttgaatgatttctagctgttccttgtattccttcctttctctttctttcctatttttgagactgggtctctgtacatagccctggaactcattatgtagaccaagctggcctcagattcatagaaatatgcctgcctctgcccagatctttggtgctgggattaaaggcattcgccacaacacctgacccttcttttctttttaaaacttaggtgctaaggatctgaactctggtcctcacttggttttcatccattaaaccatctgagttcaaccaaccacccaggcatctccccagtcctattttttttttttttttttcatttatttagaggcagtctctgtgtagaccagggtggcctgggacttgcagtcatcttcctccctcagcctcctgagtgcattgcaggggtgcaccaaccactcctggctgaactcactttaaaatgaatgtttacagtttggccccattgtccagtggcagctgccccgtagtctctttgcttactctgtcttctgtttctagtgctcatcatagataatttcttcatctacaggttattatgcaatataatagagaggaatcttaaagcttgttatttctgagttggcatcttgaattcctatgaaaagggagtaacaaaattgagctcctttttgctgagtttgaaaagaattctatttaagcattgcttctggggaatgtagtgttttaagggatagcatgtggctgtcaagtagttgggtctagtcctgagtgctcctgactcagtgtgtatgtgcgggaagtgtcctgaggattgacatggagacaggctgagactgggtcactgggttgtatttctgatcatagactctgttgtttgagtgacatttgtgtcttttgagggaagtccaaaggtttccagaactcttcagggtagggttcgattcttgtgtgactcagtggctggttgtgcttaagggggttcagtttttctgcttaactgtctgtggggttgggaaaattaattgaatattaattggtagttcctaatttaatgataactagagttgtagtggttaatttgtcaagataaagaaaggaagtgtgtgtgtgtctatgtgtttgtgtgtcgtctgtctctctgtcgatgtctgtaatcttaaaacttggtggaggcagaaggatctctgaggtgagtctgggctgtgtacatagtaaagttgcttttttaaaaaattaaaaaattctctacatccttgtctgctaaccaactaaccttccttcctcccggcctctattttctacctttttttacctttggtgatgctggggtcttaaccagggccttgcatacactaatgttttcatttagatgttatgctcacatgtgtgtgtaatcttacatggccttaacattacagcttctaatcatctgaaataggaagctaaactgctaaagaaaattatttctttactgctaaataggaagctaaactgctaaagaataaatatttcttaaaagatcttgggacatcagtgggaggagaggcccttgggcctgagggtgtttgatgccccagtgtaggggaatgcctaagagggaagacaggagtgggtgggtgggtgggggaacactctcatagaggcagggggaaggaggatgagttagggggtttccaaaggggagacctggagaggggaaaacatttaaaatgtaaataaagaaaatattaaaaaataaaaaagatcttggacttgtatttgcaggtgatgtccctttttttagtattgttttgacattgggtctcaggtgactcaggctagtttcagacttgctgtgtagttgaggcttactgtcttgttctgtcaggcttcgtttttgtctgttctttcagattgtacaactcagcagattacatttacattcttctacatactgcacagaagaccgtttcatatcttattataaataatctgaaaggcctttatttttgttttgtgtgcatgagtttttttcgctgcatacatgtgtaataccatatgtgtacattatccaaagaggccagaagggggtgtttgatcccctctagctggagtgctaggctttatgagtcacctattactattataacttactattattatgatatgggttctgggaattgaaccttgggtcctctgctaaagcagctagtgcttgtaaccacggaaccatctcctcagcctctccgaagggtttctaagcacaggtccctttagattagggacagtctccttttcagggatttgatagtttacattgggtagttaaaaaaaaatatttaataggcaaatggatattgactacttgccaggtttctagttcatactagattgcatgggagcttcaatcaaggaactgccaatttaaaaaatatgtgtaagattagccaggaaaaataaaaccattataaagtgtttggaaaatacttttgctaaaggaatggaacagaaaattatgccagaagttgagccagaagctcctgagcgtgtgtgataactctgtttcagaaggtatttccaacgagcttaaagttggctttaggcaacatttaaagataaaacacaaaaaaaaaagtcagaaacttccagatatcctggtcctggtggtaaagtggagggactatgatgtaggcattgaaagctgtgccagccaagacagacatgctatggggagagcagaacttgaacccctgtgtgtaactctattagtgtggccattggtgactagaaaccatgtagccaggggaccagggctagcagaagctgtgaaaggaaatggattgctcttgtggaaaggattttgccaaagaccttgtttgtgttgccctgagttgtctgtgtcttcaagtgtgctgtatggtttctgtatgaggaaatgactgtcatgtgaggagagatgatgaaaaaaagataaacaggtagagcacactgctacttattaagtgccaggtgagtgacagtgacacgtaggaatttagaggagtgaaagacctctgcatacctggtgattagggaagacttcactgctcctggagggcagatctgggttacaaacattcccagcaggaggcctgtgatttccctgggtgggaggggaaggccttggttctttgaggaggaagccaagcacaaaggcacgaaggagtaaggcctgtttaggcagcagagactagattggcctgtcctaaaggcggattctgcagggttgactggaggaaggggtgaggagggctgggaggagctcgggactcctggggacagctaggccagaagtcatcttaggtggctggtccagagctctctagacttcatttggccacaggcatgaaggagaaagattgctgggttgctttgcatgcaagctcagaagactcaatagatggctgagtccttgccatagttgagcaggtctaaaacctacttgatagacatgaaaccaggtgaacaagaagtcagaggaggctcgccatactcaagtagccttgattcagaagatacggggcaacttcagaaatgggaaacttagaaggccctgtctatcaaggaggagataggaagagttctctaggaagtgaggggccaagccaggtggttttgaccttggtgttgatcatagggaggctttggatctttcagaaagatgtctgacaaatgtggaaccacaggtggctgaggctggaaatttctgacagtgtttgctgaaacagaaagtagttgtttgcacacatctgcatgatgtgccaatatccagtgagacacccccaccattacaacactattcctgctgtcagtccagggacagaaacttgggtctgtacacagaggactggagccctttgctgaaggtataggcatctttgttacaacctgtgttaccatttctgtcacctctgtaaaaccatgactaatccctcacttttccacttcttcagttctgaatgcgggagaaggcactgataaagctattacttaaggagatgaattgaggcgtttattgagtggaaaaggatttattgatctctgcttactgatggcaggacatgttctctgaacaaacttggcagagatgaacagtgccttgtggggaagcatatgaagatccatgactgaatggttttcactcatgcaagctgtggaagccttagaaaatggtattcattaacctatccagtttaagtattgggtgaagaaaaactatagtaactactgtttctgtttttcttctggagtgctggggcttgtggaagttgattttttttttttttttcccacctagtgtgtaggtccagggactcaaactctgtcaggattgcagtaagcactttctgtggactggattatcttgctggtcctctgatagggatcttccaaagacctgctccagtagctgtgctgagttcctgtttgttgctgggactctaacccagggcctttcatgtttcatgtggctttatcattagcccagtcccaggacttcctattttctattgtgagttacagagtttactgtctttggtattttttggttttggtttttttccctccacaaggcaaacatctaagtagcgcagggtgtttgcaaacttgccatttttctgcttcagcgtcccaagtgctggcgtgtacgtgtactgataagttattcttcgtcagtgcagtgagccagttgaagccagattagagtatatataagtaagtttattgggaaactgttctctggtaggcaaattcactgggcccaaggaaggagaccagggaagtcacatgggaagggagacaatagagaagggaggggagagagagagagagagagagagagagagagagagagagagagcaagccagcctcaggcagagagggaggaagataggcaagagaccaaaatgtctggataatatagggaagagcagctcagcccctgggctggaatggaaagttcaaggtagaggggttgagtgtaccaggtagggactgagggatgctaggagaacttgcagtgcaggtctgctgtgatatgtaaaatatgcacctcagccatttgttctggggcctgaaactaaacgcgcactattacctggtgcacagttgtagctttggtttttgtttgtttctttagatagaatcttagtttgtagccctggctgttctggtacttgttatgtagaccaggctggccttgagcgagctcacagagatgagactgcttttgcctatcatctgatgggattaaatgtgtgcattgctatacctggcccacaaatagtttttagaaaatgcacaggcttactgtattcttcaagctgaactttgaaatgttttcgtagaatttctatatttcacaatcccagagaaggggattattttttttaaggtggttccacgtgggagaggtttattgtgcagaggcagaggggtggcgaatcgggtagaagggcagagaagaggaaaaaggggggggggagagaagaaagagagagagagaaagagagagcgagaaggggattattagccttgtaggataatcaaactagtattttgggtgcctgccatcagaacttgtgcttttcctgggcctctcaggaaccaggcagatctgaagacagatggtagtcagaggaacctggcaattctgagaggaatggtctttcttccctttgcatagggtgtcactgtacaacctagtgagagtcaggctggcttcaaacttacaacagtcctacctcagcatccgtagtgatgagtaaacacaggcacgagtcaccatgctggtaagtcactatcctgaccagaggaacttaggtaacagcaggtggcacaggccagttcgtgatcaggctgcagatgcttgtgcagtaagtaatgacagttgtagagcagtagggcttgggtttgagcatgcactgcaaacagtcctggctgtcttccttgcctccaaggcccatggtgctgatgtagaggggttccagtgaatgctacaaatgaagtgaattcagatggtgttcaccttggagcactgagcttactgaatccacctcaggtctgctttagatgacggggtgcatgctggtggctctcgccaacaagtgcaggagaggcaggttttaggggaggtgttggagacaatgaaccatgctctgagtcattagccagcttgagtcaatggggatgtgccaggtactgtatctgcacctgttgagttagctgttacaggtgccgggaagacactcagtggttacccacagttaaatggacagaggcattgtgtaagagagactaagaatctgtacagacctggagccattactgtagaagagagaatttatgttagggcctgtgtgaaggaagaggtcacagaggccaaaggaacccaagagaaccaaggggcagaaatgctgtatatgatcatggagacaaaatgtatcacagaataattggcctacagtcagatatcacaggaatgggcatttgttttggcctcatggtgttgatggtaattttcataataacatcatctagctagatggatgatttggtgatggagtgcggtgtaggcagtgtgttgagcataccaattgggcatgccgatattgaggctgtgagtctacgggaatattctttcagctcctcagggacgagaaggcaaaggcgtggtctagagggccaggaagccaacgctaggcctttccagcctcttaattatttagtttcttcttaaaatctaggagatttttgggccagttatatacagaaagccattggagagggaaagctttgaaatgtgggaggagaaagaggatgattctttaatgggaaggccccagagagtttcattttcttggaaagattaaaagattgaaagcgaggagaattgtgtgagctgaaacaaccagagacagtgtgtagactatgttgaagcttgaagagggctgtggctgtagttctgttggtagggcttgcttagtatgcatagagcctagttcccaccccagtaccatataaaatgggtgtggtggtgcagaaggaggagttcaaggttatccttggcagccacctggaacacaataaatcttgtctgaaaggaaatataaagcatttgaaggattccagcaatattttatatctcccccatcccgtctctctcctttcttttcccttcttgtcctggctggccttacttagcctcctgaatagtttcacgtgcctggctcttcctcttccttttaaaaattagataggtttgtgtaccaaaattattcccttcagtgttttgggacattcagatctgtgtggccattgctgctgtcacttcccattccccgatcctgtcttgtctctgtggattttcctgtcctggtgtttcatagagatagactcatacaacaggcttcttccagttggcataatgaatttagggcttacccatgctgtatagcatgaaccaaagctccattctttgtatgtctgaatactatttgattgtgcctcattttgtttattactgaccagttgatgggcatttggtttgttcccttcttttgactattatgagtcaagctgctatgaagtttagggtttttcttttagatttgtttgtttgtttgtttatgtggatttttttgtttgttttgagatgtaggttcactgtgtagctctgtcttacctggagctcaccttgtagaccaagttgccttgaacttacagagttcctcctgtccctgcctccagaatgctgggattaagtgtcccaccttgcctgaggtaaggtcagctttttgattcaggctcttctgtggtccatcccttctcttgcggcgtgctggcattgcaggctgtgctaccttgtctggcaggtgtacaggtttttgtatggaggtttatattcattttgtgtgtgcatggacacaggagtggagttgctctgacatacaccagttctaattattttttaaagatttatttatttattttatgtaagtgagtacactgtagctatcagacacaccagaagagagcatcggaactcattacacatggttgtgagccaccatgtggttgcttggaattgaactcaggacctcttaaagagctatcagtgctcttaactgctgagccatctctccagccaagggttttaatcacccatttctttttttctttctttctttctttctttctttctttctttctttctttctttctttctttttctttttttctttttttttcttttctttttttttttttttttgagacagggtttctctgtatagccctggctgtcttagaactcactttgtagaccaggctggcctcgaactcagaaatccacctgcctctgcctccctagtgctgggactaaaggtgtgcaccaccacacgtggcttaatcacccatttctaaatcttgaggtttggttgtgattttgagtgtgcatattttgtgtttgaagccaaataaaattactgaaagttttcatgctgacccctctttcccttgacccacatcatctcttattgcatctcctcagtgctcacccatcgtagaactcaatccattgctgtcatttattagttgagtagattttgatattcactgatatataaaggtagagaatacttctaatatgtatttatatgtcttacatatggaagtccattttgctttccgtaaaaagtattacatgtgggctggagagatggctcagtagttaagagcactgactgctcttccagaggtcctgagttcaattcccagcaaccacatggtgtctcacagccatctgtaatgggatctgatgccctcttctggtgtgtctgaagacagtgacagtctacccacatacatgaaacaaataaataaatctttttaaaaaagtactgcttgtatttattggcgagcagcacgtgtggcacagcacatgcagaggttagaggacaacttgtaggaatcagttttcttcttcctgagggtcaaactcaggtcatctgcttagatggcaggtgcctttaccctctgagccatcttgccaactcccagtttgctttttacttacatggtattgccagtttctagcccctgatctggaacgttgggccacagtaagacagaggagtccagaaaagtgtaagctgcttccataagcagtgtagataagtgaggggttggaacttgaaaacaagaccacacattacctgcagattttaaaattgaaaagtgaatatgggggctggtttgatggctcagcgggtaagagcactgagttcaaatcccagcaaccacctgttggctcacaaccacctgtaatgagatctgatgtcctcttctggtgtgtctgaagtcagctacagtatacttatgtataataataaataaatctttgggccagagcgagcggggccaaccggagtcagtggggttgacaggagcaagcagaagtcctaaaaattcaattcctgccaggtggtgcacgcctttaatagtagaacttgggaggcagaggaaggcggatttctgagtttgacgccagccaggtctacagagtgagttctaggatagccagggctacacagaaaaaccctgtttcaaaaaaaccaaaaccaaaaccaaaaaaaaaaaaaaaaaaaaaatcaattcccaacaaccacatgaaggctcacaaccatctgtacaactacagtgtgctcacataaataaatacataaacaaacaaacaaacaaacaaacaattaaataaataaataaaaaagaaaagtgaatatcataagtaagttattaccttcctttataaagtaggcactagaggtgttgagtcacttagggctagcttttttagtgacatgcctggtaagaagaggaagggtctctgtgtttggaagtgggcagtctggtatggaaaccagaaaggcagattaccaaatgggcatctctgatacttcactcacaagtgcaagatccatttcctcagacagcacatgagttacataaagggagtgtcccaggccctacccgtattttaatatgaagtcattggggtacaagccacagccgatttgtacatcgaagaaagacttgtttcaaatgattgctcactcttacagagtgactaatacactggctgaataagcagaggtgtcagctgttgatagttaatatcatgaataatttgatgtgcatcctttttgggaatactgacctacagtagtttgggagcctttaatattaatacagtatatttcctgcccccctccccctttttgagacagggtttctctgtgtagcctgggctgtcctggaactcactctgtaggccaggctggcctccaactcagaaattcgcctgcctctgctgggatcaaaggcgtgcgccaccacgcccggcaaattttttttttaaaaaaagatttatttattattatacataaatacactgtagctgacttctgactcaccagaagagggtgtcagatcttattactggtggttgtgagcctccaggtagttgctgggatttgaactcatgaccttcggaagagcagtcaagcagtcagtgctcttacttgctgagccatctctccagcacccccccccttttttttcttaaaggtttaggaatatatcaaagtacccatggtcctgaggattataaagcctgcttagtcataacacaaacttaatgtattactgaaggtttctaattggttgtcagacatagtgttaattctcaatcttgttactttaggtttcattatgaataaatgtgcccatattatttattgtaatactgattagtatttggttatgtttgaaccattttaagtggagtggttggagacattacggacatttcacattgtgttaccatcaccaccatccatgagcagagagaacctttttacattgtaatattaggtatggtgatgtataactaatcccagcaattgggagttagagatcagaggcggaggctggaggattgctgcaagtgttttagccagcttgggttacagtgtgaggccnnnnnnnnnnnnnnnnnnnntttagcttcctatttcagatgattagaagctgtaatgttaaggccatgtaagattacacacacatgtgagcataacatctaaatgaaaacattagtgtatgcaaggccctggttaagaccccagcatcaccaaaggtaaaaaaaggtagaaaatagaggccgggaggaaggaaggttagttggttagcagacaaggatgtagagaattttttaattttttaaaaaagcaactttactatgtacacagcccagactcacgtcagagatggcccccccccccccccccccgcaaattgtttaactattaactcttaactcctatccagcctgctgagcctgccattcttttttccgtctgtgaatctgactctgggactcatgtaggtggaatcttatggtacttctctttctgccattacttcattcctgtaacatagttaccccaagggtcaacccagaagtgggtgtggcgtcacacacctgtggtcccagcacttaggagtagagaccggaggattgggagttcaaggacagcctcagctacatatatagcctaagttacatgggatcctgtttcaaaaataaatttaacaaatttgtttgtttttaaaggctgaataatgttacttgtgccgggtgtatgtatgtgtgtgttgtctatccagccatcagtaatggattcttaggtttcttccactttggagattatgaataatactgctgtgaatgaactctgtagctttattttcacagaggtagtatatggctgttgtccccactgtgttatatatatacatgtgtgtgtcagtgtgtgcaagcagaggctagagcatgatgcctcagtcactctccacattattttttgagatgcagtccatccctaagcccagagtgtgccattttgttgcaaacatgctaagctttaggtgggtgtgggggtcaaagtcagattctcgtgttgagtaaactgcttttacctattgagccttctcttcatccccttaaaatgttttcttggataaccagccttcaagctctccaaacctcactggttatttgggtgtgtgtcctagactgtaagccctgacacattctaaacactcctgtgaaaagcctctcttgatgtctgtccaccagttgacagaattggggtgggagttttatttggtaaatactgagctatgggtgtggcttctcactctggtaatcccaacattccagaggcacgaaacagaaacaggaaggaggatcgcctttcgttccagtctgggtttcagggtaaaataccacctcaagaaaaccactcccaacaaaaaaaaatgaataaacaaaaagccctgagctaataaagaattgaagatagctaattacgtgttaaaggctgcatttgagtggcatgtaggggtatttataaatgtcagtgtatttgggataaagtgaattcacattcgatgttttaattattaaatgatacttggtgatgaaaatttccagcttcttaataataccatttaatgcttccaaattattaattgcatttgatgacctacatggtgtgtgtgtgtgttccaaaaggagaagctgttaagagagtggggcttgctaggagtttaagcacattcctgtatcccagcacatggcaaactgagggaagaggagcatgagtttgattccagcctgggtgaaagtaataccttgtctgaaaaaaaaaatggtggcaagcagggcagaagcatacaagtgttgaaggaaatgtttagattccttgaatcttctcccaactcaagataatttgcttgtacattcttagtgaaaatccagttttgcaggaggcattcttagcaaactcaaagctacactgcctttgtggtgggcggtgagattgtgggttctgagtcagtgcttccggagctttagtgatgtgttcgtgtaatagagatctgtgtgaggggccagctcctgcagtgtggtcagataccactgggcaagcctattagcgaatctccatgcctgcaggtgctcaagctcaacccacagaagcagggctcactcgtgcttgcttgcttgagtgtttgcgaagttgcctcccagtgccgagccaagaccaaagcactggaagtaaatgacaaggctaactggccaccacagagcaaaacccccctttttggaattagtctttcacatctaggtgaaactggagagaaatcaaatagtagtagatatgcaaaagttaacttagcgccagcaaaggaggaaccatcttattttgctatgtaagttaaaatgaataaaaaacatgcccttctttgacatggaaatactttattacaaatgttacatagacatttggccaagcttatttgggaactacagctgagtccacagggtacagcccctttcctgagagcttatcttttggcagtggggggagtaaggcagactgaaacagtttcattctttgggtcagacaaatagaagaatataaaaactagagaacaaacacaggcagagtattcttttttaaaaacagctttgctcagacacagttcccatccaaacaatacatccagctttgtggtttgtagttagttcagctgtatactcaggaacacattttgtgtctctcagaagaaaaactcgacctgtagcagttttcctttgcaccagacactcctcatctgctttttcttttgtacatttctccacttaggtatgagattgaatggaatctcataccatgtggttctttgtgactgtctattaaattttttgtattattattattggtggtgatatgtatgtatgacgtgtgtgtgtgcaggtgtgtgcatgccatggtgcatgtgtggaggtcagactggttctctccttccacctttacataggcaacagggaaggaacctgcattttaaggtttgcattttaagtgcctttgcctgttagccatcctactggcctttgactatccctttttaggtcactgtaagcctcagccaagtagtggcttgtatcaggagttcattcattttatgactttaacactaagtgttgtgtgtactagcctgcatatgtggagctgattctttccttccactgtgggttgttccaagggtggaatgcaggtcatcaggcttgcccatcaagcccttttcctgctgcgccatctcactggccctactcattttaattattgaataatgttccattctgtggcaattcacattatctgttttttgcttgatggacttctggggttgtttctttttcttctactttatgcaaaacacactgtcatgaacgttttgtctagtaatttttgtgtcgatgcaggtttcagtgcatctagagttgctgggttgtatggtgaccctgcttagccctgttaggaactgttgagctgttttcccaagtgaccagcccacttgtgtgccagtcacatgccttctgcacatccttgccaacctttgtttttgtcttgttggctattgttctctgagtgggtgtcagggggcatctcactgtggtttgattcgcctttctgtggtgtctagtgacaccatatgcaccacacggtgctgcatgtcttcctgtgctcagtgggcatttttgtacctgtttagagaggtgtcctggtaatttgcccatttgaaaattaaattattgatcgttattactgttgaagtgtgagtgtaagactttgttgttattatctgagacagtatttcttaactaggctggtctctacacccctaaccatctgagggttgtcttgaaccccactccatctgcctcttccccctaagtgcttggttacctcctgcacttccatgtgcaactgagttctctttatattctagtgcaggtcctttagtatatagatgtgcttggcaaacattttttctttagttttgtagtcttttctctgtgtcattcccacccctgcccgtgttgctaaggatctagggatttactcagagtttctcagctcagccattacagccccaggccctgctgtgaacctttgctctgggagttactgctgtcttagcactgtgaagattttatttgtgaatgctgaatgtctccccacttatttaagtccttaactttttcaactgtgttttagagttttcgttatacaaatcttgaatttattttcaatttattcctaattaaaaatttttgatgctattttaagcgcaatttttgaaaaatatcattttcatatttccattattggtgtatagaaacacaatggatatttctatgttcaaaagtatattatgtacacacacagtctatacatacacacacaccacacacacatacacacagtacacacacatacatgttgtttgaatttttattagtgggtcctataggacttttcagtacacaaggtggaaccgtctgcaaatagagaattcacaccttccttccattccagtctggatgtctgtattagtttttcttgtctgactgccctgaccagaatgtcgagtgcagagctgagtagaatttgagcagtaaacagccttgtgctgatgttggaggttaagctgtccagtccttcaccatcaagggtgatgtgatgaggttacgctttattagactgagaaagttcctgtctattcttcgtacagttttcacagaacactgggatttctgttaaatactttcccgaaattatttatttcttaagcatgatggccttttttttcttacttttttttcctgcagaaattgacttacataccaaatgtgtggtggatgttgaagcgaacaaagttattctgaatcctgtaaatacaaatctttccaaaggagatgcccggtaagttatgaagcaataccatattcactgaaatcatcactggctactggacaaatgagggtgctcctaaagatacatggctaccaggaggctgttcccaggctgacaatgagtgagggatgtcaggagtgctgcagatagctagggggacagtggggactcatgacatgtgggcactaagggctgaagtgatgaggtggactttaagcagctggtgctggctgatggaccaggcaggtgggcagcaggagagggcaggaagggagcctgtgcactgacttatcctggtggcttttactttggccattccaggggctgcctttcctatagccctcagagggatgtttcctttaaacacaggcagactggagaccatctaacttaattactgtgctctgttaactctttgaggcataccttgactgtcaggctaaggatggatatttcagcctcacttgtggatttgggcaaatatatgaaacaaaagagaaagaggggaaaagtgaattgggagagagtaatgagattatgtttttctaaaaaaattggagtgaaattaattagatcaaataagctgggctcagattatagcaagtagacaaggagatttacattgtagtccaggctagccttgaacttacagttttctgctatctctttgagtactggaattataggtgtatgccaccacacctatctctgcttgtagttttttgataattatgaggtgaattagaaaaaaatggcaatgtagacagcagagtaaaataggaaagaagggttttatgggagacatctctatagggatgctgttgtgctgacccttgacgtaggtcaggaggggagactttctgctctggtgcccatgcaaagtatgtactttaactattgtgataatgtggctgtggcacttcatggtggtcttttggcttgagttctaaggagtgctggacttgggttcagacgttctgaattgaatccttccatagctgtaactgtagtttcccttccttgcccgcttagggctttgttttgtagtcatagctatcctggaactcatagaaatctcgccctggcttcctgagtggttaggttacaggtgttagccatcatgcctggcctgtagctatttatttttaacttatttgaggcaatctctatgatatcagatttacctatctcatagaattattttcctttaaagatcaaattagtgtttgggtaagcattttgtagtgttctgcaaatgtttattgctactgatggtgaagatatgacttagtgatatctttagtgataaggatttctgttacatattgttaccagtttcctcagaagcacagcagcttcatacagcagtcatcaatttgtgtggtccaggacaccagtcagggcacagtgggattatggcttgctctgatccatgctatgtgggatctggctagaagacttgaacacagggtttggaatcatctgggagggagtggcttggtcatcaggcctagtagttcatatcccctgttgaatggaggtgcctctgaggatatatgcaggacagcaattcataatcctggtaaccagttctaaaatatgtgtcccaaaggaaaccaagccaggaggaagcatatctgtgtccattgtgtgggccatacaggttaattctatcacattttcctgttcaaggatagtgtaagactctagaacccatttaagtttttttgtatttatttatggtatgtgtaggtgtgcatgggtatgcatgcacatagaggtcagaagtcaaaaaccagctggagttggttctttccttcttccatgtggttcccaggaattgaacctaggtcaccaggtttggtggcaggtgctcttgcccagtagcatctctggtttagagaagcattcagctctgaagccttagtttgttatgggacaggtagatacagccactgtcttttggagcagtctgtcggattgtgggatgtagctgcctgagaaggtgactaaaaatagagggagcacacagaacttaaaacaccaggctggagttatggcccagtggttgagaacaccaactgctcttccagaggtcctgagttcaattcccagccaccacatggtggctcacaactatctatattgatatctgatgcccttttctggtgtgtctgaagacagctacagtgtgctcatatacgtaaaataaataaatcttaggaaaaaaacctcaccttcttaaaaacaaacaaacaaacaaacaaacaaacacccttgagggcttccagtgttgcaggtttgtaaaagaaggagcactttctgattatatagattattttggatgcttcttttctctcatatagtaagaatagaaattggatattactattgtaagaaggattaaatatgattatatgtaatggtttttagtcaagtaaagttaagaaacttgacttttgagacagtgcatccctacatcactatgtagcccaggctggccttgaagtaattactgatcttcctgcccctctttcagagtgctgagactgcaggcatatgccatcacacccagctttgaaacatagacttttcaataacaaattttcattgaagcatatacatgtacagaaaagtgtacaacttggtgagtttttatgacttggatatccttctacaattggcatcatgtaaaggaaaaaagccagtgtattactgcttacctaatgaaagtgcttgctaccaagcctgctgacctgaaaccatggtagaaggagagaactgactcctgaaagatgttccctgaccttcacctgtgaaagaacagcaaattaagtaaaaatgagaaaaagaaacagaatattgctagtgtgcaaaagactcactattccttgcctggaacttaatggctagaccaggctggtcttgaacttgtagtgaccctcctgcttctgccttctgcttgctgaatatattccacatagctaactgtttgtctgtcttctttctttttttctttctttctttctctctcttttgtaatacttagttgaaaagagaaaaaagaaatctcgaatgtagcagtcagttgtatatgctaactttataaatttgaaaaaaataggaaatcatacattaggagattaaaatttaattttgaataattttttttcttaaagatatatttttattttcctatgtgtgttggtgtctgctatatgtgtgcaagtgcctgttgtggccagaagagaatgtcatacctcttggaactggagttacaggtggctgtgaactaccctatgtaggtgctgggaactgaactctggttctctggaagagcagcaatgctgttcaccacgagccatctctctagccataccttaaacttctactaatgtgattaattatcttgcagagtgcagaataatgaatgacaactttataggatctgtacttataactagaaaactagggattttagttaacatggaagtgtttgcatcaaagttcctagcacttgggaggctgaggcaggcagaaggattgccagcctgggctacatagtaagttagagtctaacctgggtttcatagtatgttctaagtacacggtgaaccctctagaaatgtcagctgttactcttagtattgctattatttttatactctattcaagttgaagtccatgctgtattcagtgagctataatagagcttaataaaggtgataaatacttttttttaaatctttttttgtaaagatttatttatctaagtacactgtagctgtcttcagatgcaccagaagagggcgtcagatctcattacagatggttgtgagccaccatgtggttgctgggatttgaactcaggaccttcggaagagcagtcggtgctcttaaccactgagccatctctccagccccgataaatactttaaaaatcaaaatatgtttagtatttaagaatctctggctgtcaagaagttacctaggttctagaaaatttgtagccttttaggattagaaatttaggaataaccctcccagttctaacttagcaagtgcttttctttagaacccccttcttaatgagcaatatgtctgacctgtactataagatctttctgataatgcattcagagattttttttttttttggtcgatcagtagaagcgcgttcctgttttcaccttactttactcaaagctagttagtgctttccttagttttctagcaactaggtgtgcaaatcatgtgttgcagctttacagtttttaaactattttagatattcttaaactatgaaccttctaaacagtccaacactgtcatgtgactaatgctgcctctctagacctcactcacgaggacagacgcttcctgtcgtggctctgcctagagatgttccttggggtctgtgaggttctgtcaactgctagtgctaatgctgtcctgtacaacctaactcactggcaagaatacagtgttgggcctttcaaccactagaacaaacttttttcagttgacagttgcagaattgtggagtgtttttacattgatcttttgctaatgcagttaacagtatgttttgcatgtatgacttaataaatccttgaatcattaaaaaaaaaagaaatttaggaataaagattactagggctggagagaagtttcagtgggtcttcttgctcctgtagaggacccaggtttatttccagcactacatgatgaatcacagctgcacacagctcagttcagggttttgacatcttttgacagcacagactccttcatacacacagtggcacatgaacacacaaaggtataatcacgtataaaaaagaataataaaaaggtaggtgtgtgtgtgtgtgtgtgtgtgtgtgtgtgtgtgtatctgtgtgtggtctgaggataattttatggaattggtttggttctctccttccacctttattagggggtcagaggatcaaatccaggccatcaggctttccaacaagtgcttttacccactgaatcatttcactggcttaggatctgaaagctttattgagttttctcatgttgattgggcacttaatgacaaacttgccttcctttaacaagatagctgctctgggcaggagagtgagctgagtaaagtgcttgccatgcaggggtgaagacttgaattcagtcctaagaacccatataaaagagctggggctggtgtcacacattggcagtctcggcacttgggaggcagcgatgggtggctctctggggcttgtcaagctccaggtcaggtacaagataggcagcatctggaaaccggcacctgaggttgtccttggtcctctatgtgcatgctcgcacctgtatgtacctgtatacccgtgtgtacacatacacacatgacaggacctctgattgcatgtttgtagtgcgtgggtattggtccctgttagcatcaactgattttggaaagaaaggttaagtcattgctcatgaacaaaggaacattttatcacatagagaagtgatttccccttattaccaacattatagggaacattattttatctactgtattcccctttctaatgtcattacacagaatacccactggagacaacttatatatttattttcccatgtaggcgctctgtacttatattttagtttaaccaaatatctttttgagattatcttcttacctagaaccaattggactttctagacccatccttagggctttccaaatcttcaccagcagcataattaattacaagtcatttgaggactaatgaatgactaattccttaccttgtatagatttaaaacaaacaaacaaacaaaccaaaaagaaaaaaacaaacaaaccaaaaaacctagtaacatgggcagtggtggcacttgcccttaatcccagcacttgggaggcagaggcaggcagattttgagtttgaagacagcctggtctacaaagtgaattctaggacagtcagggctacacagagaaaccttgtctcggaaaaaaaaaaaaaaaaaaaaaccaaaacaaaaaaccaaccaaacaaaaaaaactagtaacattttcagtgtgtaaattttttaaaaaatattttattttatatatgtgagtacattggtcctgtcttcagacacaccagaagagggcatcaaatcccattacagatggttgtgatccaccatgtggttgctgggaattgaactcaggacctgtggaagagcagtcagtgctcttaaccactgagccatctctcctgctcctttagtgtgtaatttaacttagcattttagataccaggtgtgttggtgcatacctttaacatagaacatgggattgctgtgagtccagctaggactgcacaggaagatatcctgtcttaacagtccccctccatattttggagcactgcactgtaactacttttgataacgtgatgtagcatgctccattcttacacatctgaaataatctttcttcatagtgtctagtgcctgtgatcatgataggtgagcaggtttctagggcatcatttgctcgagggtggcttctctgttttatgtgtgatcacagctgatactcaacatcacacaggagctgttgcctgtctggtagcaactgcattctgagagagttcaactctcagttcccatagttggtttcctacttggttctgcaaacaagggtattgtcttttctgttccaccagcttaacacaaacaagaaatctgtgttcaggggtcgggacaaactctgtaaacactagcttaccgaggatgttcccacctgtaaaaggctccttttctttaccggctgtggttttatggtggtgaagaacatggtaactactagggtcattgttcgtaagatgccagcattaggctggtctagagctctcccagatcaggctcagactcctgatccttctgccttagttctgccacttctggcttttatatcaacacaattaaatggtcaatgtcttagcattatcatgaaaataattttgatcttcaggccctttggaatgttgggagctgcccaggaattcttaagccacaagagacaacagctttagggatttagcaaaaaaaattttcgtctgctttctgttactttgagatggggtttctctgtgtagtcctggctgacctcgaactcagagatctacttgcctctatctcctgagtgctgggactaaaggcgtgggctaccaaccacttggcctgggatttagcagttttacaaactcttaagaacctaggggttgcctttcatttgcttatttaatttctactctaatgtttagattttatttgaacagaggattgtgttgcacagattgatgtattatgaactagtctgcattagtcaggttctctgcatcagaactgatacaatttgaaaggggattgggaggaaaggaatcgaggtctgggcctgcgagtttggttagatatcaccgagctaggtgggacagtccggtaacaatttcaagatgccaggacggtccagtacaagttcaggttctactcattacatatctctcagctctctcctccttaaaaaacttccaatcctctatcagctctggaatggacacagtttctagtgttgccttggaccttgtggagactcaaactgaagtgagtagtgagtacagtatggacaaggccatggttgagtttgctaaaatggatcaagaactaagccattatgttaaggctgtccagtctacaatcaatcatgtaaaagaagaacgtccagaaaaagtactgggtttaaaattactggtggagaagaaatttttggcagtacagggataatgccgactttaaagagaatgaaaagttcgtgcagttcaagcaacagctgagggagctgaagaagcaattagtgaaacccaaagaagatggaagacacagtgaattcaaccccaataaggattccagtagagcaggcaatgaacgagttgcccaaacattggctgtagtcacacagacatgagaatgtcagatcttattccggatgaagccctgagaaggttaatcaagagccacaacaagaagaaaaaacaccactccgagtaggagcaagcctcctgcccacagggatgtcagcagcctacctccccgccagccatcagacagtgagggtagacagcaatgggcctggccgagcagtgctctgtttgctgtaacccctgaaggctaattgtaaatgaaagcattttttaagttacacagtaaaaacacaagtacattatattctttattttcaagtgctctgaatttttaaataaaactttgataatcctcaaaaaaaaaaaaaaaaaaaaaaagaaagaaagaaaaagaaaggggattggtcagttggctcacgtggcacactgtaggtggtccaacagtggctgtcttcacactgctgtggccaagaacttggaggctgctcagccttctcctcacactgactgctctttatttggccaccactgcaagggtgacacccacatttaggttggaacttcttacttcaagtaacctgctaagaaacccttcacaggactggtgagatgactcattgggtaaaatccttcatccaagcctgatggcttcagtcccaggacctaagcagcgaaagaactcaccccacaaggttgtcttcttacctctggacacactggacacacatctgagtcccgtttctccagtaaatgcactttaaaaaaaaaaagaaaatcctaatgccttatctcctagttcatttcagttctagtcaaattggcagtctggcttggtgcccccccttctctctctctctctctctctctctctctctctctctctctctctctctttctctctctctctctctctctcacacacacacacacacacacacacacacacacacacacacacacaggtttatacataatatgtactaatgtataatgcataaatttaatccatttctcagacatagctgtctaaaatgtaactttttagcctctctgttttccggtggtttacattcggaaacagtgagtctctgagttctgctgggccaacaatgccacttgacagcctttttctctgttttgctctttcttagactggcattctgaggtatccacagtgtgagaactgtcctgtgtggctgagaactataggcagtggttctgtcttgagcagtttagggatgcacatttctactgaatggacccattaggccctgcagtgaagagctctgccgcattgtttattattcatttcccagtttattggagcatgatgtgttttctcttcagacagaggtagtaacagctcatggcatagtgttcctttggacaagtttgaggacatctctacttgcccctttctcaattctccaaagtgacagacatctccactgtttcagcactagcccttaaccctgcgtatgtatctcggcttaatttgcagactcaatttatttcacacaccaaaaagatgctatctaatcctttctcagtatcctccagtctttttctcaaatagattttgtgctctgataaagaagacagcactgcctgtgttcacgggctttccttaggtgtccctcttattacgtatgactccttaagctcacctttccttctagggaccctcccccacagccacctccttgcttggcccacagctgagtgtaccgcactcagttcttacagtgatcacctagtcagcctggactacaggtgaaaggccgcagtccttcacaagattgggtaacacactggcctaactgggtccccggctgtatccactttccatgtggatgtacatctgtagcttcctcatccctttctggtttgatgattctgttcacagaacgcaggaaacaatccatttaacaccgctcttttgatgctgggggtgggggtagctcaaagggaaaacatgtgcaggagactctgggttccaatctttggagccagaacataaggacacagtgaaagcactgcgctttaaagtaaagggtacaaatcagaaggatcagccacctgaaaagactcaggacaaggtctgggtggaaatggggaacttatgatgtgcatgtcacttgcagtcagcgtatgctattatcccagcacacccacgtagtcactagccagggaaggaccagtgaacttctgtgtccagagtttgtaaacatttttaatttagtttattaccattttgtgtgtgtgtgtgtgtgtgtgtgtgtgtgtgtgtgtgtacctgagccacggtgtgtatggaggtcagagaacaacttttaggagttagttctcttcttccatctttatgtgggctcaggttgtcaggtttatgcaacaagtgcttttatctgttgagccatcttgctggctcaatacagatttttttttttaaatcagagttttcagaacaaaggcatagttactgtcacatggttgaactgtccctaatccttggcccttcaccaaaaagtggaaaggctggttaggtgactaaaattccaacctctagttagaggctaattctcaaggcatccatctgtaaatgaattgccccctgagtgatctgtgattggctggcttcttttccttaggtgtcatttatccctgctatagctttgacaagaacttctttttgaaaaatgacttccatcttgtatacctgttcagccgttgctgggccttgggttgttttcggctcttgtggctttgtgaataatgttgcctgttgtacatggtttatgtggacacgccttttcatttctcttgggtgggtatctaggcatggaattgctgggtaacttggaaactctgcttaacctctcaggaactgccaaagcctttcactgttgcacgttcttgacagttcaggaggggtggtttctttgggtcaccttgaggatattggtggtacttcggctaattggggggtgggggtgcgtgtcttgcccaaagccacaatgaaaaagcaaaataaaacattgtgctgtccaaacaaaacaagtctggtcagctttagcccttggctaccaatctggatcccatgttcttataaaatggaacccagttatgtttattaagtaggactttttggaaagggtttaaaaagtcaagtggaatttgaggattatagcatgagaaagggtctaaagaacaaaggatttagcctggcagcagtggtgcacgcctttaatcccagccactcgggaggcagaggcaggcagatttctgagttcaaggccagcctggtctacagagtgagttccaggatagccagggctacacagagaaaccctgtcttgaaaaaccaaaccaaaccaaccaaccaaacaagcccgaaggatttatgtcccgtccgcttggttgagcaaatcctcctccctgtgctttaaacttgcctgattggttcctcatccttctgcaccttggtgtcctgaggttgtgtgtttgtttgttttcatcttcactttttatgtctttactgtttcactctgtgtgtgtgtgtagctcatgcccaggatatgaatgtgcatgaatgccccttttccataagaaaccagaagcttgacttggaaaagatgagccaccttgtaaacgctaatgtctgacttttaaaggcaaaagggctaaaagaagataaacataatattaccgtcaactttggggaggaaagtgacacttggtattattttatcaaatcttgtttgtcttcttttttctcttaaaagattaaaagagtccagaagctttcccctcctgtgtcttgttggcagtggattgttttcttgtacctctgactctttgaagagattgcatctctaagagtggctactttaagcatcagccccaaaacttgaaaaggaaagagctccctcataccaactgcattcccagctgcttgtccagttaccctggtttcttgtttagccctctgctttctgctccagctgtgctgtgtgtggctctgtgtgagtctgtttgttaacaccatgcttggtatgttaaagtggaatttcttctatgattcttcctttgtgactctcccacaccaagggtcagatcttgaaagtagaacttctgaggttgaaagcatttggagatttagatgtcacgatcttgagccaggtgtggtggtgcacacctgcagtctgggaagaggcagcctcagttccatggtgactctgagataaacttgatgagtcatgagaccagcctcaaaaatattaacagatcaacagtacccctacccccaccttagcaatattttaagatcttgatttacccagatactgatttctttagtgtcctatgtgatgaactgttctaatacactggggcaggctccaacaaggatgtcatggggtgtctcagctcttatagtagacacaggatgctgtccctgtcctccttgcttgaacttaatagttagagagcagtgtggaggttaggactgctggtctattgagcgtgtctgagatgtggatttcagccccacttggtcaaggcaccggaagaagcctctttgtcccctctgaggtgctaagaggcatcagtttagtcaagcgagatagttagtgaatgtctagtacaagcaaagtaaacccaaccctctttcactctgatcctggtgggtgtgcagattggagcttgtaaaacacactgggaagtctggtgaccgtgttcgttttctcttgcacatcttggttagggcttatgctggtaatttctttgaaacatatgaagtaattttccaactaatatcttattagtggaaagcgtcattaggtcatattagataatgacttttaaaaatttctctgttgttagatggatgctcatttaaatgaagattttaattgaaggaagtcgtgcaaaatgtaattatggcatgcacaatggacatgcctgttctctgtgctgtgaaatgacccacatgaggccagcagttctgcctgcatagaaagcgcttctctggagactccatgcacgtctgatttaatttcataagagactttcccccaggagtctgtctaccctaattatgtgggcgggctggagagtgattttgtactcagaggttgtagatgtctctgtacagcctcccatttacagaagtactatgatggctgatcgtgtaaatcatgtatgtgtaaccatggttatgaaaccgagtcaggaaaaattgtaaagaaagtatttgtggttgagtgcagctcattgtgtagttaatagaaacagatgatcaaattgcagtaagtatagttttgaccaagtttactagcacagtctagcagactgctacgctgatctgtttgatagctcgttaataaggttgtctgaataaagattatgaaggatggctgccacagaatcagtatgtgatgtatgcatatacatttatgtttgtgacagcgtctcatgtagaattcagtatgtaacttaggatagccttgtacttctgatactcctgcatccatctcttaagtgctaggaacataggtgtgtaccacaggctggacttatattttatcattgtcattgacatatgagtactgcctgcttatgcttctatgaagttcattggtaataaaaaggaataaactttagaaaatgctgcatggatacttatatttgatgaaacaaggaatccacattatgtcagcagaaagtaagtctagaacaggttaagttacaactgatgtgactctccctgcattttgaattcaatataaaattgtcagtatatgatctattgagaaaatatcttattataaacaaatttggacagcttctaagccctggcattagagaccttcctaaagagatctgctttacttggttcttgtttggcatctatatcaatttcttttctagatgctctgacagaaacaacttaagggagaatgggctcactatttgtgggcacagtctattacgttagggaaggtgtgggcaatatggctgcactatgacaggcagctcttacactgtccctcatgaggcagagagaggaatgctggtgctcagctggcttcctctttttcctttttattcagtctcccacaaaattccaagtccagccactggaaattaaccatcacatcatagctcccttccaaggctctgtgtactgtctaagttcctgagtagctggactactggactaaccctgatgcagtacaagacaaggcaatggcacttgtgaagaagtgtgatgtagaaatgcagccgattcacagcacattggggaggtttctgatcagctcaacattttgtgcatctagtgtcacattcatcaagctaagaggacaatctgctaatctttagttgtatttatcctgctatcaatcattggacaacatgtctaagaagaacagaccccaagtaacaaagctggaaagtggagaggaattatacacttcttccatggatttttctgattcaagagttgaagtagtttggctttattctgagcattgtctggtttcctaggagaagtttcttttgcaaattagtacttggcttggaatccttaacttttatacataagagttcttttaaaaaacacagtatcttgtaaatttcacctttatcaagcctaatttacctaagcttatagtaaaatttgtttttttttttttttttttttgggttttttggtttttcgagacagggtttctctgtatagccctggctgtcctggagctcactttgtagaccaggctggcctcgaactcagaaatccgcctgcctctgcctccccagtgctgggattaaaggcgtgcgccaccacgcccggctgtaaaatttgttttgaggtgctaggaattgaactctgggccaagactgctgggtgaggcaaagtcatgaaacgtaaaaatgcatgtattttcatgttctgaccaatatataaagccagtaatgctttgtcctacctttaagaactgaaatggaatttaaataatgatcacaaagaatgtagaagttacatttgttgttacattttaagaattttgttatggggctggtgagatggctcagtggttaagagcactgactgttcttctgaaggtcctgtgttcaaatcccagcaaccacatagtggctcacaaccatctgtaatgagatctgatgccctcttcttgtgtgtctaaagacagctacagtgtacttacatataataataaataaatctttgggccggagtgagcagggctggagcaagcagaggtcctgagtttaattctcagcaacgacatgatggttcacaaccatctgtacagctacagtgtactcatttacataaaataaataaacaaattaaaaaaaagaattttgttatggaaaacttgaaagataatgtaaaaccattatccatggcttacaatgtcctaccatctcttcctctctttcttcattcatatattgttttgaggaaaattccatttactcagcaacatttggatgctgttaaacataatcataatactgtaaatttgccttaaagttagttagttaatgacggcgagttcactaacctgctagtctggaatcagaactgctccaacaatcccagcactttgtgagtatggacgtgatgccccagatagtgttcacctgactgcatatggcaggtggcagtcaggtcatacaatgcaggtacacttacagtcccatgtggtttgtggtttgtgagtaagttgggtatgagctgcagatgagctgcatgtttggacccgagtctgcccccacaatgcctgctagttaccgttgttctgcctggacttattctcaaggcccctgtttgatgttgcctttgaaacagtggtttgaaggtcggtctggagtcttgggagtttccttccaatccttgatgatgtgaagatccaatgcggcctcttacctacttagtataccagtggactttcccaggagtggacttccattgttcactaggcatgttcttggggggacagtgtcactgttgcaatcttttaggtgtccacagcacacagctttgttctgcagtccttttgaccatctctgagctgtgtgtgtgacactgatgatgttttactgcttcccaggtacctacagttaggattgtagtttctggatcccgtacccgatttcctgtatgcaaaacactgcttatgccatatagactagatggggcatgtggggtactatgtatggactggaccctcctggaagagtgcttggtttagcctacagcttgaatatttaaaaattaggacacttcatgtataaactcaaatttgttatatgtttaaacagcctttgaccaggccttcacctcctcaggcccaatttgttattctcaaagctcttatatgcctctccctttttggctagcagtgtagattcatttttaaaatatttatttttattttatgtgttttgtctgcattcatgtctatgaaccatgtgtgaatagtgtggccttagaagccagaagatgcatcagctcccttggaactgaagttacagacaatcatgagccaccatatgggttctggaaactgaaccctggtcctctctaggagcagcaaatgtttgtaactgctgaaccatctctccaatctcaattcaaatctattctattctactgtttccccctcccccactttttatttctccttatttttggtttggtttgtttgtttgaggcaggatctcactatgtagtccttgctggcttggaactcggtatatagatcaggctagtcttgaattcacaaaggtctgcctgcttctgactctgcctctacctcttaatatactggcattaaaggtgtgtatcactatgacaaacccagcagtacagattctttccggcttctgtgacaaagattattcttcctcacttttgccttgggctttgagattcattagccccaccctcattttttcttattttattttattttattttttttgtggtaaatacacagaattacagaatcttagcacttaagagctgaggctggaggaaactgaggatttcaaggtgaggatggtgatgcaaagagtttgaggcctgactgggatatattgtgagacccctcctcccaaaaaagtaccatacttttctttataactaatactttaaaaaatatatatatttattattatatctaagtacagtgtagctgtcttcagatgcaccaggagagggcatcagatctcattgtggatggttgggagccaccatgtggttgctggaatttgaacttcagaccttaggaagagcaatcagtgctcttaactgctaagccatctctccagcccccaactaatattatttaaaagggcatttctatgttgctggagaactaggttgctgcagaatcttattcaatctgtgatacttcatttatttattttactaattcagtgtgtgtttgctgaccaaaggctaatcctaagtatctatgatgctgttgactctgtgtgtgtttgtgtgtgtgtgtgtgtgtgtgagagagagagagagagagagagagaaagagagagagagagagagagagagagaacagggctcttatggcttgaactcactgagtaggctagactggctggccagtgagcagcacagatccacctgtctgcctccctagttccctagttccctagtgtgggattccaaatagatgccacctcctccaggtgttttatgtgggttctgggcatcaaactgaggttctcatgtttgcaaggcttgcatttacttaatgagccctatctccagcctcaaactatgatatttctgaaggtcctggcagtgttcaccaaagcgtgttgaatgagcagttctgggcatttactgcagtgtcttggggcagtgggcaaagattccctgctcttgagccttctgactcttgcttacagagaggtgtatggggtcagaaaaacttgaaaggggattttggtgtgattgtagatttttaaaaaggggagttagaatgagattcacatgctgcagagtaagggagtcatgtgggttatatgaagtccttctttctttcagttttataaagaagacagcaatgggagaaactgagcataccccagtcctggaaaaccaatattctgctgttgtcaagatggactgatgtgattatatatgtatcaaaaagagttatttaacaaaaacttaaaagcattcctaaattaaaagacagatcactgtaaaattttgaatgccatcagaatatgatcactgtgtacatgtttgatactatttatgatagccattatactttctttttaaaaacaattactttatgtgagtacactgtagctgtcttcagacacaccagaagagggcatcggatcccattacagatggttgtgaaccacactatgtgattgttgggatttgaactcaggacctctggaagagcagtcagtgcttttaaccactgagccacctctccagccctaagtctaatttctttaatttcaactttttatttcatgtgtatgaatgttttgcctgcatatgcgttactgtaccatgtgtatacctggtgcccctggagggcagtgagggcatttggagcctctggaactggcgttacagatagttgtgagagagccaccatgtggtgctgctggcagctaaacccagggcctctgccggagtgggagcgggagcaaacagccagtgttcttaactgctcaaccaattttacagttccatccttttgtttgttttgatttttttttttttttcctaagacagggtttctctgtgtagccctggctgtcctggaatttgctctgtagaccaggctggcctccagctctgctgttcatatgcctctgttcccaagtgctggggttaaagaatgtgtcaccactgactggttctaattttatgttttttaagagcagattttattttacttttgtggtgctgggtctatcactaagctattctcagccttcagtgtcgtctaggaaaacccttctggctgaaaatccccactctgagtacaagatgtatagtggctgagcctgtgtgcattcttcatccatttttgtctagtagggtactgggccagatatacttcagtgctgaataggactttgggccttgccatttccagaagcctcacatgcatcttcagactcacttgtatcagacaccttgctgctgcttcagatcctcggtcttactctcctcggagcctttgatcacctttcagccctggctgctgccaactcagcctgaactctatccagactcactgagaaacagtcacacactttcttgtgcccccttccccctcctcctgctatgctcagcttgcagaagattcagtttgaggtagcctgtctgtgtgccaggtcttctgctcatgcctcacgggccgttggtttagcttcctgtttacccttggcctcctaggacttggtactgatcattacagagaacaaactttataggaagaggttgggcctattcttcctagagtggcttaacccccaaagcactggaaagacaaggattgaggcagtgctgctagagtttagtagcttttagctactcttagctcttagctgtgggatgggaagagacagtgttgattgataaagagtagagcttagactctggggcttgctaccatctgagtaaatctggaagctcatattacctcctggagcagcttcagctgctttctctgtgaggtggaggtggtggctctatgcaacacacggacactgcagtgggcatggccagctcttcatgtaagcacctggctcatgataatacttagtaaatgataattggtattgtatcctggtagacttattttaataatttgttagactgtgttgtattttaagagacatgcttttttgaacatggtgtgtgctaggcagtgaataagaatttgttgattgggttgaacatatagtagctacatcaggtttctttttactgacagtatcacaaatgagttatatgtgtgtattaatctccagatggcaggattgtgggatttctctgaagagcatcaactggcataatgttgctcagaattggttacagttgcacaaagaactgtcattctcaaactagaaggactctagtcctgattagagggcttaggagctgtcaggagtctaatagataggcagttcacagtccttggaaatgtaagtgatgaataaagaatgtaagtgttggatcttccattgatgacaagcagcatttattttatagctattattactagttttgtttttttgagacagggaattccttaagactcctgctgccttagcaccctgagtgctaggacaataggtacgtgtctccactcatgtcctgggctattgattggcacctaacttttttgatcttggcaaggtgcctggtaagggaaaggtgaatatgcatcaatagctaagagtattgttttcactaatgtactcagtgacccgtttattgtgttttaggagcattgacctgaagaagacagtggttttaggcttcatggagcttgctattgctagcacagtaggatgttttagactcatctaagccatgtgaacatttatagtgaaatatagtagctttctatgactagacttaggcataagggcatgtctccctcccaaccactccaccaggagctaaggtacaatataaccttgctgagtcctgcaccatgcttagtagcagaccgccacagcattagtcattcagtgctgttgctaggggccagtgaggtcacatctctcagacaagtacctggctggaaagtttctctggagacacatgtagcaggtattctgaccagatcagagttcaggtagggccctactcaagagcactcccaagggagcaggataggaggctggtttctccttgtgagttgctctcccaggaaagatgtatctccatccggttttggttgatctatgtttaatgctgtacattttttcagtgaaaaattatttttagtatttgctataacccttttaatgttgatcagaaaaataaataactgggggtatgcaaaaactgcttccagagcagaaatcaactctggtttttttttttttttttttttttggcaggaacccttttggctgataaagcctgtaaacccctcctcgagatgcataggattataaaggaggccagatttgtgctggggtataattatcagaaatggctttagaaatgtgcaatagtagtaatttgcacttactaacttactactgtgctaaccagccagatcaagtgttgggaataatcacttagactttgaaattgtgttgggtgtatatgatatttaaagatatttgcaacagggctgagagatgtttcagttgttgaaagcacagggcctgagttcagttcctattacctattcatgtcaggcagattcacaacccttgtaactccagctcttgggcatcggatgaccttttctgcttctccaggcactgtatataaaagtgcattttcatatgtgcacccccctcaaacaaacaaacatttgcaacaattagaatgtgataggaaagcaggtgggtttgttggtggtaagagtcacaggctgtgcttaaactacatcagtaattgagggctgcatccgtttctatgagaaggtcttgagaagtggcagtgtaactctgctcatctgggttcacagagcatctccttcagtttctgtgctaaagaatccctgctctagagtgggcctccttggtggtattttagatcacaagtcagccattatctctgggttgttcaaatggctgactgtgttcctattactttatatgcgatgagggtgctgtgcttagggttcagaggccaaggcctttaggatatagaggacagcatgaccttggggtagaaggagagaagctcgagaatgaaccccatgtgagtaatacaaagtcagaagcctggttggctatgagcatttcccatgtattgacctttctaatctccattattatttatcttttgtagatgagaaacaggcacggaaagattaagtaacttgcccaaagtaaaaactagatctgtcctgctctgtgattccagactactcactcagcacaagagcaccctaatgacaccgtgaggacagttagtgtgtaactgtagatgggacagtgggtcagaggctgctaacacgatactggccaaagatggaaaggctctctgaatgccaagctttaagaataggtgaaggattttccagcccagaaatctatacatctcagttttcaacttagacaaaattcatgtaataaataaagtctgatgtttctgagtagatttttttttttctagcagtttctgttctctttgtgcctgttatcatctgtttctgttatgacttcctccctggccaaagaatgctttttgggggtaggattttattattctttccaactagtgtttgtgcttacaccaccattgtcacctgattggatagggactggtgcatttcctaaatgtgcagtctggtgactctgtcacggccatctgatgcttgtacaacatgaagcaaaggagccttttgagatctggtttattttctggccttgtgtatgagaatgcatgccagtgtaagatgggagaggctgtgtgaggtcaggggtgcactaatatgcagacagcatcccagctacattgcattgactccactcctcactcctcactcccatgtaaatgcagcatgccctgacttccctgtctaggaaaagaggctcctggccacacagtgaactgatagtgaatgacagatcagattactgtggccaattctagctagacattttggggagtgtttcccaacctcctgccacagttgtggaatgtgacagatgagagtctaagccgagtggatgggtataagagtaacctgaactttgggcacttctgtaggtacatgatcgagtctgaagattttcacaccatatgcttacaggaatcttagtgcttacagccagtctttgtaacacatacttaccacacctttcatgatgggcttggttaactagttcctggtcccaagtgctggttggctgagatcagattcagcaccagctcatgtgatattatgggcattcatgaatttcacagaatgtcttagaagcccatgctaacctcattccatactctaacccatagcctgtgtgaaatgcccttatctcagactatgatttatgatcagaatgtttggttggctttttttcccatctgctgtaaggcagtgatgattttcaggttggtaaagagcaaatattgttcactgtcatggtctctcaaagattttatattgtgccaggaagcattcgtaaacggaaaatccacaaagcagccgtttctgatgtaattgcattaaggtctctttattataagttcaggcttgggctttcctctaattctaccttgagacagcaggacaggaagatggcaaagcctcgaaccttcagtaggacaaggttttataggaaatgggagcaagtgaggggctgtctagccttgcaggtatctaatagaatgactgttgtaagtcaacaggtgggtgctctgaaggaaaaccatgaacaatcataaacagtctgaaagtacatctgaaacaatcagactaatctttgactgactgttgttaggaagtagctagagagtaattttggcgtaagggccaaggacaagtcatggggtcctttctggtacttgggtgtagcttgggtttatgtgtaggtcaattttttttttttttattaaaacatggaggctggtcccaagatggagtaggtttgacctcttggttcctttctgcagtcttatgttttacttccctctttgaaaatttactttcatcttacagaccaatagtgggactcaacagttgcttaaaaaaagatttatttattttatatatgtgagtacattatcactatcttcagacacaccagaagagaacatcagattccattatagatggttgtgaaccaccatgtggttgctgggaattgaactcaggacttctggaagagcagtcagtgctcttaaccactgagccatctctccagccctagtagtttcctaataagtagcttctgcttaactttatttattttgatatagtctcgtgcagaccaggataccttgacctcgtagctttaagactagctttaaggtcctcctgccttcatctcccaaatgctgagattataggtcaatatcaccatgcttagctcatagtctctgatttcaataaacattcatcaaatacctcagacttggcaggctttgggctcgtggttgccaaggatatcagatgaaggaactgatgtggcagtggctggaagcagcatcacctgtagttagttaggattagggagctctgcgaaatgtgtattttcttttctctttaaagatttattatgtgtttgtgtgcatatgcacacatgtgtgaaggtacttgtagaggccagaagaaggcactggatccccttggaactagagttacatgattaagggtgaacaaccgtgtaggtgctgggaaccaaactggagccctgtatataagcagcaaagacttttaaccaccgagctatcactccagcccctaattacataattttaaaagatttatttgtgtgtgtacctgcatatgtgcacatgcaggtgactattgaggtcagaagggtggaattggatcccttgcagctggagttttaagtgtttgtgagaggccagagattgggactgggatccatatttttttatagatcagttagcattcttcactgctgagccatctctctagtctccttgttactggaacctggaaaggttaaggttgctgccctacgtgacataaaagaagtagacaggattcagacccaggcttctaagttctgaagcccagtcttggcctctgtgactaccctgtgtcacattacatactgatgacgttatgggagaagtggcgttggttgtgctttccaaatgggtttattcttcagtaccttgcccctgctgaatgagtggaagataggaagtattgggcttgaaactactgtactgctcttgttgtagggagcagaatcccgggtggactgctgtgagtgcttacacgggctatctaggcagcagttctccttggagagttacttatcagtgttgtgtttgtcagggtcatttcattgcacttggttctttaaggccattgtggaagagtgaatgtaggttggtaaccaggacaacagaaggagtaaggactgggatctctcaataagattgaaccaagagctgtggaaacatcagctctgtgcctcatgcacacacgtctccacagctttccattgagcctgttttcttttgctgcacactctatttaaagatgagaaaagacagtaaggggggaaaatacaaaatctaaaccaggtcatttaaaatgagcactttcttctccactttcctaaactacattgtcttaatttgtcttcccacatcttgtggcatggctaggggactggacggtaagaggaagtggggtgttaggaagggactaacttcaaatgttaaagtggaaagaacatagtttccagtggtactcctgggtctgaatcccaacattgttgataaatgagttattgactcttcgatctttctgccttagtacagtgagacagctcaagacctactttgtaggttatgagaagtaaaaattggcaggcatttgacatgtagtgacaaaaagagctcttatgtatatatatacatgtatgtatgtatatgctgggaatcaaacccagaccctctgcatgctaggcagatattataccactgacctatatcaccaccctgggttctattattcctctttttcctccttcttttttctttttttccaagacagggtttctctgtgtatccctggctgtcttggaactcactctgtagaccagggtggccttgaacttagagatctgcctgcctttgcttcctgggtcctgggattgaagacttgtgttaccactacctggcagtttctgttgttcttattaagttaaaaaaacatagagacctaaactaagttaaacagtgcctcagatatatcttcctttatcactgctgtgaaaggagaatggtagcaggccatccagatataaccctagctgttctggttgtgaccaccatcatgccaactaggtgaccctggcacttgatgcaaatcttgcttgataaacaacgattaagacaatcaattgagcattcatggccagctgtcgatccctagtacatttcttgattgatatttgatatattaatagcttttctttttctttttggaaattcaggtatgttgtgtgcctgcagccatctaaatgtagcttagcatagaagtccctgcttctgccatgacatgaagagacacttctgtcttgatactgcaagagatgtgctctgtgataaagtgtgctgcccaagcttggtttgtctgcctctttccttggtctcttggcattgtctgcctttggcaacaagttcttacacaccggcctattctgaaataggagtactgattagggagttttttgtttgtatgtaatgccaacatatgaagatgaatacttataagcaattttcaagctcctgtattcagtggtgtatatgctgggtacaatttagtttatattttttaaaaattatctttttaaaaaaatttgttagatattttcatcatttacatttcaaatgctataccctttcctagtttcctctctgaaaatcccctctcccctccccctgctccccaacctacccactccgacttcctgtccctggcattcccctatactggggcatagaattttcgaaagaccaagggcctctcctcccactgatggccaactaggccatcctctattatatatgcagctagagacacgagtcctaccatgtgttttctttgattggtggtttagtcccagggagctctgagggtactggttagttcatattgttgctccttctatagggctgcagaccccttcagctccttgggtaaaacattttctttttatttaatgtatatgggtgttttatctgcatgtttgtgtatcaagtatatgcagtgctcactgaggccagaagagggagttgaagcctctgaaattggactttagacggttatgagtgatcatatagatgctaggaatcaaacccagctcctggaagagcagccagtgctcttaaccattgaaccatctctctagatccacaatgtagttttaaaataagaattcacagggttagagagatggctgagccgctaagaatgcatactgctttttcagaggacccaagtttggctcctaacatccacattggacaactcacaaacacatgcaccttcatttctaagggggaatctaatgaggcctcttcaagtgtccacattcttgtgatgtgtgtgtgtgctcaattaaaaaaaaaaaatcaggccgggtgtggtggcacacgcctttaatcctagcactcgggaggcagaggcaggcggatttctgagtttgaggccagcctggtctacagagtgagttccaggacagccagggctatacagaaaaaccctgtctcataaccccccccccaaaaaaaaaatcagaattcaatagctgatcatggcagcgagtgtagtcccagcaatctagaggcagtgccaggagaattggattacacagccagactccttctcagaagaaacaaaagctgcagtgagatgctctggtgttccaacttgaatgttaccagaaagacagtgccaactcttatgtgttgctggaacacgtcagtcagtaacatatgcttggtatggagtttgacttttccaaaatgtaagtatagttctgcataagcagccacactgtgtgacctaacatttatattcttagctatctcttcaagaagaataaaaagaaatgtatgtacaaaggcttattgttaaatgtttctaccagtgtgctttctagtgaccctaaactggaagcagttcaaaggcatggccgataatgaataaacaaaatacaatatggcaataaaaagaaacccagtgctgataacaccctcctcaggaatgaccctcacaaaagcgctacttcagacacctgatgcaagagacagtatcgtgtgtactccttttcataataaatgtcctgaaaagacaaggagaaaaagcaaatctacagtagcatatggtagactgagtctagtgtagagcctgacgtatcgtaggcctgactattgggacatcttcctttgggaagatggaggtgttctgagcatccattgtggaggtggcagttagccatttgctaactatcattgaattatatacacttaggatgggtgaaatttgtgatataataagtttataaattaccatgcctgtcccattttactgatactcggttgatgctcttctgggatgcactacaaggtgggggctcaatccttgaagttttgaggttgggcatgcagaggctttgtgagtgctagagagtctaggagatagggctgattccacacagaataggaagcagcatattccagaggctcaaacccattgtcctggctctccaggaggtggaaacaggaagatggattgaggccagtgtgtaacacagacttcatttcaaaacacagaaaatggagttatagacaaaggtactttctaacgctttggctccaggcaggtcacacacatgcacctgcccaggagctatctggacttgtatatggaaaacacacacactcactcacacacacacacacacacacacacacagagttaatcacacagagttaattttaaaatgccttggctacctcaaaggctgggcattcctgaacctttccctgctaccccaggtccagtcagggaagtgactggtggccactctcctgaattctcacatggctggtcggctttctttcctgctgctcctgcctcccatcattcttccccaagtcattgctattctcctctgttcctctctgcatccttgcccacgtaactctaagggtcctgccctgtgccagccattgatattaagtagtaagtggagcaaaattaagggaagctaggtgtcctttatcaaggcctgactgttctgggcagagtggtacagaggttcagggttagagtttgtcatctagccagacacaggccgagacataactcttagaattcctggtagagcactgtatcctaatctgctttaggttgcagatgctagtctgagagtttagaatgtaaaactctgttacttccttcctccaacaaaatgaaacaaaagccatgatccatgtgaccgaggcgagtatttactgaatgaatgacagtgaggaggaagaagagccagcaggcttgagagaggtgggaaccgtcctcacagcctccactgagctgcgcagtgggttttcccgggagtcgtgaagctggccgcacttggaggttgaatcttcagttgaacccaaggaagctaaggggactcctgtttaatagtagatttgggggagtgattatagaaatgaattagaaatttcaattttctcttcactagtcaattataactgcagacaacattgcatcatgaaatgagccctctcccatgtatcagtatgtatgaatacgtgtggcacacaccccacacatactgttgttttttcctttgaggttcccacgtttcctgacttcattctgagttctagatttgctcattacttcaattagagttgatagcagatgacattctctctgtgaatgtgacgtttgtgttggaggtcccttgtttagtgtggatgtgttttattttttattttatttacttactttttttttttttttttaaagaaaattttttatgtagcccagtttggcctcaaacttgttatgcagctgagggtaatgacgtcaactactgatctcttggccttcctctctcaaatgctggatttatgtgatgttcagaattgaacacagagcttggtgcataccaggctgaccctctaccagctgagctacattcctagccaagttttaaaaagcatcagagaactcagagaagtaaaagttacaagtttcctgtactagtccaaaaaagttgcagcaatctctatagacaaacctttgtcatttgagtctgtagttactcaggtgagtgtgcatcattcagtatatgctttccaagaaggcactgagggggcaggtgagggggctcagcaggtaacagcgttgactgctcttctaaaggtcctgagttcagattccagcaaccacatcacatggtggctcacacacacaccgtaatgagatctgatgccctcttctggtgtgtttgaagtcagctacagtgtacttatgtataattataaataaatctttgggcaggagcagtcagggactgagcgagcggggttgaccagagtgagcagaggtcctaaaaaaattcaattcccgacaaccacatgaaggctcacagccatctgtatagctacagtgtactcacatacataaaataaataaatcttaaaaaaaaagaagaagaagaagaaggcacggaaagtagattagtattccctggccaaatttaaaccttcttataatgaaggcagactggctatttaaaatagtattttattttatgtatgtgtttgtaaatatatatgcatgtatatgtctgtgaaggccagaggaggccattcacattccttggagctggagttagagctttttgtgatccgtctgatctgggtacttggttctgaattcctgtctttatggttgagcagtaagtgctcttgagtcggatcgatcgtttacttgcttgttgtaggattcttctcctttgtttcctgggatacccagtacactcaccccgacccttttaactcttattttaaaagtctatggatatatttttttttcctgtcttcatattgtgtccttctgtttaaaagctttcctagttgtttttttttttttttctttttttgaagatttatttattatatgtaagtacactgtagctgtcttcagacacaccagaagagggcatcttatcccattatagatggttgtgagccaccatgtggttgctggtatctaaactggggacctccagaagagcagtcagtgctcttaactgctgagccatctctccagcccggtttcctagtttttggctatggaatttgcatttttatttttcacttgccttactgtttctggatgacttggggaaggaaggatggtaataaaagttcttttctgcagagactctgtcatatgtaagagagtggtatcaggaatgtttaaggaaatcattactactagagaaaatttaatcaagctgagaagtaacaaatgcataagagcctctcaagtcaaggctgacaaagtcgtgccgacttccccagagcaagcagtgggtgctctgtgttggggaaggaaagctgggggaacggtgtagtttgggtgttgggcaagggtgggggaactgtgtagtttgggtgttgggcaagggtgggggaatgnnnnnnnnnnnnnnnnnnnnnnnnnnnnnnnnnnnnnnnnnnnnnnnnnnnnnnnnnnnnnnnnnnnnnnnnnnnnnnnnnnnnnnnnnnnnnnnnnnnnnnnnnnnnnnnnnnnnnnnnnnnnnnnnnnnnnnnnnnnnnnnnnnnnnnnnnnnnnnnnnnnnnnnnnnnnnnnnnnnnnnnnnnnnnnnnnnnnnnnnnnnnnnnnnnnnnnnnnnnnnnnnnnnnnnnnnnnnnnnnncttgtattgatccctgataaaaaaaaaaaaaaaaaaaagaacctcactccctagaggtcacaggttgcctgaaatgacacagctaaaactgctgtcaagaggatggatagagccaggcagtggtggtgcacgcctttaatcccagcacttgggaggcagaggcaggtggatttctgagttcaaggccagcctggtctacaaagtgagtcccagaacagccagggctacacagagaaaccctgtctaggggaaaaaaaaaaaaagaatggatggccagggtacagtggagagtgggggttctcatggatggatcccttgagggagatggtttggtttctggttttctgctctgcaggagggcttaaagaagcagaggtgtcagagggcggcagcagtgaaagtgtggccttgtatgggtgtgggaatgaggaatatggaagtgctgaggtggcctgtgctgttcaggctctgcttctccacctgccctggcagcatgataggcccagggaagagaaagctgctgtgaacacaaccagaacagggggaagcttcagtgaggcagagcctttaatggggaaaaaaggctactttactgaaacctttggggggtgggtaaggactttgtgggtgagtgtacatcattggccaggcagggccagggcattggggatgcctggtttgcagaaggaggaattccaggtgctaatggacatgattttataagggagaggaagtttaacctggctactgagctgtgtgaccttctgcggtggtggtggtggggctcagggctacttacactgggacatgcaggcccctaacagggaattagcagtgccactcctgctgctctcagaatgagatttttcagagattgtgagcctctggtgctcttgcaggctatcactgatagggagttgtaatgggtcttaggatgttttcttttcatcttgtaaataagaagtattgcacaggactggagctgtaactcagtggtagaagagtacttgcttaagagtcatgtataaggccttgagttcacttcccagcatctctctctctctctctctctctcacacacacacacacacacacacacacacacacacacacacacacacacacacacaagagttgtacagaactgaacaagtaacccagtgagcatctcattcctatgggttatcctagccagcttttctcctccttagatgatctattgctgcgaccgggctgattggcacagccttggttgcttgtatagtaaagagaagtcccacttcttacagtgttccccagtaggttctgtggagttctagttgttcggttgatttgctggtggtgtttttgaatactgaggcctcttttgtctcattctccaagcatactttctcaatgatgctcaatggaatattccagatgttgaggaaaaaaatggactgggcttttaatgacacctgcctgtgaaggttgagaaacatctgcaagttcattcagtacagggatttaatcctgtcagtttattctgtgtgtagaagggaggttgggggaggagtgagtgacaagagaaaactcagtcatcacagcttgtagtttggttgctggtactgccagttgagtcccaaagaggaaacagcatcattgctgtttaaacaagccctttgtttttgttttctttctttgtttcttcagacaggctttcctatagggcactggcctctaattggctgtgtagccaaggatgaccttggttcacctcctgagtcctggattttaggcatgtgctatcatggcaggtttatgcagggttatgttaggatggaacccagggtgtcaggtatgctagacaagcattctatgggctgagttatattccagtctcaagctctttgtgatgtttatacgttttagagtgttttagggtgggatcttgctaagttagattttgcatatttttaacagtgattatttcagtaccttaaagctttagaattgaaagagatgattgttgacaggatggtggtgcagtctttaacctcagccatcaggaggcagatgcagatgcaagaggatttctctgagttcctggccagcctgctttatataataagtccaggtcaatcaggaatacagagtaagaccccccctcccgccttctccctccctccctcccttctcttcttcctcctctttctcctactcccccttccttccccgttcctcctcttcttcctcctcccccctccaccagtgaaggacagaagagatgatggtgcttgggtattatcagttggcagtggtaattggttggtttataactcattttgacatgtttgtgtcttaagtatatgtaatattgcatgaattatttttagatcctatatcaatcttatttttgtcattgtcagaggaattaatgaaacattctcagagattatcaacttatataaaatcatccatggaatgtctttataactagtctagcaattaggaatataatttgatttattttcatggtatgatttatgtttcgagtgagaagtgaatacaggtccttaaacaagatcaataaaaacaagtaagataatagtttatcataggtatcagtttttttctgaaatactgtaccattgcatgtcagtggttagggaatgctctctgtggaacccagggccttgcacatcatgtcttgtttcaaaactgaccatttccaaagcagcagcaccttccatgttgatccacctggatcattagtattttcatttcccatgctgtggctgtctccttactacttgggggacagtagtcactgcaggcaagagttgcatttggatgctaaagttcctggttgggagtgtgatgagatagagggcttgcatggtctcagagccacctgttagacaatatcaaggacactgggaggagtggtaacgttgagtgtggagagtgctatactctagccagtcaggcatgatacagtgagccctggacatctcccatctcctggtaggatacacgcactggcgcatctgttatttgtgttgatacttgccaagcactcaggctgactttgagtcatgaggaagcattagatatctagtccgagggatgatctgcagacaaaagtggccagtgttctaggtgtccatgatagccaaattggcctgggttggagaagacatgatgacttcagacagtccaggactctggaccaggaaaagtacaccagtgacggtagttggcaaaatctggatatgactgggcgttatttaataggttgtatgttgataggtctgtcctgactttggtcactgttaagtggggttctgtaagtcattagcatgtagcagagcttgagcaagcctgtgcttctttgcactatttttgtaagtttgaaaatacttaaaaatgaagttaagcaatgagaaaattagtacagcagaactgggaaataaaggctgtggtagacatgctttgtgctagcactttggatgggtcaggaacttttctttgcttcaggagtgtctgtagtggggctcactgaggattctgggtaagggatcctgaaaccagggagtggtgggtacatggaatttcagctctctgttgacaaggtcttgttaaactaattaactaattaattaatctgcttatttttgtatgggtctataattatgtattggagtgtcctgtgaccgtaggttacctgagcttgctgtggttcccagactccctagttggaaacgtagccttgtaattaacttaatggtttctgtttttattgggttgctttgaattcaggtgagtccatggattcttctgcagtgagtcatatattcagtttgatatttattggttgtggtttaggaagaactgattttaaaagctgatttattttacttaaacttgaagtattatactagatgtatgtcttattctcagaaaagacaagatttttcatgtacatattaaataccaaaatattggcttaggttctacctgggaaccctatggtaggttgtcatagatagttttcttttgctgtgataaagaccatggtgaaaagcaacttgtagaggaaagggtttattttatctgacagcttacagtttttgtccatctctgagggaggccagggcaggaactcaaggtaggaacctggaggcagggacttaagcagaggccacagaggtgtgctgcttacattactggcttgcttctcatgtcatgctcgacttgctttcttatacaactcagaaccacctgccctggtgcactgtacaccatgggcttgacccactcacacatcattgttagtcaagaaaattcccccacagttttgtctataggccatctggtagaggcatttttcaattgagggttctcttcccagataactgtagtttgtgttgattgtcaaggacctaaccaggtcataggtaataattagaatggagggattggactgttttgaccagcatggaaagaagactgtgggtttgggaatcataagacccactgcgttagataatccttcaacttttctgatttttcaacttcacatctgtaagtctggactaagtagtacatcatgtgaagttgccatgagcattgtagaagcaatgtgcagacacctcagatgcatggctgcagtttttacacggtatacagttgaaaatctgctttgtttataaatgcctgtaacaatagtagcatttgtcagtgacaaatctataaagattcagtggctttaaagtggtcatttacttattgtgagggtgcatatgtgtcatggcatatatgtaggaatcagagaacactttgtgacagttgctcttctttcactatgtaggttctagggatcaaactcagggtatcaaccaagtgcctttgccctctgagccatctccctggtttaggtcttttgtcaggaggtttgcccctatcttgttagctcagaaaaacaggttttctttcatatcttagccatgttggatatgttgcccccaatttaccagtttcttgtcaccacctgcaagacatttattgtcttcatctcaattcatttggtacaaataaacatcagatttcttacagaagaaaaatgttatgagacaaagggacgagaatgcacgtggacaccactggagatatgtgtatgcagtatccacttgagcttaggttggagtcttggcttctctgaggaggaccagatcactattctcagtatctggaagactccaagccaggagagacccctgcttttaatggcagcactttggctctaagtcatgagtgctcatattggaggtctgctgggtctaaacagtaaattctagactggcatggaatagatagtgagaactcatcttaaagcaacaaaaaataggagagcatactttctttagtctaagttggttatgagtttgctgtgtgggtccaggttaaaaaacaggtacgtgtatatattaatgtctgtggagagggaggacatgaaagcagcctcgttcaaggatagcagttggtaatttggggtgaagggtctctgggaggttgttggatctcaggccctagttatttttctggcagttttagacagagggaccgagggaaggttgaagtgggtgggcaagtgaagagggtatgtaccaagtgacccagagagtaggagctcactgtcaataacaactgttagttcttcctttaatgtaaccttttttccctgagccaggacagaagtcccactggatacaaagatctggataggtaaagagtctaattggctgctgtgaaaacctcaggaaagttctaaatgtgaaattagacaacaggtagtttatcatggaggggatggtggttgagacaggattttttaaaattataattattttttatttgtatggttattttgcttgcatgtatatctgtgtatcacgtgtcatactagggcctgaggaggccaaaagagggtgtcagactgtctggagccagagttacagacagttgtgagttgtcatgtgagtactaaaaactgaatcccagccctctggaagagcagctagagcggttgaccactgaaccatctctctacacacagacaggatttaattatatagcccaggtggcttggcttcagacctacagtcctcccggcttaccctcctttcccctaggagctgggattacagagcgatgcacttgcacctggctcagaggtcaaccttttgaagatgatgatttatgagacgtttgttacagtcagagttttattgatgtgaagagacaccatgaccaaggcaactcttataaaggcaaacaaacatttaactggggctggcttacagtatcagaggttcagtccattatcatcatggtaggaagctcggcagcatccaggcaggcatggtgctggagaaggagctgacagttcacatcttgatctggatctgaaggcaggcagaaggaggctttcatccacatggtggggtttgagcatttggagaccataaagtgcacctactacacaatgacacacttctttcaacaaagccacacctcctaatagtgccatttcccatgggccaagcatattcagaccaccgcaggtgtatacaaggatgagcaaaaaagcagaggcagagccattaggggtcctaagttctcagaactcaagtccttcctttttcctgttggggagagtcacaggttagtcaggttaacctgttccctcccttccttcgtattaatttacctttcatttactatttgatttcaaaagtagtattttctctttttcttttttatcccctttttcttttaccttcccttcctacctcttctcgctccccttcctctttgagacagaatcttatgtagccaagactgatactgaacatgctatgaggctcagactgaccttaaactcctaatcctccgtcctccactgctgagtatgggttataggtgtgctggcctgctggtatttgttttcttattgcaaagtttacattcattatcttttgctgttcaaaaagaattttctaaactacacttttttttgctaactctcattcctttttttttttcatgtgcatggcaacattgctgtctggaactcaggggccagccaaaggtaagagttctacacatgatgcttgtagaaagagattcctgtgcttattcctgaagtactggacattttcttatcaaaactgaaaattccttcttcctgccggtttataaaagcaataagctgtcatctgtctcacaactccagagctgcttattggcacagtgtgttctggccagctctgcccagtctcctagcagcctaacatgggttccttgtgtgctgtggattagcatgaaactgattgttccagactggtcactctgtgccagtccagctcatcttactcctaggcagttggggtactttgccagacccatgggctcccgatggagccctgatgacctgatgatgggctcctgctgcttctagagactgtgcttgcaacttacattggagccaaaatctgagactttaaaaaaatttttaattacatttttttttttttttaaaaagagtcaagtccttatttttctgttactatagtgaaatacctagagctgggttctgacttccttcttttctttaatttatatgagtactctgcagctgtcttcagccacaccagaagagggcatcagatcccattacagatggttgtgagccaccatgtggttgctgggaattgaactcaggatctctggaagagcaatcagtgctcttaactgctgagccatctctccatcacttaattacatttttcagttaatttttttggcgtgtgttgcatatgtgcatggtcagtagaaaactttcaggcattggttcttttcttacactacttggacaccaggtatcaaactcagacttgatggcagacccctttactcactgaactaacttgtgtggcagagttggcttctttgttttctgaggatcttaaatcttttttttttgtttgttttgtttttaagatttatttgttttatttcatatatctgagtgttttgccttcctgcatgtatgtgcaccatgggctcatggagctgagaagatgtagaatcccctggggctggagttacatatagatggttgtaagcaccatgtgggtgctgggaaccctgtcctctgaaagagcaaatgctcttaactgctgagcccccatgggtcctattcttgcaggtcttctgtcagcaggaatcctgctttaactggacagttctctggagttacttaaaccttccaggaagttcagcttgtctagattcttgagcttgttgttttacagcctgtggttgagctgtatgtaactctgtgctgttactgttctgaaatatgtgtacatatgccttttgggatccccagtgacctttgaaatggtgcttgaatgtgacactggtcttcttatgtttgtggactttttgctatggaagggtactgggttaattttgcttttattggagcagaagaagatggagaccagtaaagatgtgaggaaaccacttcacaatgttacacacttgtcatgtttcattttctgtgagctgttctcactgcttagagaaaatgctttgcagacagaaaacacggaaggggaagcctccatccttaacagattgcttcctctgggggagaggtggagttggcaagtgggagaccaacatttatttattataaaatgtattaatttattgtgtgtgtgccacatgtgtgtgcactcccacatgcttactctgtcatgcacgtgtcaagcatgtgtcaagcacatattggtcataggacagcttttgggatcacctgctgaatcctggggaatcaaactcaggtcatcagtcttggtggcaagcacctttaccctctaaaccattttaccaccctatttctattttacatttttctgtcgaatttgttaatatgactgtgtattctctgttcattgaaaactttgtgattcaaaaaactaatgtttatttagaaagaaaggagcaagggggggccagtgggagaggagaaaagttaaagcagcatatgtgtgaaatgacacagatgccagcaggaagcccactgctttgtatgttcacctaatagtttataattaaaaaaaaatggcactgggcatgtggtgctgcacacctttaatctcagccatcaatgggcagaggcagctggatatccaggagtttgaggccagccttgtctcagaacaaaaccagaccccaaaaagctcaaacttaagatatggtatggtatggtatggtatggtatggtatggtatggtatggtatagtatttgctacttataatggaaagccccccccaaacacaaaaaccactcagatgaaaggcctgcttcataccaaatctaacttccaactttaacatcaacaggttagtgcagttaatctagttgattgttgaggatcaaacctggtaccttatacatgtcagataccaagtgctaagctacactccagcccattcctacctattcaacaaattgatttctaaggaagcaaagcatattattagcaagagaagcaaacatggcctcttgaagccagtgtccactgcaccatatttgacagaaggaacagactctaaggctgtaataagctacacaaaggactgttatcaggacatatttgactgttatttgtataaaatactcattaatttggatctgtcagtggagcatgcatggatatagtgtgattatcatctgacttcatgcagttttgggctagaagatatttatagtaatttataaaattgctaaaacttgaagggagctcctcagtgtttctggtaaagaagagctactatttattcatcttcagctttgtgctcagcggtggcacttctgtaaacaagaatccctgtttctctaaaggcttctttctttgatttaagttatgctaatgttttatgtagggtttctattggtgcaacaaaacaccatgaccaaaaagcaagttggggaggaaagggtttattcagctcatacttccacactgctgttcatcaccaaaggaagccaggacaggaactcacacagggcaggtactcaagcagggcaggtacctggaggcaggagtgatacagaggccatggaggggtacagcttactggattgcctcccctggcttgctcagcctgctttcttagagaaacttagaggactacagtctaggggtgttcccactcacagtgggctaggccctcacccactgatcactaattgagaaaatgccttacagttggatcttatggaagcattttcttaactgaggctccttcctctctgatgactctagcttatgtcaagttgacacaaagccagtcagtacagctgattctttgtcatcttgatacacaaaaacatcactgttaagctacaacccttccttttttatttatctccaattaaaagcataaaaacataaataactcacattaaaaacataaataacttaaaatttcccacagtctttacaaagtcaaacacgttaaaacttcacgtttttttggtgggcagtggtggtgcatacctttaatcccagcacttgggaggcagaggccagtttgatctacagaatgagttccaggacagacaaagttacacatagggaaaactttgtctcgaaaaacaaaacgaaaaaagttttttttttccatttttttgaaatactatttattatttatatgagtataatatagctatcttctgacacacaccagaagagggcatcggattccatgacagatggttgtgagccaccatgtggttgttgggaattgaactcaggtcctctggaagagcagtcagtgctcttaaccgctgagccatctctctagcccaaaaaaaggcttttaaaaaaatatctaatctgtgtaaaaattcaaaatctttttaaaaaaagttaaaagtctttcagctatgagcacctataaaaatcaagtttaagtattttcttatttcaagagggaagaaccagggcagagtcacaatcaaaccacagcaaaactgagttccatcagtgtaaacaacacaaaatttaatgaccgggatccactcaccatcttcttgggtcacttcctatgctctgtcctcagcagcacacattgcttgtcttctaggctctggctggctccactccactgctgctgtcctaggtggttatcccatagtacatatatctccaaaattcctggggtcctctgctgcagctgaactacactttaaccaacaggttaaagtatcttcatggtatcaagtctcaacttctcctcatgatcccttcactcctgggtcttccagtgctatggaggctggaccttcactaatggcctctcttggcttctcacagtgtaagcctcagctgctctcagtgaccccttcatgcctttaagactagtaccatctgggtgactggtacattaccaagttctgctgccagcacaagatcacacttcagccagttctggaactcagtttttctgtgctctcaggaaacacttcccagaagattttatctcagtgatgctgctctctattactgctaacttcttagctcccaggaacacagaggtttcattttcttgatactggtctcttgttaattgtggcttactcttcagctcttcagcccctgctgaccagaacaacagactcttaattcaaaatagcaaagaggggtttggggatttagctcagtggcagagtgctctgtcctcagctccagggaaaggtggatggtgctgctggtggtgggagaacaaaattccaaagtagcaaacagccccgatagcgtctttaaacttccctctgaaaccttacaagccaggcctccatctcttgtactgttgtcaatattcttatctttcaggctcctgaagaacatcccactaaactctttaacactcaatggctcttctagctcaaagttccaaaatcctttcacaatcctcccaaaacatggtcaggtgtgtcatagcaacaccctacttctggtaccaacttgtcttagcccacaaaggactgagctctcccccactgatcactaattgagaaaatgccttacagctcattcctttgtaatgtctctagtttgtgtcaagttgatagaaaatcagctagtacagccaggtaagtgccggcaaacttgggtagatacttcatgtggaagagtaagagacagaacgactgagactattaagaccctgtttcagaaaaccaactagccaaacagaagaaacaaactttctttttatagctgcacacacagagatgctattgtgcatatcatctcccaggcttactttttgcttaccattatagatggttttcatgtaagatggatctatatcacacagttgtcaatgtgggactatatgcatcactgacccccactgtctggcatcaggtattggtgttttatctgaggggtgggcagctgaaacatgatcactgtgtagcctaggccggcctgaaacttggctgtcctcctgcttcagtctctcaggtatcgtcaggcctattgagtaagttggttaacaatgctatacattattataatggcactgtgtgatgttaaggtttgttctttatgcactctttttatgttttctctctaacagatctttgcttatgatcactgtttctggtccatggatgaatctgtccgagagaagtatgcaggtaattgagcagtttcctgggcacttagaagcgtggaagcattttggtgtgctctcgatccactaccatggcatcgtttggtgtaacttataaacagtgtccagtcagctgcttccagcatttgctctgaaaggttttgtgctgtctagggaccaagagacttcagtgtgatgttcttgggggtgagatgatgaatatctacgactataggatctcacaaaggccctttctctttcatctcatgggaccaggagctacatcttagtcttgcaggcccccgtgatatctgtgatgtggtctagagggacctggcataagtagagaggacccctatactggagcctaagttctattccttaaaaacctctgtgatgcttgccagttcttcagtcctgccagagagtcgctcttccctctgtaccacgaccccgggtctcagtttccttttgccctgttatactaccttcccaaagataactgtctgttttcatttctccgtgtgggtgctgagagttgaactcaggtcctctgcaagaacagcaagtgttcttaacttatgaactctctttggaccctatttccagaatctcactccttgtcataactgttatgaattgtaggttgtataacttcaaatattcataaggaaaaagaaagggagtaattgatgtacatggtttttctgaactctagtatactttgaataaaaggatggtatgtagtttcaggcacatctgggtcctaaatttaaattttagatgttcagggctggtgaaatggttcagataataaaggtgcttgtaccaggcctgatgatctgagtttagtctccaggatccacatagtgaatggtgaaaaccaactcctaagattgtcttctgacctccatacatgtggcaacacacatacacacgatacacatacaataaatagagaacattgttgaatcttaggtgttgactgtaaaataagcaactcttgagctctgtattgcatggcctggtgggtgtccttgttcaaacatgtttacagaagacagtttactgactcttcttcttattctaactagaaataatctatggttcagaaggtgttgggcttccaactttaaataagctgattttgtgtgtgtgtgtgtgtgtgtgtatgtatatatataagagagagagagaatgagatttttgttggatttcttatttgttcatgtgttctttgcccataaaatatcattttcctgtcctttaggtcaagaagatgttttcaagtgccttggggagaacattcttcagaatgcatttgatggctacaacgcctgtatctttgcttatgggcagacaggtaatgtgaactagcctatactcgcacagttgggcatcgatccatgaaggtgaagatgaagccatgcttaccgggccacactgcttacttgtcctatgttaggttctctcacaggtgataaaagtaggcagtacgatgttttctaagacagcacaggaaaattaggattaaagttgtttgtctttatttttttcctatgtgaagtttctccccttcctcccccttcctcctcttcttcctcttcttcctcttcttcctcctcctccccctttataacttgtcagaaatcaaaaaagaaaccagttatggtgctggagagatggatcagtgatcaagaacacttggtattcttccagaggagctgtgttacgttcccagcatgtacatggcagctcacagccacctgtaactccagtccaggggacccgaaaccctctgctggcctctgtgggcactaggcatgcaaatggtgcaaaacacacacacacacattaactaaaaactaacaaaaaatatttttaaaagaacacacttgttaatatcgtactagtcataactggtaaggactttaggcatttatactttgtaattaaagaaataaaatgaatttaaagtgaaactagttgctttcataacggtacgtcatgtggtatgtccaactgaacactgttcttcatagcacagtgtgtatgatagggttgggcatcatatgcatgttcaaagaacagaaattctgagccaggcggtgccaactcctctttctcctgcctctcaccagacgggccttcctgcctccttgtttcctcactgtgaaatgttgagactgcagatcctcccacaggatcggcatgatgatttaccgtgtgctcacttcaggaagggcttggaaggttgggaatagaagttttaggtattattacaggtgacacagaagcaacctgtaaagttgaaagcacacaaatatcacagagccatttggtactgggaggggcagaatatacctaagtgccatgtgttgatttaccgtgtgctcacttcaggaagggcttggaaggttggaaatagaagttttaggtattattacaggtgacacagaagcaacctgtaaagttgaaagcacacaaatatcacagagccatttggtactgggaggggcagaatatacctaagtgccatgtgttagctccgggtagtggagctgtagtagtttagtcttttccccttttcatttgtccatgttttatggtctgtccctcccctcccctcccctcccctccccatttttttttttcctgagacagggtttctctgtacagccctggctgtcctgggactcactttgtagaccaggctggcctcaaactcagaaatccccctgcctctgcctcccgagtgttggaattaaaggtgtgtgccgccacgctcggctactgagtcatctttaatgaatatttcattcttgtatattagaggcagattattgttccctgcactattacaaaaaggcagtaagctgatttgccctgaagcccatgagtacctgtgacttttgtactttgatttcagtagttaggaatatctatataatggtattgtctatttgtcttccttccttccttccttccttccttccttccttccttccttccttccttccttccttccttccttccttccctgatccatcgtgattattggagtctggctttgaactgaccctccgtcccctgtctcctgctggattagaggctcaggccatcctgcctggctgggcttttttctttctagaccatgtctacttttgttctatacaagtaacgaaaagcttatgttccatccttactgtgctcttcttactttatccatgtacatgtatatttgttatattttgtgaattttgctaagtcctaaaaattgattgtagttattagaaagaggattagatgccttaaacttctccaagaagtattaatggctgctctttgtctttcagggtctggaaagtcttacaccatgatgggcactgctgaccaacctggattaatcccaaggctctgtagtggactctttgaacgaacccagaaagaggaaaatgaagaacagagttttaaagtcgaagtgtcgtacatggaaatttataatgaaaaagtccgagaccttcttgaccccaaagggtaaaacgtggatgcttgagtgctgtgtctttctgcaagcagacataacagactgtggcttcacagagtttgtaactgaactgtagtggagagtgacctagctctgctgttcatatttatgtttatatgacttatgtttacaaggatcagctccccacggccagttctgggttgttagagctggcagagtgatgattcaggtctgcacttgtgccatgctgcctgtcctctcatcacctaaagccacagacaaaacaggtgacgaaagtggtcatttaggatgagtgtggctgagccgtcagtgacacagactctttttctttcttttttttaaggcaataaattttagatttctgtggttggtttcaggcctgagggggaagcgaggggggaggtaaatgcagagtttggaacctggtcttaaaataatctgaaagccctccctcccacttggggtaggaggtcccatgacttcatggagttgactttgaaagagaactgcttcagagtacaaggaggccctcagaatcactttgtttaccctgcagccaggagggaaacaagcagagagaggtagctgaggaacctgtgtactgcagagcagggacggagacggagacagggcaggggggagagggagtgaggagcagtgattgtggctgtggctgactcacgtgaaactgcattaacagggtcagagagccatgggattacagccatagagctgggtttggatcaggaaggtggcccaggaaagatgatatgagaggcagagaatcccagtgaggcttaagcaagagcaaacaggtctcagtgcctcacagcatctttctttggccagtatgctcttcaagctggggcttgaattggtacttgatatggctgtccaaactttacctactcactgtttatcaagtcattcttacaatgccaggcaccgtgcagttcagagaaagagcccatagtctggagagaatgagttttgctaacaagttagaggagcatgcagtctgctttttgcttgtgagggatgccaacacaaaatagagggcaaaaaggaaagatggcctctcccagagcccagagaggatcccacagaggtgcttggtgaccctgtgctgtaggagtttatcctctgagaaatgaggtgagaccagcctgtgccagcctgtggaggtgtctggttgtcacaggatgatcaacattcagtgcagctgaaggatagggtgtgtagagcaggaggccagagatgggttgccatggctcaggcacccatattttgctccctgtaaattttaattctgccttcagtgattttcttgtattttgacctctgcaaagacggccactttctctgagatctagctcagacctacacttcccagaaacagtaaactggctggcttcattgcttttcatacctgtatcacctagtgaactggcttaagtgtatcagatgtgctttgtcttgagtggtctcctgtttgttttgtatgtggcttaacgctcagcacgtgggctttggagttacagagctcaggagccaggtcctcttgtttgtggttgagcaggttcctcgcaccttctagagctatatagggaatgtgtgatgttatcacacagtggcccacagggctgttgtgaagattgagagcatgatatactctaggtctcagaacttctagcacacagtaagcacttaacacattttagctgtgggttttcctgccgaagtttcttgaggattaagaaaaaaaaacaacccttttttaatgtaaaaacttgtatttatgtgtatacgtgtatgtctgagtgtatatcacatttgcagtgcctgtggaggtcagaggagggtatggagtcccctggagctggagttacaggtagttatgaacagtctgatatgtgtactgagagcagaactccagccccctgcaaaaacagcaagcacccttaacagctgagccatctctccagagcctataaacatttttgtatctgaaaagttaaaataatggattaaaagttgtaaatcagatttcatttcacccagagtatttgagaaaacttcattcttaaaattcaagcactgattttattaattcagtgactataatgtatattaatgaaatcatgttttgcttgagacataatgtggtagatatacattgtctttaagaaaaaggggccaggaaggctggagagatggctcagtggctgaaaaagtacttctgctctttcagagaacatgggttcaattcttaatatctacatggtggctcatatcgtctgtgactccagatccaggggaagtctgtcctctcctggcctctgtgaacactgtataaattgttcacagatgtagatattgaccaaatacctgttcacataaaaaggggcatggcactgaggagacagcttaggttgtaaagtgcttgctgtgcaaacatggggacctgggttggattcctagaaatcatgttgggtttgtttttgagacagggtttctctgtgtagccctggctatcctggaaaccactctgtaggccaagctggccttgaactcaaaaatccgcctgtctctgtctcccaagtgctgggatcaaagatgtgcgccaccactgcccggagtggttagtgcttttttttttttttttttttttttttaaattgtgtgtgatctgtgctctatgcttgtaatctcaggattgaggaggcagagacaggcatacccgtgaggctaaaagaccagctggcctagccagtcatcaagattaggtcccagtgagaaaccctctcttaaaaagtaagttggaaaacatccaaggagtgacacctgaggttgacctctggcctccataggtatacctgttcacagacgtgcctacacatgcacatatacccacatacatacacatacacagttttttgttttttttttaaagggaatactgaaaggctaaaagttaatagcagactgtatcctggtgtacgagctgagcagcaatccagttcttgtgctatgtctgctggagctgaaatcacataatattacaggaccacttgtcagcatcagcattcatgtaccattgaacccaggagctgtggtccatatgctggaagacaggaaagcttttgggtggcagagccatttcctggtttccccactttgctgaactgttcgtttactcttccagtacctctgcttcattctcatacggtggatggagtagatagggttccaggttctctgtgatctgtactgtctccaagcccacctaccccttctctgtctgtctccaagctcagctgataccttgcaagtccttgttggtaccttacttttgtttctactttgttagccaagtgtgttaattctctgagtgactcttaggtgccagggattatagtaagaattgtggaccctgaaactattattaatacaaggtattcttttcttctagagcccaaagtctactaggcaaataaattctgatctatggtagggatgagcagactctgagacaaggcaatagatggggacagattgtaaaagagcatgcatgttagattgaggagcatgacccttacactgtagcaaaaaaacaccacagaatgttaagcattctagttcattatttattttgaaaagacaacccgtttctgtggtcaaatgaacacatagtaaaaagtatagataataaacaaacaaaaaactataatcacttgggatttcactattagtcagtattctttttaaaaaataatttttgtaaacagtactttcatttacagagtacagtttgggtattttgggatatgtagacattatgaaatggcttcctgtatcttttaccttaattgtcatttttctgtttttatggtgtggtatgaacaaatgagacccacccccagcaattttgaaataatgatttacacgatgactgctgtagtcaccatcctgttggtgggtcttagggtttacccctcctgactgaaacttggtgctctttagccagtgcctggacaggtgttcctaggattcgctcagaaccctgagggggccacggctccatgtgtgctgggaggtttggtttaaaaactaacgaacgtttactttttgtatttgttgaaacagtcatactttccctctttcctctggtgtgtcagtgtgataacgtgtgcagacccccttgttaggacaaccagacaaattctagataagctctccactgtgcctttaaatctctctttaaaacaaagggagagccctttgttgtctttgtatctttgttcatagctgagttaggcctgtggtttttctttcttgtgtagttaatacttacaaagcttctgtcttgagactggttctgtgatatgacaaggagattgttggtatttatttgactctgcattctttacagtagtaaatagacttcccacgcttacccttttgagcgatgtggtattttgccacattatcaagcttttcttctcagcaaggattttaaagttaggcttaaatctttgcaggatccagtgatctgctcttctgtattaggggttctctctagaagtgcgtgtgtgtgtttctgtgatgcacaattgagtctttctaaaagtctctaatggaccttgtctctgtcgtgacagaagccgtcagacgttgaaagtgagagagcacagtgtgttgggaccctacgtggatggactttctaaactggctgtcacaagctacaaggtaacagcatcctctctgtaaggtgcttcaattgattgccattttggctcattacatttcttgattttcgaatagttatttaaatttcattactttgattttatgtatgagtgttttgcctacatgtatgcttgtgtactgtctgtgtgtctgatgcccctgaggccagaagagggcatcagatctcctggaactagagttacagacagtttgtgagctgccatgtgagtgctgggaatggaactcaggttttctggagtcctctctctggttctgagctacagttttaagattaaatttataataccatcatttaataactctctttctacaaaaaacttcaaagtgataatggggactagtcagtaaatgtcagtgaggcctctggatcttcagaaccaatgatctagaatgggcttgggaaagttttagaaaatgttttgcctatgttgatatttttgaaactaatgatttttctttgagagtacttgtgttgaagtttttactaaatatcattctttttaatatttcattcttttgtcatagcaaaactatgacatgaaacttttctatatgtttggtaactttaagattgcattcaagcatatacatcataaaaaagtaacaggattttcggtttctgtacggattactacatattgtattatgcatccttagtgtttaggaagtacctgttggtgtatgatgggtattttcagtatacatatgaatgaatggatctaaaactaagcagtcatttaaaaagtgctgttctcttaagtcagtctgacataggcgctccgaggctggtgtcatggctccaagctgttgggagggacacaggtccttccctactccacagggagatgctgtactacgtgtgctctgctaatgcctcttatagtagacatatgatggcatgtgtgcttccattaaggagggtcacccagatggtctgctttatactcgagttcatcatgtggccaggctgggctgcagagacctgggaaatacagcctcttggctctgcctcagcagacttaagaacactgagtgttgggaggcagctgagcagcacttctgcatattccatctctgcttcctcatctcacacacccctggagaggactttgctgtgtgtgtgtatttattcattattgctgtggtaccaggcattagaccccgggcctcgtgcatgctaagcaattgcactgatcttgggctccattcccagtctaggagatgataatttgtgttgtaattaatgaagccaaacactaattgctttagtcactttttcagagcttgtagcttttgtggggcgagggaaagacaggatctcactgtgccaccctgaatgacctgggattgttgcatagacaaggctggcctcaaactcttagagatccacttgctttgcttcctgagtgctgggactaaaggtgtatggccttagcgcatagcatttggaaaaactgagccagccttggtgacatagccatgtctttgcagctctttaggaggctaaggcagtagtaggatggagagttcaaggcctgcttgggctgcagaatgagtttaaggccagcccgagcaacatagttaggcccagtctcaaacaaacaaacaaacaaacaaatattgagctagagatagctcagtggtagagcatttatgtagtgtgtctgaggccttgggttcaattcccagaactgcctttctccccgcaaaccatagcaatttttctagtatcccagctttatgcttttttttttttaattggtaataccaaaacatatacataatgtgtttgggttaaggggttaaactcttatattttgttttttatataatttgttttggtaataagcttgtattgcttttacaattaaaggcatttattattattttttggctctcatcttatgtcgctcagaagtattgtgtctgatgctggacatggcacacctgtgatacagtactgtggaagcagaggcaggaagatcacaagattgaggccagcctgagctatagaatgaatgtgaggctagcctgaggtactttgtaagatcctatctgtgggttgagggagtctagcttctaaacttgttgtgtcaaagcagccatgtgcttctgtatctgcagtgagtgaagctctttagttggcccttgaaaatagtatgggctcttataatttgtggaaaaacaaaatgtaacctgtaaaaacttgggtgcttgtggtagagtgagagaggggtcatgcttattcacaaataatgagtatgtgcctgtgacctgtttccacttaggatattgagtctctgatgtctgagggcaacaagtctcggacagttgctgcaaccaacatgaacgaggaaagtagccgttcccatgcagtcttcaaaatcaccctgacacatactctgtatgatgtgaagtctggggtgagtagcttctgaaatgatcatgatttagtccagtggctctcaaccttcctgatgctgtgaccctttaatacagttcttcatgttgtggtgacctctaaccataacatttttgttgttacttcataactgtaattttgttactgttatgaattgtaatataaacatctgatatatgatcctcaaaggggttgtgacccacaggctgagaattactggtttagcctattctctttgctaaatttgctaaattgtaggtctgatccagactattggtcaggactcaggacagaggatcctagcaggaacagaagttgctgtactgtagctacagcactgttggaataccccaagagggttggggtctatagcaactctaggagtcactcctaaaccacaagggacacacatagcttcattcaggaataaagaaattgcttctgtcagtgaagctgcctcttagcacccggaagtcgtagaatgtcctgaaaacttagatttcatgacttccctgatggcagaaaaaaggccaaggaagacacttcacttctgctttccagtctttagcaagagggtctaaaggagctatagtcctatcctgcggcctggctgcaagggagtcttggactagacgtagttcccactctccagcaagaggacagtgaattacacaagctgcttgacctggcccagccacagcagctgtgcactttacacccagatggctgctttcagcggagacacctttgccggtatccctgctgctaaacagccaagaggtcaaggagcagcttgtgttggggaagaatgcaatgctgtaacaaccattgaacgtgtagagcaccctttgagcgtttggttggaaccttgtgaagctgctgaggcctttggcacgttgaacatctgctggtagctcacgtgtttctcttctctcctctcctttcccctcccctcccctnnnnnnnnnnnnnnnnnnnnnnnnnnnnnnnnnnnnnnnnnnnnnnnnnnnnnnnnnnnnnnnnnnnnnnnnnnnnnnnnnnnnnnnnnnnnnnnnnnnnnnnnnattgatttctgatgtccatccctcaggacctcagtctcaattatgtcaggcagaagtaacgtggcgaggtgctccatgctagcaggcttctcctttgctgaaaaataatttttttcctccacatcaagatcaatgtcaaaaacaaaaagttctcttgttgatttcctttttagagtaaagcaaaacaaaacacataacatactaaagactttcttttcttttattattattattttaatttctttaatgtatctgagtaaactatagttctctccatgaacaccagaagagagcgtcagatcccattacagatggttgtgagccaccatgtggttgctgggaattgaactcaggacctctggaagagcagccagtgctcttgattgccgagccatctctccagtccggactttgtttttgtttttaaatcataagtatttttgatctgggaagcaaaatatccctttgtaatgtttatggaaatgtataaatgtacttttgcagtgctgagagcagaacccagggccttctgtacgccagataaacattctgccaagagctactttcccagccgaggagaacagattttaaaggaaagtttccacagtgcttgcatccatagcctctgacatcgctgtcttatgttctgttttgctgatgaggtaaagcatgaagcacgtcacatgcttgatctggtggaagaagacaccactgtctatcagagaccacagctaatgtggaaaagttaagctgatcagctgaataagataaaagtgtttagaaaatgtttttgactttttgaacaaatttgtcacacaaaagtcagattctttgtttttgtttttaatattagccaagaatgtaagtattttgtcttgggccagtatttatgaaattttaagcatagtttcaaatcatgaaactttttattttataagcacttttgtttatatctctgaaaactctacctatctctccaaaatgttgcattttataacatttttcctgaggtcatcatcttccttgtttgctcactacttggttagcaaattgtgtaagttttgtgctaggtggtagtttctgcagtgtttactgccagcacaaaataattttgcagtaatgacagatagctttggcaaaggccggagacaataagccattcgagggagtcagcctgttctcagcactcattagccttttgtagcatgtgttggttttctctgcagacatctggagagaaagtgggcaagctgagcttagtggatttagctggcagtgaacgagccacgaaaaccggagctgcgggcgacaggctgaaggagggcagcaacatcaacaagtaagtgttccaggatcacattcttgagtcactctatggggctgatagaaaaacaggggaacatctgggcttacggagtaagatgattctggaacgattgaggcaatgatgagtaagcagtttggatattttttctagtgttttctatggcctaagctcattttctcatctgtggagttgtttgatgtaactggcaagcacagccctcagtcaagtcaggacttctcaacaatggccctattgacattgggcttaaatgactccttttcctgtgggtgaaggatgttgcggaatgtttgatagaacccctggtgtccgctcactaagtgatccactgactctcttttgacccccagttgtgacaacctagtctcatccttgtgacttgctgttatccatggagcatactcatcctccactggctctcggctgtgtgaatagacactgtgccagctacattgggctgtcccttttagtctgctgttgtatttgtcagtatctcagaacccaaactttatgaagtagtgttccatttgccagctccatcacatagttttccctcaggctaaatcattacctcttcatgggttcaagtcttccctttcttcagggctcctagagatatgaggtgagacattagccagcaggtgggaactatggaacacttctttagcactagggtatgcagatgtcagcttgttatcacttttgctctaatcagtattttaccctggacacccttcttgaaggtgtctgttggttatattattatcttcatcctagttttccaggtcacatattttatctgcaaaaatgaaaaataaacagtgctaagtgtttttattgtctcaagtagctcagatggacagtagcctttgggggctcggtcttcagatcagacagcaaagtgctgaccacagcactcattacatgcagccaagggcaccttgctgctgtccatccttgcaactaatgtgacattcgatattttctggcttagataattgtgctttttgttccatgcaggtccctcacaaccctgggtctggttatctctgccctagctgatcagggtgctggcaaaaacaaaaataaatttgttccctatcgggactcagttctcacatggctgctcaaggtgagtcattttctttgtcctttgttagtgttttagttagtgatccttttgcttcaacaaaacaccatgaccaaaaagcacgttggggaggaaagggttgattcagcttatacttccatattgctgttcatcaacaaaggatgtcaggacagcaactcacacagggcaggaacccggagacaggagctgactcagaagctttataggggtgctgcttactgagtggctccttatagcttgctcagcttactgtcttatagagctcaggacacccagcctaggcatgccactgcccatagtgtgctgagccctcttccatcaatcactaattgaaaactgcctaagagctggatctcagggagatttcctcaactgaggctcttttcaatgatgactcttgcttgtatcacgttgacacaaaaccagccagtttttagcatttttcagtggcagaaaggaagaacaaacagtaggttagtctcttccagggaccttgtctccatctgtgttcagttgtatagcttttaggctgtttgaacagtttcagtttcaggagcaagtgtcattttcttgctagtgtttggcattcttgtcctccagaacctgcatgggaagtggtggttgaacacatagtggcccctagatattgaggggcagaaggatcaagtggtgaggggacagtgtggttactcacagtgtcccctgcctcatgccctgctcggagctgctttgttctgctcacagacacctttgattagcttgagtttattttccatttcattctcccctgagcctttggtttttctgctttgcaaagcttcagctaagtgtagagtagaaacacagccacttctccactgttgcaaacaagcaacagaaatgtgaaaggaaaacatccataagtgccccaagggagcacaaggaaatggagactgagcccaagagcacgaagggttaccttacaagtgtgttggtgatttcacaaaggacgggtcccctggggtcttcctgaaggtggtgtgggaaatggacatcaggcaggggattagagcttgtaataggtgacaactttgtaaaggtgtcagagtggaacaaaaacttttgcctttctcatactctccatgattcactggaaacagagaagcaggcactggagacgtggtacatggttaagaagagctctgctcttctagagggcttcagtacaatgcccagaatccatgtagcttagttcacagttgcctataaccccagctccaagggatctgacaccctcttctggctcctaaaggggctgaactcacctgctgaaagccacacatacaattagaaacaaggaaataactttttgtgtctggtgtagcttagtgatggctcattttctcattggtaaaaatgtactgtacttactatctcttactatagtgaagcaggggccccagggaacttagtaaatgttggttgccaccgttgactgaatcactgtgtttagagatcagcctttgaagtactttcaaagggaagtactttctcctgactatacacactcaggatttttctcccctgcactcccaacagggtttctctgtgtagccctgactgccctgaactcactctgtagatcaggctggcctcaaagttttcaggaagaaaatctgataatattcttctcccttggacttccagagaggcatttcaagtcatgcatagccattcccttgatgtgcctgatttaaaatcagagtctacatagtcactgtgactttagttaaaacaacaggcaatctcctctttttggtacagttcagttgctgtccataaagctgagcctgttaaccctgttgatgaatcaggggtcagacagccatgtccatgcctggctggtttatgcgaactgtgctcttagtaaagattcattgaggacctccatttgactttgcctgtttttgattgaaagtaagggaagatgtttgtaatatgtgaagaatgaatcaaagatgtaattgcagcttctttgtgatgattcagatgaaaaataaagcatgtttgttcagtttctattattttttccttaaaggcttgtattacctgttttatatatttgatgtttgcaccaagagcctaagtagggggatctaaacactttgtccagagctgtaatgtttgcccctccacctctacccagtgcatgaattcttctttaactcctagtctactcccaccccacacctgctgattgtctttcagtgttggtgtaaggttagcacaccccccgcaggacttcattgagctcataaaatggattacctttaaagagatgaatgtgtacatggatggaccagaggtcatgtttggtgttgtcttctttgacttttgagccagggtctctcactgggatccggggttaggaagttaggctcggctgagtggccagtgtgctccagtgatctgcctgtttaactccccactgctgagattacagtcctctgccaccacaccaggatttttatgtagatgcttgggagtgaatgaagcacacttgacgtttatcactgtctgaatgtggatctcctagctccaagtgtggctgtgagtgcccagctcctactttgtgagctctgaccccacttttattctttgtttcttagtttttgtttttgagacagggtagttctgagtctgtatagtttggctgtcctggaactcactgtgtagaccaggctgactttgaactcacagcaatctgcctgcctttgcctcctgagtgctaggattaaaggcttgcaccaccactgcctggcccacttttaatttttttttaaagatgtatttatgtattatgtatacagtgttctgcctgcatatatgcttgcatgacagaagagggtgctagacctcactatatagattgtgagtcaccttgtagttgctgggaattgaactcaagacctctggaagagctgtcagtgctcttaacctccgagccatctctccagcccccacttttattcttaatgtcaattctctagtggatgtcatgtggatctctcactgagctgacaaccatttcccttggaccttctttgtccaatccactcttctgtttctaaattcactggaactttaagtctttttagtaactgtcctccaggcccttagaatcaaggccaagttctttaaagaatggcttcaaaggcctttcccagctgacctctcgtcctagctgttatctgtgctctctggctttgtaggctgtaggcgagtgaagatggctgttgtgcgttcgagttttattcttacttgtcacttcctgctcctctctcctctacctgccagtctggagtgtcttctctcctaggttccttctgctcttcgtgcttctagaccctgggtttagctcttacacagcattgcctctcctgttagatggcaaaccccacaagaggggaagagcaagcaatcccagctctggtctgcattagtacgctgaccttcatttggtaagtctctcggcttttctgggtctcaatttcctagcagcacaatgaagtaattcgattagatgatttcagagttctttcagcttgaaaagaaaaattctgacttctaaaatgaaatttcttcccagtgtccatttaatttgcatcgccacatttgaaacaaagcttgtctgatgtgcttaattaaggagtaaacaagaaactgtaaactttctcttggatgcctgcccattcttttgttacattttcctttttgttcaagcaatgtgagcatattgttgctcacattggtcatttggtaaatcaggcatggggtgtgcccagtttccttttctctgcctacgcatgcagtggcagcttgctttcacccctggtggttatggttacaagtcctgtttgtcattcttgtttgctgtgcccatgggtagactgtgcagtaacccttagggggatgtgtagcctcgctggtaggtggaaccgcagtccttgagactttcctatcctgtctgaatgtgcatgggctcctcatgacaaactggagcactgacaatgtgaaattagtgtctaggagtgaaaagagaatcaagaagtcctggctgtacttctcgaagtccagattggttacatttcttgcctttctatacttaagagcatattttcttcaatataattatctctctctttttttttttgaaaaacaaaatttttagtaatggaagagtaagcatacatatatattgtttttgatcatattgagatattgataccttgtgaattattttgtttctaatgtcgggacagaataatttgaagtggtgtcaggtgatctgactcagcctttaggcctgaagttgtggttgcctggtgtgcttgttgtgggtgtctgtgtgggaagggaggggggtttgaagtcaaggtggaaaatcctggggtggagtagtacccagtttgctaggtctagattcttaggcatgttgttgatgggtttgtttgcttgtttttgtgttttgttttttagaacaaccctgctttcctctctaatagagtggggcttctaatagttgaattcacaaaaggcagagaaatgtataaaactacaaaattctctaaaaaatttatatgtgttaaaattggaaaaactatatttttaaaattaagagttttctaaaggtgaacattggccaaatctaagtcagctttcttgttatgtagtgaatatctctaaattttaagactttgttgttcattgtggtcgcatttctgaaaggggatattgaatctttacgtgttcatgtatgtgggtctatgtacatgagtgtgtgcatatggaatccagaggacaaccttaggttttgttcctcaggctctgtacacctttaaaaacataattttagaagttttatttgtatgtatataatgttggcctgtgtgagtgtaaatgcaccatgagcatgtaggagccggcaaagggcatcagaatccccgacactggtgttgtaaagcaccttttgggtactgaggactgaactcaggtcctctgtgagagccgtaagtactctgaactgctgagcaacctctgtaggcccttcactgtttttgagacagtctctcacatggagctcatctagtaggtcaggcttgcccgcaagttctggggatctacctttctccatgggattgtaggtactactatcaagtttagctttttacatgtatttgaagcactgaattcaagttcctgcatttgtaaagcaagcacttttgtgattaagcattctctcagctctgaatattttttatgcatgtgtatgtagtgtgtgtgtacatgtgtgtaattggaaacatgtgtatatgggtgtgtatgcactttagttggtgttggatttttttcctgtattgctctccactttatacactgggacaggctctctcacctgaacccagaacttactgatttagcgtgtctagctgtctttcttcagggagccctgcctttgtgtcccatgcgctgggattataggtaggctgctgtccacttggcttttacacgagtgctggaagtctgctctgatcctaatgcttatatggcatgtgctttccccactgagccatcaccccaggcctgactcttttatatagcttagtttttttttataatgctcccaagtgttgcatggtatggaactactgacctgtaacatcttactccacaagcagttttaagtgcttggagccagggccctatgagctgtagtttacgtataagccaaggctgtaatcatctagaggcctgaatcaggtgggagagtgttgtcacttccatgatgataggcagacttcaaggacctgcttccattttcactcctatgggtctcttcgtagggccaccttgctcctcctgagagcaagaaggagtgctaaacagagagcatcatttgcttttaattcgatatcagaaatgacatgccatcatctctgtcacctttgctgttttgccagttagaggccagtctataaatgctgaccatccaagggaagagccagcactagttaggactcagcaggctgtgatgcctaagagtctctgctgaaatggggtgacctttaacatcttttgcatggtcagtggagtgggagttgatttagtaattttaaattttttgagggtggctaaggaccagtctcagcttggagaggggttctgagagaggggtgtttgggagaggtgaaaacaaaccgctgcaagtcaaatcatgggtcgaagctggcggcctgtgctctgtggcttctcagcctgcttgcttcttcctgttctgctttcttcccctctgatctgctttctctctctctgtctgatctgcttgctctggagatctccagacagctctctctttctcttttgctcttggtcttgctctcactcttgctgttctgctggagacatttctccaaacacttctctcttgctattctaaaaaatttctgttagcttgtctcctgtagatcataagcccagtcttttattttacatattaacccagtcatttactccaggtttccttttaattatcctatgaatcaccatcctgtgaccccagccccttaattcttaggagacagtaagctttaagtcttaagcctacagcagccattgacactcctggaggcccacatctgctggtcctgtcaaaggggtacaaattatgtcattttgtccccaccaaggccatgctggaccaacagagaatttctctttttcttttcaggcctgagatagatgtatgtaacctagagccctgtaagcgctctgcagagtcacatagctcattatttttaatgtcctgactaacattcgctttcctgactgttggaaacagttactgggcctgcagatgaagagcttctttagtactttgaatgagctttgggagccattgtgtagagcatgtgttagtttctagaatgctagcagagggaagaaaacggagcttctggaactcagcttctggtgggattagattagattagagggctctaatcctcccttaggtttcagagccagacaaggttcccaagaacttgtttgtaccatgaggacaggcagcactgtggaggagagtgtaggtaagcctccttggggctgggagtgtggctcagtggcacagtacttgctgagtgcagaagccctgggtcccatcactagcactaccaaattccccaaaggaactgacactgtgcatgtccagtacctctgaggttggttagccattggagtcttttcattgtgagcaaaactgctcagaatggtatcacattgcttattaaatgggatatactatctctggattaatttttacttaaaaaatagactttaatttgttgggttttgttattctttcttgaaaaaaaaaagaaaggatttgtggttgtttgtggttccttttgtttgttaagaaaagtaggtagagctgagcatagaggtgctgttagttccagtgccctggaagcagaggctggcagatctttgagattgaggccaacatgatctatagagagagttcctggacagccaggactacatagagaaaccctgtctctaaccctgccactgctaccacccccaatccccttcaaaaaaaaaagtaattggcagagaagagacagttcagggttgaggctcatgggggtctgcatgtgaacccctattttgtcttaaatgtgtttggtcttggactgtttcactctttcagattttagctttcttatgtgatgtcttcttccaatttaaaagactcctcactgttttcttcctggtaggacagtctgggaggtaatagcaagactgccatggtggccactgtgagccccgctgcagataactatgacgaaaccctctcaaccctgaggtacgcagatcgagcaaagcacatcgtcaaccatgctgtggtgaatgaggatccgaatgctcggattatccgagatctgcgggaggaggtggagaagctccgggagcagctgaccaaggcagaggtaggaggagtactcgctaggagctcttttttctttttggctgttgaaaggattgtataggagagaataaagggagtaggaaaagtttgtctttccatttttgtcgagaccgctgacagactagaatgtgaagggagaaagagaaacagtagggaaatgtgatttaatttgtgcagaaaccgactgcgcttacagtcatggggagggaattggattcctcccctggttcgttagcctgcggtcagaacagaagacatcctctcctttacagctcaccccttcctgatttgagtgtgttatgtttgtagagcagcagtgtaactctcaggacagaagtagagaagtcgccagcgtggcgcagtgtccttctgtggcaggaaggagatgcttaggttctggagcgaggtttgaagatcacagtgtaggcatgaagtgccacactcagggcttgagctgtgcttagtgtttctgtcccagggacttgtctgtggagctggcaccatggccctttcctgtctcattactcttgttctggtagaaaggcaagaggctttgattgacatggtcacagcagttactgtaatcatgtttgggtttttttttttttccctactgaattttatcctgattttacagttctttaagaatcttggggctgaggtttctgtatttcctttatttacgtcaccatctggttgtttctctgtcttaagaccaagtgttattaacactgtccagtttgcaacatgttcacatctaacttacatagctttgagtaaattcttgaaatcaacattagacagagattgagatgcagcatgcttttgagtctaggtgtacaacctactaaaattaaaatcattagttctttacaagtagcttggaacgtgtagcttcttaaatgtaatgggatcttcacagtaggttggaggaaagttgtctttctggatgtgccctagttgctttggtaggtctgtagtcccccagcacaggctctatggaccttgaggactgccaccttgctggagtggtggagggctcagtgacaggtgacagtccccgccctttcccatccagctgattgttctttcccggcactgagcagttatgccatgaggtgacactttgtttttaggcaatgaaatctccagagctgaaagatcgtctggaagaatcggagaaactcatccaggaaatgactgtgacctgggaggagaaactaaggaaaactgaggagattgcgcaggtttgtgttgggggcgattggctatgggactaaggtggtggtggagattgaatttgagaccccatgcatgctaagcaagcaccccactactgagctatgtattttcattaagaattcatacatgcatacaatgtattttgatcataggcacctcccacttcttccccctaactctgttgttcccatactagtagatgtgtgatcattcactgggacatgactttccttccctcagcagccatcagctgtcactaatttagggtagagggattcctaagcccctacagcctccattctggaatgttgactgacttgatcctgtatggagtcaaccatagctccagtgaattcaggactacagtggccctgccgtgacaaggacactttctcctcgctccttcccaacccctggctctttcaatctttccatctctacttccttgatggaccctgatctcatcggggaggggttagaaatagatgtccatttttgccaagccctaatttttaacttttaaacttattttcatgttttaaatgtacactgttgtggagctggccagtgactctgctggccatgacctgagaggaggcattaaactctgtgtaattcatggtggcacaggaaggaatgtgagtgtgataagatgtgaaggagaagacggggcagcttgaaaagccttgtgagctttatagaggtgaccttcactctggcaaactggagctgttttatacattttggaaagaagagaaaaatgtgatcatctttacgtttctcaagaatactttatttataggtaacattgaaggataaagatatgatggtcttctgaggctgtcagatcctctgtgtcttgctgcctctgtgctgggaatcaccacttctctggtgtgtttgcaggagcggcaaaagcagcttgagagccttggcatatctcttcagacttctggaatcaaggttggggatgacaagtgcttcctggttaacctgaatgctgacccagctctgaatgaactcctggtgtactacttaaaggtgaatgtcctgccttcacagagctggagcactctgtgagatgtggagaactgtggtccttaccaattgcttttagttcatcaattggagtgaagggcagtcttgggttttggagatcagttattgttgcctgtctttgaatgatgtcattgaactacttttataaaaagaatattctgatattatttctagcaagttaaataatgtaccaccattttttaacataatttataggaagtactttcttaaacataagtggaaataattaaatttcttacttagcaacacttgataggagattggtatttctaatattttttaggaaaaatttaacagttaaaatatcaacctattaaaaaaaaacaaaaggagagcagatcacctagacactcggaggatcagagtatgaaatggaaagccaaacatagtacacactgaaaactgaaaaccccagagactgaagaaccaggcctttccacatcaaccatcagccaagagcatgccccatagacacgcctcaggcaatttgatggaggtatcttctcagttaagaggtttcctcttcccagagggctccagtttgcttcaagttgacaattgataaacaaacaaacaccaaccaagcagcacagcttctcattgaggaggtgctgggataattgcttagtgtcattttgacaattccccctttttactgagtgtattatatgatgtttggcaatgctgtgagttaaataatgtctttacacaaacacaaatgtgtgtggatgaagtgcagagtcaaggcttttctggttctttacactggaggaggttgcctctggccagcttcctgggttcatgtgaagattgaatatataggcaaattttatagacagaaacactgcacagttctaatgaattccctattctgcttctcccacatgctatttgggtgtgatgctcataaaaaacctttcctccattgagatggtgtctctctttggtctgacattcaccaattagtcaggattgcccagcaggtgagccccaggaaccctcttgtctctgccttcttaggacttaggtagcaagcatacctggagtttgtaagtgggttctagagtccaactcaagtcctcatgtttgcaagacaaagaatgttctctctctttcctagcccagcatcttaagttagaacagaggctgcaggtactatggacttcaggaatatgcacagtagaatgggactgaggcacactgacctaggttaccagagtctggaattagttctgtttcagagatgatacagtccaaattataggatgaacagaaaacgcttagttcaagaacgatctctttttagaaaatgccactatgtgggatgtgggaatctggaggctgcactttaagtcagtttgtgtggatgcgacttcagatgtgatgaccttacctctaggtgactctccccacatcatctctgatatccttcctgtgttcaggctataggagtttctcctctacaacatgcccctccatctatattctgctatacctcatactgtaagcttttggaatccttacacagatagagacacagtccctcactaactcaccctattttgcttaccttgtatcatcttaatttagctttaggtactcattagataaccttttatgtgggggtggggtaggggaggagcatgtttctgaaacttggtctcaggctgaccttgaattaacaagcttcctgtctcagcctctcagtgctaggattataggcctgtgcatacttaggagatagtctttgagaaatttcatcttttttctgctgttgcttacggcacacactgttgacttaaacattgagcattaaggagttcacatagttgagcctttgaagatagtgtctgggatcctagtgtacctccaaatcactatagcctcaagagagagactgagtttgtcctttaaaatataaactctccctggaactctacagtttgtgtctctagggatcagtgcctttctgatatttggtgctcagaatatttgttgaaaaaatgaatttctttttctaaaacggattatacttttgtctgtttgagttggtgtcttgtgttcctgctgacttgtaattcgctctgtttacaggtaccactgtagactgtgtcttttgttggttgtaccatctataagagtcttggataggttacagttcaaacagaggaaaatagcacttgcaaaacagaaactcagtaatgactggtttttaagtgtcctaagggctcagagcaggtagaaatcaggatatccctgccttgtacagtttctgtgctagttgtgatggatgtgcattaggtattttctctcctctgggtgacataaatatagaccagaccagactagattaaaagcaaataaattcaggtttattaggcgctgttaccggggaaggttcatctttcccaaaggatggggctagggaaatcttgaaccctggctaaggcaaggaggtttttagacttttgttgtgtaagccatgaactgggactgtacccaggtatgatcagatgctgggcacctgggcaggcacttaggcaggttggctgttatcagaatggagggttgcgttggctgccagggatacagaactaagcttttggagccattcctttcttcggttttttcagtgtgggtggggttgggagaaggaggcagacagggtttcccagcttatacaggggagagcagtgggctccagcaagaagctcctttccgtgtcagggtaggaattgacctgggcagcctgacggtaactacagttctgaagatatgacactaacagctgaggtcgagggattggagccatgattcagtggttaagatcactgttgctcttccagaggacttgggttcaatcccaagcactcacatggtaactcccaactgtctgcaactccagtccctcaggactgcataggctctgcctgcccatggtacacagacatacatgcacacaaaacacacatatgcttgaaaattaaagaaaaaatatcttaagaaaaaaagaaaaagactctgaaatgaggcccacatgtggaagtcgtcagctctctttcatccatgctgggtctggggattgaacttaggctgtcaggcttggcacaagtgcccttacctgctaagtcttcttgcagtccctattttcttctttctttctttctttctttctttctttctttctttctttctttctttctctctctctctctctctctctcttttttctgtctgtctgtcttcttctgtctgtctgtctgtctgtctcctgaaagagtctcaagtcgccatagccggctctgaggcagtcctcaaactcctgatccttctttctccacttacaggggccagctctgaaactgtagtttccagaccttattttgatatattattgatatatagcttaaactctgagagtgatattaaatatttagaatcaagatggtaacaaatagcaaatgtaaacagacgtggatgcaaacttttatcttgagcttaagtaagacagtatgactggagggatattgctccttttaaggaattagagctcatgtaatgaacttcgggggtcaccatccatttgctttcagagtgcatggctgaggccgctgagtgaagctggtcttagcagtattcacaatgaactctgcttctttcttaggagcacacgctgatagggtcggccaattctcaggacatccagctctgcgggatgggcatcctccctgagcacggcatcatagacatcacgcccgagggccaggttgtgctgactcctcagaagaacaccaggtaacatgcctaagttagtgtgaatacatgagctgcagggggactgagggacattggcctgcttttattttcagccttctaaagtcacactgtcacatgcaacaccctttctatttaatcttagcatctatcatattcccactgcccacccccacgttgttattttaaaaaaaagatttctttactttttaattatgtgtatgtatatatgtgtgtattatgtgtatgtatatggggatatgcatatgggtgcagatggttaaggaggccaaaggggtcagattccgtgaagctggagttataggtggttgtgaccacaagtgattataagccacctgatgtgggtactgggaatcgaactcaggtcttctggaagagcaatatatattcttagccactccagctccttcactgtatctttatgtgaaacttgtctcagctgtttccatttcctgccctgctggtaggctcacctttggtttgggtagaagtcactagacttctcttctgctctgccattcttttaacttgtcacgtcccatttgacccttgggagttacctgttagctacactttaaatgatagaagtaattccccagccctctctcatacagtcaaagcccagttctacccaggttatcctgacaccccatcattgccacaagcagtcattccatatactgtccccaagtctgaaagacaaatctaaggagttcagcttaggataacttcccagtggcctttgggtggaggatatggacaatagttttccagaacttgaagttcttattaaagatgcacttttgctgccagttgttctctttggcaatgggctccctctttttactgctcaccaggaagactgaaggctgctttgtgtgtgtcagggcatctttggcataaagcagtggcactgcctggaaacttgtcatcttcttatcagttgtgatagtaaaggtgttctatgcttaggggtcagggtttactcagggtttggacagtgccatactgcttggtcctaggacagtccagtggaacatttctctctgatgagactgtgtgtgcagcttcagcaggccagctcaagggttatgagtgtcagcacaggggacaggctgctgatcagtgtgatctatatgagttttagacaggacagcagtcagactcataactggcatagtctatatgaatgtcagctccacctcctgtgtttctttcttaactcattgtgtttgaagaatggtaccataaagccttaggtttgagcttgtgctttgaataaccacacagacagaagcaaaagggtcagttttagtgtttatgaaatcacacggggagcaaggtttgaatggaaatacgaacttgtgtgcttggaaatgcgtaggatatcatggcggcataaagcgaggtaagagcgaagctttgtcagctgtggtgcctagtactgaggaagctgaggcaaaaggatcatgagctcaaggcttatatagtgagagcctgtctcaacaaaccaaacaaggtttatagctttacagagcttaaagaaactcaaatactgagttcagcaggctctgcagaggaaatggaatccagagtagactaggattgtgaagaagactctagaggctggagagggtgggatcttgtctgctgatgaagcaataaacacttcccccgtggaggaagagttgatcatgtttagaaaaagaaatctagtttcagaggagctgagtttcactggaagagagaaggaggagaaacagaggatgtccttgtgaaagaaagggcaggccttccatgtcatgttaaggaatttgtacttgacggcccacttgtcagcctgtgagtcacttggcaggaccgaggcgtggggctggtatcctgagaatatgcacagatgtagtttgctgcttgtttcctgtgcttccaaattccttccgtgctagtgttctacccaccacgtcttctgtgggagtgtgctatggaactaagcagcgtggctgggaggatgtgaaggtggtctctgccatgcgcagaattccctgcaggtctcatgttgcatccctggtctctgcctctgtttctagactctggccacttggctgactctttatccagctgggctggctgggctttgtttcattgctcagtctttcagtattatctgtcttggctccatatttactccttactgtctaaggtggtcagagttttgagaaacagattgattctgacagtgtcataagtgaatatgtagaatgtttaagactcgaatagtaatgcttaatgatgtcatcagtatctgaggtaagtgagtgaggaaagatgtaactacagatatttacgttcaccaaaggcaagttttctttgaggaaatcaagggcagtggaagcagagagtgtggtaatcctgttcatgctgtcttctttcccccacagaacatttgtcaatgggtcttctgtctccagccccatccagctgcaccatggggacaggatactgtggggaaacaaccatttcttcaggtatgacatagctcacatccctgaaaaatgggagcccattgaaggtcctgttctgaaacagaagagtcattgtaagtgtgaacatcgtaaaatgacacctcattatgtgtgttcatgttcgtatgattatgttgtatacatagcttatgtgtttgttcatatatatgtgaaccctgggggcttaaaatgtcaagtctcatcatcaaaagttctaagcttttgtacatttctttatttttcttcccagtgtaagatcccctaccccccaaaaaaatctggcatcagaatgacttaatgtttttttctgatgggtttgctctctctgtcatcagccgtctatctgtacacactgctgtttttccttctgtctgaaagcagtagtgaaaagctagatgtagtttccttctcccaaaaggaagctggtggtttctttcagctttgagtttcagcacaccagacactgatggctttaagcaggtcgtatattctgagacagaatgaaaagtcctggaatggtggctgctagagtgagctgtgcccctcagaaagaccatggctgtggccaaccgttttcttggcatttcccccatggcttagctgtgcccctgcagctgtggaagagccattcagctcacagggacaaaagggctgcaaaggatgtagcattagccttacagtcctctcgtcagagcactagaagtcttcctcttagttcccttgggtggactctgtgcagtagctgcaagagaggctgcaaaggaaggttctcacctgtgaccacaacactgtttcccaaacgtggctgctgttgtgttggtgaggcagactggccactgtagaattcaaaacctggtctcttttctttgtccttggccaatgtgctttagctgtcaaatggactttcctcataactgtcgctgatctttacctgaatgctacttgctgtttgactttagaggaaaggttagatggatgcaagcttatggggaatgcttttctgcttttcgcttttcacactaaagcattgctaactggtcttgaagcccctcagatgttgctgtatggcttttgtgtatactgtggtgttttacttctaaagtctctggaaacttgttctccatcctgaggtggtcctcaggttttctgtatcacccagcttgcaaaagctgtgtggactctgctgtaaccacatgtacacacatggatgtcttatgtctactactagaatttgaagctgtgccattcccttggcctcgagcagatgccagtatgtaaggaatagaatcagtaagtatccctgttaatttaaaagtaatgtctcttacttcactccaagactcaatctgccaaaaaagaaaaagaaagcagagcgagaggacgaggaccgtgaggcatccctgaaaaacgacagtagttctgagcagctggatgccgacggcgactcctccagtgaggtgtccagcgagatcaacttcaactttgagtatgcacagatggaggtgaccatgaaggctctgggcagcaatggtgagcacaggttgtgcttgcaggaggggctgagtgtgtttctgatgatgccttccccggatgacctctgaactctgtgcccttggctataattgattatatttgcagaacattcactttctctgctgcgatggacaaatcactgcaaacttgtcctcatgagtggggtttcctaggtttcaagtgtggctgccattggcttctacttatatttctggagcaattgccacaacctaagtttcacgcagaacatattttagccctgtcttttttctgcagacagtgtgaagtttatctaaagtgtgtaacacaagtcactggcagtaagaaagccagattgtctcagatggtattgggttatggcagtttgaatgatggctgtctgaagtatatcattctttcccattcattatgcttctttttcttcacacgtgttcagacccaatgcagtccatactgagcagcctagaacagcagcatgaggaggagaagcggtctgctctggagcgccagaggctcatgtacgaacacgaactggaacagcttcgaagaaggctgtctcctgagaggcagaactgccgcggtgtggaccggctctccttccactcgcccagtgcccagcagcgcttgaaacagtgggctgaagagaggtaggtgtgcaggacggcctgatttgggtagctcttgtccccctaccagggaggttctccgtggggatgctggatgatgcctgggaagaagaacatttctgagagtgtaagcgccaggaaacacttaccggtctccctcctttcctcctcccccttgcttcttcccacttctcccttctctttacttcctctccctttttcctctttcacttttctttttcttttttgttattttgcaacagtcttatatacatgtataagttggctttgaaatcactctgtagcctagactggcctggaacttagaatcctcctgcctcagcactcggagtactgtgattacaggtctctgcttatgtgctgcctctctgtcttttctcttctctctgtgtctctttaacagcaccaaggattgaacccatggcttagagcatggtaggcaggcactctaccaccacactgcagtctagctcttatttttcatttttggaaagatgggaattgccagtagattcacgtttctttaaaactgcccatgttatctgcgtttgtgatgcacgcccctaatcctagcactcagaagactgaggcaggcagatctctgcaagttcaagaccaccctggtctcagggaaagttccagttcagccagggctacatagagagaacctgtctcaagaaaaccatcaccaacaaaagaccattttagatactgcccattttcagactgtgtggcctttggctttgaataaagactactttatcactgtatcatgctttagattctgaaggttggtagatttttctttttaaagggggaaagaaagttgatatctggactggtgaggtgaggtaggtacagcatgatgccgatatgatggggagtaccagcttgatctcttatggcctaattagcatggcactaaatgctacctcccatggttcgagagggcagcactaacctcctgttactctgatctgcatacaggcatcatccctgtgtgctggaaactgacaggcatgttgagtctgcagtcctactgcgaggatcttgacttgatcaggatgctttgttacatatgcagttgagtttgcagagtcctgcacctacctgtggccagcttgctgtgcaaggaatgctgtgcttgtgacatggtccagagaccagtgtgtgcatggggcggtgtcactaccctgttcctgtatgcagaagagagttgtgaatgtgaccatggtctcccatatgctgttttgtgtgtgattgctacctgcctctctaccagtcctgtttttattttatcttaaagagaagcaacattgaataacagcttgatgaggctgagggagcagattgtaaaggccaacctgctggttcgggaagctagttacatcgcagaagagttggataaaagaaccgagtataaagttaccctccagattccaacctccagtctggatgccaataggaaggtgaggtgtccatcctctacacagcagggataccatcccagaggctgtactgggctctaccctcgtgatgggattagtgggaagctatttccttctgttttctgagttttctgtgtctgtgtgtgtgcatgcttgtgtctgttagctgctaagcatgtactccttgctccttttgggccaatcctttcttcatacctgctttttgttgttatttgagacaaggcctcaaatgcaaggcaatcctcctgcctcagactcctaagttctgggagtataggtatgtgctaccacaccttcttggatttttaaattataatttataatagtttaggctggccttgaactccccacatcctcctgcctcagccccctgagtgaagtattataagtgtttccactacactggaaacatcactggtctagaaagagtgctgcagtggcacttagtacttatgcagtgttggactggctctccccgattgtatgcccttttagttgtttggactaggaaacttatgacatgttttgccctcaaatgagtgactggggcaccctagataatttactcttgaaaacattccatgcggctactcttaaaagtttacctttctttctttctttttttctttttttaagatttatttatttattttatgtatgtaagtacattgtagctgtacagatggttgtgagccttcatgtggttatcgggaattgaatttttagggcctctgcttgctctggtgggccctgctcactcagtccctgcttgctctggcccaaatatttattattatatataagtacactgtagctgacttcagaagcaccagaagagggcatcagatttcattaaggatggttgtgagccaccatgtggttgctgggatttgaacctaggatctttggaaaagcagtcagtgctcttatccgctgagccaattctccagcccccttacggtttttgttttgtttttaagatttgttttcttaagtattcaggtgctttgtttgtatgtatgcctgcagaccagaaaaagtcatcagcttgtaagctgccatgtggttgctgggaagtgaacctagaacctctggaagaacagccagtgctcttaaccgctgagtcatctctccaacccagagtttactttcttagcattaaaattctattcatttaaacaaacaaacaaacaaacaaacatcatcagtttggggatgtttggggcaggatggctcattgggtgccttccactgagcttgactatctgagtttaatctacatgttggaaggggaatgccagccagctcctgcaagatgacctctgtcctatggtgtgcacaagcaaacacacagggtggggggttatatagtaaaaaaaaaagaaaacaaaacccacaattttgaaaaagtttgttagtttggagtgatggaattactcctgtaattccagcctttaggaagtagaggcagcaaagaagagaggaagatcaggagattgaggctagcctgggctacatgagatcctgtttcaaaagaaagaaaaaggacaaagttttataactatctcagctaactttgccttgttgacatctcctgtctgcagcgaggctctctcctcagtgaacctgccatccaggtgagaagaaagggcaaaggaaagcagatttggtctttggaaaagctggaaaacaggcttttggatatgagagacctctaccaggagtggaaggagtgtgaagaagacagcccggtaagcagctgaggaaccccttccctggtagtctgagaaggagccataccatctgcccagctgtgggacactgcatgctttcccaagattgtttctagttttaaagtaaaatttctgttaatccttaagttgttgagctaagtaagtcgttcaatagttgggcatgtgcataatttcgtttgtatctcctcttctctttggattctagcagaatttcccctttccatctgtcagtgagtgtgtctgtctcaggttgctctggggttctctttgaggtaggggccaggccttctcaacacactgcagacgattactcctcagtcgatgggttcacactcatcagtgcaccctggtgttcgcactgctaggaaggtccctgaaggcattgagatcccagagtaagtgtccagctctgtcctggtgctgctcctctgccgacacgtttcctcgttcccttcagccatgcagttgtacgtgcttaaaacaaacacatgtagcttgttgtttttgtctacaagtttcttttggacacggtctctctgtggcccagcttgttttgaactcaggctctttctgactcagcctcctaggcgggatcatggtggaacactactacagcctgctacctataccagtgttttcaatcctgttgggcccgtttccacttggagttgctttctttcttagctttttcttttatttatttatttatttttagattatactcaatagaaatggctttttatggttaggtaatatttttgcctaaatttgtaattttcttcagtattcctctccttctttgacttagagataggtataaaaatgaatgccaaaaaagttcagctgctgctgttgctgtcctaatttgcagtagtgtatttagcaactcaggatcttcttgcctaaaagatcagtgaagaggttagtgctctcagttgctgcttttcagtccctgaggcaggagaatctctgtgaattgaagacagctgtggcttgtatagtgatttccagattaaccaatgtcatgcagtgagacccagtctcaaaaaaaaaaaaaaaaaaaaaaaaaaatcaggatataatggtaaaagttgttgttcagatgattctttttttttcccctcttttgaatttgtatgtttggaatttcttttaggttagccggtcctacttcaagcgtgctgacccattctatgatgagcaggaaaaccatagtctcatcggtgtggccaatgtcttcctggagaccctgttttatgacgtgaagttacagtatgctgtgccgatcatcaaccagaagggagaggttggctatcactgcctcagtcagcagacagctcaggggacagtgaggggtactgacaggacacttgttgttaatatctttgttttaaaccagtcctaactagtgataaatatttgtctcatgggcaccctgggtttccattgggctgtaaggaggactttcctgttttactcagattgcaaagcagctgttagaaactcacctttagtgcctcacacattgttaccctctggctttatcaaggaagacaggtcctggcaggccgaaagaactcaacccagaaaccagcgtttgctttgcttccttcttcaggtggcaggccggctgcatgtggaggtgatgcgactcagtggggctattggggagaggattgcaggaggagacgatcctacagaggtcagctctgaaaaggaagcccaggagaacaggctggtctgcatggtaagccaaagacctcgtctagaaggagcccaggtgggaccatcagtgagattgtaggttatacaataaactcattttcaacaacttataaatgcccgtcttcagagaagtcttttagtgttcagtatcttggggattgtgttttgacacacttctgggaagactcactcagcacttccagtactttttctctgtgggcttggaccagtcacctcttctctgccactcattgtcagggtgagtgagctgcttacctgtccagcccgtgtgggttttctattaccggagctctccagctctgcctctctatggtcctgtcccttagccatttcattttcacctggcctagcttctctgtacctccctggttactcagtgcctctgcatgtgccattcaagccaacagtttccagccctttctatctggtcttcctgtgcatgttgttcatggcaaaccgtgagtgttatgtcaaaaagctatgtcaggtaccagggtagagatgaaagtgccaggttcctgctgtccagtagctagagatatgtgagtatgagcagaagcctctagcgcaagatccattgctgtgatactgcaggtaccagatgtgcctgtgtacagagaagcttgaattcagatgataggtgctgagggagactgaggaatattctgggagaatgagactgtaagaaagggtgtcaggtagcaccagatttacaggcgctgtggtgtttcctggtgaataacatggagggtctcatgttctctggcacctgctcctcttccctctttatgctgcagtccttgtctgaatctccagatgccccctagtgggccagtgctgctagtggttcagaatcctgacaggatttggtgacaaaatcagcaagagtctttagtttaaaggatatgactaaaagatctgtgaagaagcaagcctaggtcagctcttagttctaaactcatcctaggtcaagcttttgctcagtaagtattctacagttgaggttgtcgaaaggagtaagttagcacacagccataggaagggggaagctggtgctgctgagagctgagctgctttctgcaactgtctgcatgaggaggaggcctgcagtgctctcatcaacagtctcgctcttgctcatttgtacttggcttcacaacctcctccttgaggccatgtgcttgctcatcagaggttgagatgtaagttttttggctctatgtggccatttctgagatgacagacagtgattacatctctgggaggtcggctgtcacagtgtaaaatatgcctggcagtggtggcatacagccttatcccaggatttgggaggcagaggctggtggatctcagagtttgatgccagcctggtctacagagtgagttttagggcagccagagctatgtggagctaccctgtcgcaaaaaagaggaagaatggaaatttgtcactgaaaaaaatgtgtgtctgagataacatggctatttttaacaaatgttaagatttaatggaaaataggaagcatgaaagcaggaaggaaagtggtgcttccctgcccacctgctccacagtgtccagccgcttagcgtggctcggtcatgcatgctaccccaccctgacccctaccccaggagcaccttgatgccaccctcgtatcagacttcacctggaagcagcatgtggcttcaaaatatgggtacttaaagaaagaggatcatctgggtgtggtgacacacgctttgatcccagcacgggaggcagaagcaggcagatcttcgtgatttctagggcagccagggctacacagagaaaccctgtcttccccagagtgttgagttcagttcggggcaccttccctgttctgttaattaagctttgggacattgacactggctgaggaaaaaaaaagattgaatagagagtattactctattcatatacttcctagcctacacccaannnnnnnnnnnnnnnnnnnnnnnnnnnnnnnnnnnnnnnnnnnnnnnnagagagagagagagagagagagagagagagagagagagagagagagagagagagagagagaagccctgtcttgaaaaaccaaagaaataaaaaataggaaaaaaatttaaaaatcagtcaatcaaaatagtaattcctttaaggccataagccgtgtagtcagcgttcttaagtgtctttggtgggattacccaggtttcttttatgtccagattctctctctcaccttgagatctgcttgtcgtgcctgtgctgtcctgttgttctgttcattgtcattgcatgtcatgctcagcggtgctaggcccaggttgggagtagcaaggcataatgtaccatagagtaggaaagcaagagtgtgatatgggtggtggtgtgtttttatttcaaaattactggtttgtaaagttgtcttcatgtcataatgaactcttagatttaagactttgactcctgggtattcattacttttatcaaagctccaatgttcctaaatttgagtggtggcagtcccttccgttgccccacgaacagtagacattttgcctcatcttgtccacatttccttttctggacccagaatccaccatttcttaagaagcagtgttcatttaagttagacatacttagagaccaagccctagctgtagaggctcattgtgtaaaaagacaagggcagataagacatcacacggagagaagctcctgtggaaagtcaaacgtggggatagtttcgattccatgagtgagggagatgattggccctacagacatctgcgtttgttttcccatgatgaaagattatgcccatatttctgttttcagaaacattgcattgaaagctccaggtgtcatcaattcctgccagttcactttggctctttcatgtagagctgcaaattgagcgctatcctgacaccttgtggtgatttcaatttttgttgtaaaaaattaaaaaacaacaacaaaaaaaccaaccaaaccaaaccaacaacaaaaagctcagcctatgtgcttggtatgttttcctcattcatggtctttattcctggcagtcttaaccctcaggagctcctgtagagggcaggtcagcaaatctgatcttgccttttgtttattccagccctagactgaggttcatttctgtaggagctaactgctttcatatggaatgccatcacaaatcagcatgcgtgttacgtctgctcagcagcacctggcccagccaacattcatctctctgctttcagtactgaggcctcacctctgtaaaggcagacataaatctctgcttggagaaagctaagcttaagcctttaatttacaccacacacagactagtaagtgacaagggtccttttaggaccttgtgatcaccctcacagcacattgcctcttcaaagatatataatagatattttataaatatttattttattttataaaggtatataataataaataaacaaacatgtagagagtctgaaaatatttcctggaaagtgtatcctagaatactgatggtcagtttgatatggagagagaaaatacagcttgtcagagcctagctgcatgggtggttcaagcttgttgatataacaggaagaaatgacatgaaatgacgttgatgttcattgttgatctgttttgtctatgttatacaggaaatctgcttttcaggatttttgtgtcctcagagtccctaaatgccacatttatagttgaggttgtataactgtgagaacatatacaccacacagtccagtttattcttactaaatttatttactagatatgaagtgactcagatgacataggagaagcgagcagctggaaagcgttaactttctgaccagctcagttttgtgaaaatcctcctggtcagactagatggcccagattaaaagtggatttttctccctcaaagatccagatgagaagtgagtcttcccacttcaaatgatttattaaggaaaataaaatgccttacaggtgtacccagccattttggttttagttagttccagatgcagtcaagttggcaatgaggagtagccagcacatataccattagaatgtagtgtaactaaaaattctagaatttacttcataattctgtggttttaacgccatcacaagctatcacagaaactccaaattgagatccatatactgctgcgaaaagtatgaagagtgttaggctgctttgagatctggcatgggcagctagaggcattgctcagtggttaagagcatttgctgctcttccagaggaccttggtgctgtgtccaccagctccttataccatctcacaactgcttgtaactccagctccaaggggttcaatgctctcttctgagggaatctgcccacacatcacattcacttatacagacacacaaggtgtgtgtgtgtgtgtgtgtgtgtgtgtgtgtgtaagtggggctggagagatggctgagtggttaagagtacttgctgttctttaaaggactggaggtcagtttctagaatccatgtcaggcagctcacgacttcctgttattccatcagatcagatactttcttttggacttcacaagaacctgcactcacaggcatacactcacacacagtacacacatccatataactaaaataataaaagtcattttaaaaaagggctcagatgcagacattgtctctggggtcttggtcccattgggcatgtgtttgtggccatactttgtaatcagagactctggggtccttcatccagagtttcctttgagtgtttgctggcattcttcaaggagagggtatcagtgtgtcagtgtagaaaacagaaactctgtggtcttcacctcctctgttctcccctccgcatgctcatagaaattcccaataggagtccaataaaaacaaagtgataggcttgtagcacacaatgtgtgctgtttcagagctgagctcctccctctgcttaacttatgataaagtaagcgctgtcctctcctgaaggtttgctgcttactcaggcagacctggctttgtgctttgctcactgtgctgaatggctttgtgctcccttaggaaatgctgggtgatgttgattcccagaaccaccttctgcagaaatgatgacggtatcctacattctgacaaactagcattcaaatgctcttgtcagcttacccagcattcactctagtgtctgattgttgtcaccctgtgtcaggcctgtgtccaagtcctgggcccacactgaatgacacatgcctcacatagctgaatggttatgacagccagggcaggacctgactccttgaggcctactggttgagacttgagccttctttcctttcaggttaaaatactccaagccacagggttgccgcagcatctgtgtcactttgtcttctgcaaatatgacttctgggatcagcaggagccagtgaccgttgcccctgaagtggatacgtcttcgtctcccaccagcaagcagccacagtgtatggttgtgttcgatcactgcagtgtgagttctcttcagtctgccttggtgttcaagttattcatgtaaacacagctaaagagcgagggctgtgacttggctagttgtgctagtgttcgtgttggagtattttctagtcgtagaccagagtgttagttcatacagcatgtccacagtcaagagttaacttctgttcaatgaaaaaaaaagcttgtgtacatgtatgtatgagcattcttctccagagggagtctgtttcataaaaaggttaaaaaacctttaaaaggaaggtagtaacaagactagagaccaccctgctgggcacccctgctctgccatgttggtttggttactcttttggctggtcctgacctgttattattaatgataatttttttttttttgcgggctgaataaactaaaagtagtgactatcactttgcttttggctggatactatcagagcttggactggctttcgctatttttgacccacaacaaaaatgaaaacaggctctcaaaacattgctaacaaaacaaaataatttgctatttttatagatgagtctttcaaagtgagaagctttaaatttcaaagtaatagctatatttgtgtattttttattttaaaagattgattttttttttttgaatcatgtgtttctttgtgtgtgtgtgtgtgttgtgcacttgagtccaggtgcccgcagaggcaagtggcacagtctcctggacctggagtcagacaggtggttgtgagtcacctgaagtggatcctctggaagggcagtgcgtggagccatctctccagtcctttcagggggtagtctgtgttcacatcgcagttaatgaccatctgtcctctgaggagagtacgccactgtttctgtgtttccttcctggtatcattaaggatgtgacagacacctgatttaagtggttgaaagaccaagcaagtgtgtgctgctctgtaatgagctgttgtgtttcaggagttcagtgttaacatcacagaagacttcattgaatatctctcagaaggggccctagccattgaagtatatggacataaaatgaatgatccccggaaaaacccagccctgtgggacttggggatcatccaagcaaaaacaaggagtcttcgggacaggtgaatcttttaaaaataattatctaaatcattaattaatttttaatatagcaatgctcagtctgcatgtacatctgtatgccagaagagggcatcagatccttttacagacggtcttgagcctccatggggttgttgggattgaatgcaggacctctggaagagcagccagtgctcttaaccactgaggcacctcaccggaccagacaggtgaattttttgatatccactggatttccatttctagatttaaaaatactgctggaaatgaccatcatttatttttacattattttgctttcccttgtgtatgtgtggtatgtacatgtgtgcatacatattttcatgagtggccgtgtgggtgtgtgctagtgcctgtgggagtcaaaattgacatggaatgttttcttcaatcactcttcaccttatttattgaggcacaaggcccctcattcaaactcagagctcacttagtaggtctagtctggttagccagcttgctctggggatcctgtgtctgcatgctgtaattataggcaggcgttggtccatccagcagttgtgtgtgttttagactctagtgggtcctcatgcttctgcagcaaacactttaactattgaatcatgaccattattttatgaattaatggccaccttttcccaagtatcaccactctagggctgtagtctaccagtaaaatttccttagtgcaccaaactttatagaacagtggaagaaagtgtgtgcgtatttaagaagcaacagtgaaatgaagttcaggagacaggccatttatcacagtgacttttgctgataagccagccatggagagaaggatggcaatctgctgtagcattcaagttgacactgcctttagttcacaggtgtttgttgatggtcacttgtttgattttgtgctgctgatgtttgaacccagggcctcttgcatgctaagcaaatgctgcacagttctgcatccctagccctttccagttttgagtgccattagtgatgagagaaggtagctcatttgaaggcataagcaatttcaaagggaatgactcaaggaggcgatgtttttgctgccatctaattatagatgagaaccacattttctcttttagcaaatcctaaattagaaggtgagatattttttccccttaattttcttattaattgacctgagagcacaagtcatggatgacaccttcctatgtgaagaccatcctgtatttggcttctgagtactgactagagtatttcaatcattgtataaccattttcaaatgtatttgtcatgatacacccccacccttgagtgttctcccccgcctctgtctgtctgtgtgcacatgcatgcatgtttatgtggatttgaactctgagctgttgttctaacttcacattataattgtcattttctaaacaaaataaaagtgcaagtgaggtgtagctcagtggtagagaatttacttagcacatgaaggccacctgaatttagtcctcaaaactggaaacaaaggaaaaacaaagagccatgctgggttgatgctgtcagtttgtctttcgggtcacattatttgtcattgtgtgctgtacatttctttctgatctaaagatcattgcactgggcttctttgtttacagtcattctcactgttaagactagaaggtcctaagctgtccgtattgaagtagagaggcatggattgggggtttagaggtaactactcagttggcagggggcttacctagcatgcatgaagccctgggtttggttcacagtactgcataaattgagtatgttggcatacacttggaatctcagaagtatgaggcaggaatattgaaagttaaagggtacctttgactgtatagtgagcttgagcacaacctgctatatatgaaaccctgcctaaaaaagaagtgtaatttcttaagacctgcatatatttcctaggtggagtgaagtcaccagaaagttggaattctgggttcagatcttggaacagaatgagaatggtgattactgtccggtggaagtaattgctgcaaaagatgtccccacaggagggatcttccagctccgacaggtaccagcattgtgacatcatagtaaattcctcgacactcgatggcttatagtggattcttttgaacagaacttttttaaaaaagacttttttatttatttattttatgtatatgagtacactgtggctgtcttcagtcacaccagaagagggcatcagatcccatcatagatagttgtgagccaccatgtggttgctgggaattgaactcaggacctttagaagagcagtcagtgctcttaaccgatgagccatctctccagcccctgaacagaacttttaataataatgatgatggtcaagcccatttctctgaaatagttaaatgtattggcatttgtttatctattgtgtatgtttgtggataggtaatgccactgtgcacatgtagaagtcagaggacaacttgtgagacttggttttctcttttccttcaacatatagtcctggggtttgaaatcagggtgttaggtgatagtggaaaggtcctttatgtagccatctccctgacctctttctaggttttcattttcaatcccatttttttatataaaaatattctcttatgtcataggcattttcttctattgttaaaagtctcactacttaatgatgttttaaaagtagtttctaaaagggttaaaaataagccttttgaaaaatatttttattattttgtatatgtctgtatatgtgtgagtttgtatgccacaggatgcagtgcaagtcagaggataacttggaaaagtgagttctctctgctgtttgggccttgacagttgaactcgggtcattaggcttgaagcaagcacctttactggctgagccttcttgttgggttgaaaacgagaagtgttccaggaaaacttagtattgaggagtgggacttaaggcagacataccaggcagcttcatgtgctcatgaacatgagttcaaagctgcacagagagagagcactgaatatgcaggggaggactaccggctcactgctggccctccaggggcctagcagtgtacttgtgagctccttcacctggaacacggagaaggggttagcaccagtgttgtgggtttgcatgagaattaggagagtgttgtataattatagccctgtgcttgacacatggcaggagtgtgtgtggctgagtccatgcaatgtagactatggatccctcactgatcgcccaggtgagtggccatctgtcagtctgtgctgctgaccaacagtgacagggcaggtctccatatgtaattaatctgttcagtcttcactgtgaaggttttctgtgtatgtccacataccctcctcttgctgatccttccttttcccaaaccgtcttctcttctgctttcatgtcacatatcatagacagtggaaaacctcagagtaatcggtacacataattggaagtattctttttacgacactgtgcctcatttcaaaaatctagtaggctgttctctagcgttttcatactttaagatataacactagggggctggagagatggctcagtgattaagaatactttcttctctgccagctctcaagtttgattcccagcgcccaggtcacatggctcccaatcactagtaactccatccctaggctgtctgtgggccctccatcatgacatctattcacaaaggcacacacacacacataaacaaaaagaataaatctttaaaaacccatattattagaattgctttcgaaatgaatgttaaaagcattcagagaaaaacatgaatggctgaaggaaagagtgtccacttaaatatttaaatttcagattaatgtagaaggtggaagcaaatgagtttcttctgatgccttcatccacaggtgagagacttagagcaaaagggaaggattctcagctacagtattatgcagagacatggcactgtagggagacacagacgaatttctgagggtgaagatctttccctaggcgttttccttggcggccttaggaagtcatcttaggaagccaggctcggtgccttttctgaagcttactgtcagctggatgtgtcagtgtcagttgtacctcagacccttgacggagagtgtccagagatgccaggaaggcttcagcgaaggacgagcatcctcacctcagtgctgagaaagacactccagcttggtaaagggttcctctctcaggtgacagcgtaaggactcaaggtggggctctgcttgagcgaaggcccttgtaggagggaagtgagatgatagaggctgtcacagaagcagggtaagggatgtttgtaaccatggtgagatgctgcaggaacagaggggaccacaatagcaggaatgggattcagagtagtggctgagagaatgtcccaatgtgttctctgagacagtaagccttcctctgtcttccatattatgtttcaaatattcaggataggctaaagagacagaaggcagctacctgaaatgatgaagtggccttagacttaataaagtgggtaaaggtgcttgccacataagcctgaagacccacattcagtctctgggaccctagtgaagatgaaaggtgagaagtgactgtaaagttgtcatctgacctgcagtgtggaccatggcatgttcaccctcatatgcacacacacaagggtaataataataacaatgaaataaaacatgtttactgagtgacttttcccataaaatatcagatgcatactccttggaaatgttcagatcagtgactgtccatcagatgttgttagtccgagcctgtggctgcttgagtggatgttcctggctgtgcaaaactcttgggagcttaatttctagatgagaggaaaagtaattgacttaaaattggatgtttaagttctgttgcttagatgctcttctctgttcctaccatgcttggggataccaggaacccttcccagtgtctgcctaagtgtgcggagtcacagggcttgttctggacacccaagcagggtcagttctgatcacatttgcagcttgatttctttaattctgtgaaaagggcattgtatacaggtcagttcttatcttttttgttatttgtttgtattgattgattgattgattgattgattgattgtttcaggatagggtttctctttgtatccctggctgatctggacttgctctgtagatcaggctggcctagaatgcacagaaatttgcctgtctctgcctccctagggatgggatgaaaggtgtgcatcactactgcctggcagttcttatctttaaaataagactgaatcccaactttggtaccctgtgctttaacatatgtaggctgcaagtgtttttctgcaccagttgcttagtgacagctataggacatcacactttaaacagttgttcacattccatataggtctactaccttgttcttcatggcacttcagagtacttatccatgtacttgattgtccagttgctggggcaaaggtgacttacagtttagcccttgaccaagcttggccagtttaaatccctgtcccacaggattgacattatttgtttcataaccatgatctctgttggaagtaacttctcacttagtaggttgaaataaaagctctcatggttgccttgtctggaagttgccctttttcagtctaggtctcattaggtagccccagaactctatgcagcccaggataacctcaagcatggagatctccctgccaatttctggagtactaaagttacagtgtgaaccaccacacctggctcagttcaacactttttattagacactgtttgcatttcctttgcttgtaagttttcatttacctggtgttttgtcacataccagcaccagaattttccaggctgagccaggaggattgccttgaattcaaaattaggccagtgtaggtaggccagagctacatagctacatagcaaagctatatagcaagcccctattgttcattaaaataattttcttttagtttctaattatttaggaattatagaaaaatatgctcattttgattttctgtctatttgaaagaaaattcattttcctgactaggttagaatgtatgctttagtacttaacagttatgaagtagatgaaagccaattgcatttttctatatcagcctataggggtctctctaaaccagagttttgaaactcatgaagctgattttgtgtgtgtttgtgtatatgttcccaaatctctgtgctgcaggggcagtctcggcgagttcaagttgaagtgaagtctgtgcaggagtcaggaactttaccactgatggaagagtgcatattgtcagttggcattgggtgtgtgaaagttaggccactccggtcccctaagatccacgagaatgtccatgtaagtttctgggcctgctctgtgctttttgaaaggcaacagcagagcagaatcgtttgagactgccacccctgccccaccattggtgtctccttcagtgcactgtcttgacaagagcacctgtactaggctgttactatgctttgtcctgttgtgtggtgaactgagagttaaaacctctcagcctggcaaaccaccaagcctagcagtgattaacttcctcccatggcccacccctctaaagaacccccactggctggtaaagactctttgccagcgggtgtttgatttcccctggagtagggggtggtaagcccagcagggagatcattgtactgagtctgaaaaggtcaggggagcctcttcactcccccctagaagctccaagtcttaccagcttcgacatgggatggctggtaaggctgggtgggaggccaaggtgtgatgtatcaattagacaagaagacaggaactgggggagaacatagtggttgtggttggaggcctgatgtgggggtaaataattgttttggttctacataatacgttgttttcttttaggaggaagaggaggacatggacagctaccaggtaattgagcacctgttggcctcatcaaatcagcttgattcaagtacttaattacacaggccaggatctttctgcactgctacttgataattaaacaattctgcttttcccaaaaagtcaaacaaagtatggaaaggctgtgtattgtaggggttcatgggctaggattaggacaccctgtgacaaagtcctttcttaatcagggacactgcattggcctatttacaaagccacctcccagctaccttgcctgggattcccttgagctgagtcacccatgggcttagggaatatatgggtgtgtgcgcgcacatgcacgtgcacatctatttctgcgtcttacatgtgtgagactaggtcaccctgaatgcccccttccttgagctgtccattagttttggaggttttgtttctctgtcgtttcttttcctaatgtgccagattttgtttatgtctgtgaagttgcatcttgttgtcatcatttagaactgcccaggctctttggagcctgattatgtcatctgctgtagtcactctcctggctttgcatcatcctaatttgatagaaatgtctgctttcctataagtcactgattaaaagaaaaaaaggcaagagaaaaacctcaccatatcagctgggttgaactcagagtatgaactaagagaatggagccttcttttaaacagacattatcccattcatcactgctttctggatgtggtatttgaggtccctgtgattgcacttagaggagatgcacagcacgttttctccatcttgtccacaggaatgtcataggctatttggttaaatgtgctgttgaaatccagacactgacatctgcagcattcctctgaaccaccagcccctaaccatgttactaaaggaagtgaagtcagactggcgtgctggcaggtgctgactggtggggttcagtctgtcagtaaccacccctgttgtcttgcccactgctacctcccaaatatgcccaaggagtagacgcatgtgctattggaggtggctagacacttgaaagcttctttctggtagttctgaggagtgaacatttgaagcttgttaagtacagtttgtgtttctagtccagccaggcagcctcacagaagatgttgtttctcatgggtggagttaagcaagtacaaagagaaccaattcctaaaggcctgtccactctagagtccactaatgcttcctgctctgggagtggtgatctgaattgtaggtagagtcacttgttggcccttcgtgctgggctggcccgaagctcaggtggtagactgcttgccttgcattcagttttcatgtcccgattattctgggcatggtgacagaagcctgtggtcatccagcactcttaggtgggaacagagactcatcagattgacttcatctttagctccatagtggatgagttccaggccagtctaggttttatgagacattgtctttgaaaaagaaaagaagggaaaaaaaatagttgttgcgtgctgcttatgtcttggagttaggagagcaaagttaatttggggagtgtctagtttaagcgtgtggcctggatattgcattgagtgtggcttcttctattttctttcaggatagggatttagagcggcttcgtagaaaatggctcaatgcattaaccaaacgtcaagaatacttggatcaacaactgcagaagcttgtcagtaaacatggtaggaagaaaagttggacatttccctctcccccattcctccctccctctgctgcatgcacatatactcacacagtactccctgccctgcactaaatctgtctaaatgtgggaacagcaagcagaattgctagacctaaccctaactctgctcttctagacaaaactgaggatgatgctgaccgagaggcacagctcctggagatgcggctgacgctcacagaggaaagaaatgcagtgatggtgccttctgctgggagtggcattccaggggcccctgcagaatggtaaggtcctacagtgtgtcttctgaaagcttcagggatgaccaggcacctcgattcccacttgtattttgcagtgatgttgttaatgaatggattgttcataatgagaactgagatattgaaagactgttaaattattttcatgagttggatatgactatggcttgaaacttttattaaataatattgttattggccaaggtaattaggatttctgagaacttaaatcaatatttagtaccactgcacttagcattaaaaaatagttaatatgttaattacttggatcatttgttcccttaaaagaatgttaggtcattatgcagttagaaaactgcatctcaaccagtttttggttttggtgcttaagctgtgctgtcagcaaatgttctctgacacttgactggaattaaagatagcaaagcaagaagccacaaggatcccttaagtatgtcatttgtcaagaaagcaagctttagacgggctgctggtgaagtggtgagtctgtgagagtgagctcctatgccccagcactggacggctcctgcagtcaatcacgagcctcgtcacactgtcttagagggacatcattgctcaggccattgtccccaagggtacatgtgatcctgagggactgctgtgtctcaggtactgtatataacctgttcttcatgttttaggaccccagtgcctgggatggagacccacattcctgttatatttcttgacttaaatggtaagttagaggtggcttccagaggcttaccttgacaacacagtgacagggtaatcctttatacatctagccaatcatgtttcggggtgtagtcaccctgatataggctcagtgctctgtgtgtggtgttctgatgctggacaagggctgtaaatctcagtatcagtcttgctgtggtgtgcagcccccacctcttctcccatttctgtccatctctttccatcatttgagccttatgcatgctagacaagtgtgctccagtgagctgcagcccagcccagcagctctggctgtggtgctcacatctccctgtggcttcctgcttctctgagtgagctttatttccctacccacttaggggatttgtccacactgatctatgttcgacttcagtgctctgaagaaaatgtctatctggaaaggaccaacaactagggatactgttttcttagcattatttaatgactttctcagcctttttgtgagttcctgtgaacttaaccttacttgcttatttttctttttacataactgttgttttccccagcccccgcacagccattccaccagtctctgtctataggagggaaaatagaaaatgcaaaggtaggttagggagctaaaaataagaagtcagcagttaagctccacgaaacacctgcagaagtgtgtgttaccacaaacttccctaaatagagaagcctgggcatcctcaagtggttcccttcactgagtggaagtgtgttaggatgcctgaggggcccagcatctgtgcccctgagggctcacatgtgcacaggttagagagacacggggcacccatgccagctgtccatcctgggaggtgagagctgttccagagctgtcacagggcactgtcttcctgtgctcttgagccttggaggctgagacgctctggcctgatctcgtgctgggcttcgtgggcagctgaaaagcaggcctccaagggactggggaggattgaagttcaggaagatttcttagttgtgcctttgttttgtcctcagaatgtttttgtaagcataggaagtcctggatgttgccatgacattttcatgtacatacattatgctttccttctctgcaccctctcacctatcctcctgtctctgctgtaaccttttcatgagtccctctcttcagccaagccattctcctgcattcacatcatgtaggtaggaaggcagaagaacagacagatctagatttgcaaatgagaaagaatgtagcatttgtgtgttcccccccactactgtctttttctcctcttcctccctcccgttagacaattcctgcccctcccccagggtttttccctgttgcttttatactgttatggggaaaagatctatgtcttgttgtgtttggcttatttcacttaacaggatgagctcttgatcccctcattttcttggaaatgacagaaagtcatgcttctttatggctgaataaagtccattgtgtagatatatcacattagctgggaatctgcagggtcgtcagagctttgttcagcatgccacactagcacacatgcacaagcacacctcctttgctttgtaggcacaagcctaagggatgggcactgggaactcagactcggggccgagcgaccacagggccctgtgcagttgccaggtccattagccagtctgcacttttgttaggcttaactgtgaggaatcgctctcgctttcttcttgtttcttaagtgcactaaagggtggggagattgggctgtgatcccatcattaccatttatgagcagacctctcataacctcttaggtatcttggctccgtttgccttccatgtaaaatacgacacacggggagcagcttgggtaatttcttgaagcactttctggcttttggatctgtgaactattaaatggttattatcagtgtcatgcgagattgcagggcagaaagcaagtgaagtttgaagcagaattttaataataagcgtgttggttcagccagtggggctgggatgaggggtgtccttgaaagcagcctggtattaagtgaaagctgtgctttcagcggatgatttcagctctcaggataatctcgatgacccagaagcaggatgggatgctaccctgactggggaagaggaggaggagttctttgagctgcagattgtgaaacaacacgatggagaggtaagtcagcatacccctggagagcagacaaggagcttagatgtcagcaatgagtggcctccacagtgtaagggaaaactctatcagtacttagagtgaagtttgaccctcacacccggttccttctcccttctcccttccggtttttggtgagggacccatgtcagtgtggacagcatccactggtgtggctgtactctgttctcaaccctgagtacaagagaggtggctgtggattcctctgaagtacatagcactccaggctggaaggatgctgactttggtatttgctctgcagttccttcataagaatgtctttattacagggcctcactgtgtagctctggctagcttagaactgtctaggtagccgggcgtggtggcacacgcctttaatcccagcactcaggaggcagaggcaggcagatttctgagttcgaggctagcctggtctacagagtgagttccaggacagccagggttatacagagaaaccctgtcttgaaaaacaaaaaacaaaacaacaacaacagaaaaactgtctaggtagaacagactggcctcagactcacagagatctactacctttgcctcccaagtgccaggattaaaggtatggaacaccatacctgactgaagagttctttttttttttttttttttttttttagatttatttatttactatatgtaagtacactgtagctgtcttcagacactccagaagagggcatcggattttgttacagatggttgtgagccaccatgtggttgctgggatttgaactctggaccttcggaagaggtcgttgctcttaaccactgagccatctcgccagcccctgaagagttctttaagagaagaaaaagaaaggcctagtggtaaacatctatagtgctggcatttgggaggctgaggcatggggatcatgaattcaaaaccagcatgagctacatagtgaggtcttgtcttagaataaaaaaaaaagaaagaaagaaaaaaaaaaaaannnnnnnnnnnnnnnnnnnnactgtgttcttccaaagatcatgagttcaattcctggcaaccacatggtagctcacaaccaactgtaatgggatccagtgccctcttctggtgtgtctgaagacagctacagtgtactcgtatacataagataaatctttttttttttttttaagcaaaagaataaatgaaggcattgaggcagactcatggtctcgtggttgaatctgtgtgatgagcataatcctggggctttatttcctaattttgaatatgcttgacacatgatatcagcagtatagtatctgagaaactcagaggtgacctgagatatctactgttgggcattagccctgttccccttgttcacacagtgccctgccttagccctgagcctgtttgtgttagatgtgacaagacaggcttgggatcagtttatgtaaaagtagactatggggccatgacagctactgcagtttgcaattgtggactgagaacatggacaaaaccaaatcaggtaccatcctgttgattgcctggatgtgacacttacctacagtttacttgaaagtgacagggcacaggctaaaatagacagcgttttcagtgggtggccaaggaatagtacacgaagtccactgaagctttttaagctttcttgatgtttaaacatttttttaaaaacaaataatttaacagcaagaaggctaataaagtagtgtcgcagctcctgttttgttgctgtaaagagacatgcccaaggtcgcttataacagagaacacttaattgagagcttgcctacggttttggaggattagcccatgatcatcacggaggggagtgtggcagtaggcagacaggcatggcgctggatcctgatccatgatgggatggggagagggagaccgggagaaggagacagggaaagaggatgaactaacagtaaaagctgggcccagtagggcttttgaaaccttaaaacccacctctagtgccacctgtccaacaaggccacacctcctgatcctttctaaacagttcactaactagaagccaaatactcaaatatatgatcctatagggaccatcccagtgtatgagcacgtaagtatcagcacaggtaccatgccaaatacctcccatgacagcaactctcgctcacatcctggcaccacatcagggcagttctcgaaagggagccttcacatggagaagaaagtgaagtgctgccttaccttctctgcaggtgaaggcagaggcctcctgggactctgcagtgcacagctgtcctcaactcagtaagggcacacctgctgacgagcgagtgttcctcatcctgcgagtgactgtccagctcagccatcctgccgacatgcagctggtcctacgcaagaggatttgtgtccatgttcatgggcgccaggtgaggctgactgggccactcacactagaaagttctttccagacgtgctctatggaaccctgagcctccccttcccaggtgcctgtcactgtcctttatcttgctgtcagtgtgtaactcacaggacctaggaggcggagtcccaaaggagccctgccatggggaagtccagtggctttgctcctttgtgctcttctgaagcaagcagcttgaggaggttccctggtggctcagttgtggcatctgttgttagcctggagtactaacaacactgttgtcagcctggagtactaacaacactgttgtcttagtcagggtttctattcctgcacaaacatcatgaccaagaagcaagttggggaggaaagggtttattcagcttacacttttcacactgctgttcatcaccaaaggaagtcaggactggaactcaagcaggtcaggaagcaggagctgatgcagaggccatggagggatgttccttactggattgcttcccctggcttgctcagcctgctctcatatagaaccaagactaccagcccagagatggcaccacccacaaggggacctccctccttgatcactaattgagaaaatgccttacagctggatctcatggaggcatttccccaactgaagctcctttctctgtgataactccagcctgtgtcaagttgacacaaaactagccagtacaactgtcttttctagaagcctttgattctcagtgtgactttggttataaaacattgaataggcaataggctgggtctttatgtttttaattctttagtacatctgtattttgttttgttgttgattttatatacatatatataaacatatatatgtatatacatttatatatatgcataggtgtgtgtgtatatatatgtatgtgtgtgtatatatgtatgggcgtgtatatatacatatgtgtgtgtgtatatgtgtgtgtgtgtgtatatatatatatatatatatatatacacacacatacatgttttatataaatttcttcttctttctcctcttttgttcttttcttctccctgaaacaaggctctcttatagctttgcatgtcctggaactcactctgtagtaccagtctgcccttgaactcagagacccgcctgcctccactccagtgctgggactaaaggtgtgcaccactactgccctcctccatgtgggtcttcaaagaggcaaagcctatttgcatttcaaagtacctgagtgggccaccttctattgtgtggtgtgctggctggggtagcatcctgccaacagagctgtgaggaagagccttgcaaaggaggtcaactctgagctggcactttatccagggctgggcaggcaggggaataggtggctgtgtcctactgaagaggtagtcagtgagggaggaaccttgacagatggagtgttctagaaattgtctaggtaagtttaaacactgtgttattggatttataaatgtgaagatttggaagatgggctctggggctcctcattcactctgtcaccccctttttgtgggacatttaaacacacagacacagatggaaagaaatctcatttgaaagaacacagtcgtggttgacagacttcaagatgtaatctccatccctaaaaattaatctttagttctaaatgccacactgatgcaatctctgaaacaaagactggtgtaatgctgttaaaatcacagctccttagctctccagtccaacatcaataaaattgaggtcaggggttagctgtagagtatttgtgtgtctcatattcactcctcctgtgcccctcttctgggaagtctgaagggatggagagaggcctgctgcacgggggagcttcatgaagagtgtttccatctgcgtcagctgtcctggccacctgaccacagcattcccagaagagatggcagagtgtggaggaaccaaccatttctcttcttttatttttgagtaggaaaaacatgttattccatttcttcccatttggagtgacttgatggaagtatttaaaccatgccacttccccgagtcgcagatacttcattcctttaaattgcttcttcatataggacagtagcaaacatgtggcagacacatcattagttcatgcagatagtaaacaccatcaggtggcactgccttctaccacccatgagaagccatggctatccctggaccatttgccttgcagactgctacaaggcatggttgaggccctgaaaggatgaaggaagtggatgacctctttccattctgagaggctctgtctgagagctggggctggggggcttgtgttggaggagggtcagaggttaacctcaggtatcagtcctcaggtgttctgagagactcttttaaaaattagttaacaatcaccaaatgtgaaataagtcattattagataggattataaaattacgtgtttttagcaacagctgattttcagttttcctttgggtttttgcatgcttctgcctcatcttttgcctcatgcctgttcactgttctctctccttatctttattcaattgtattccgccctcatggctgctctcttcaacctctgcagaatgttcaatcttcgcagcttctctaaatgagtcatctatgcattaattcaacagttcaatttctaactgtgcaaagagcgcagtcagcataaacaatgaccaggcactcttaaatcatccttcataacgatcctgctttggtcaagaatttaatgcctgaacttgtcaatattcatggtcccagacgtctatctatcgtgctggaggaggaaagtgtaagcgtcaccagtccttgcttccatcttccttagaaggtcatctggttgtatcttctgtctcctgagtttattcagatgcttggaggcagcttcgagatcccaggtctcacttctccctaatcaggtgcaggacccaaggcacattataggtcccagtccattggtgctgtgcttaagtgaaggagctatgcccggtgctcaggatctcacatgcttgtggcagatgcctcttcttatattagctctgagagaacagtgccctttgttgctctttgttacaggaaacaaagctagcaagtttggaaataatggtctatattttatttttctctagggctttgctcaaagtctcctcaaaaagatgtctcaccggagctctattcctggctgtggagtgacctttgaaatcgtctccaatattccagaggtattctgggaaatttgacctggaaataaacatgtaatgctaactcctcaaaacagtcacccacccaagaaataccatagtcaatgaaacgggctggggatgctgagcaggcggagggaggggcttgctgccaagcctatgacccgagtctgtgccgtccctggaatccacgtggttgaaggaaataaccctcctgtgcaagtttcatctgactttcacacaagtgcagtggcacttacacgctccctactacaaataaacaaacaaacaaattaatgtaaaacaccaaaccatctactgagaaaaatgtatacaagttttgatgagtcctctactgtaaacttttagtacaatgtatctgtggccgtaaaagttgaaattttagtattttgtttaaagaactctcttgttttaaaaagttgtttatttattgagtaaatgtgtaagagagggtacgtgagcaaggtgagaagagggaagagtaccatggcatgcaacagaggacacatttttggggagttggctctctccttctagaatcttcctctgtcactgaccattgagcttcttgcaggttctcctgtgtctgttcccattttgccttatgagtcccagactcacagatgtgtgtctctgcatccagcttcctgcaagggttccagggatcagagtcagctaaaaggcttgggctgcaggtgctgctacccactgagtgagccagatttctagccaagaactccaatttgaaaagcaattcaatggcttcttattttgaaacacaacaggcaatagcaatatggtgttagtcacagaaacagtccagtgtagagatttatgtctgatgtagaaccagacttaagtccagtctctgtctcttgctatcaagtgaatctgcatactttattctaaaccagagactgatgttcagacacaggaactagagacttggggcctccccacaggttgtcagtactgccttgtagtcttcattccaggtggtagaatttgtggattgattctgctgagtgttttgtttggatagtaggtagataataactcttttttttttttttttttttttgaaacagggattctctgtatagccctggctgtcctggaacttactctgtagacccggctggtctcaaactcatagagatccaactgcctctgcctcctaagtgctgggattaaaggaatacgccaccactgcccaggcaatccctgctttaacagtctgtaaagaaagcaagatgttgatgtcacctaggctttgtttttaggttttgtactgttccagggagtctaccagagatgaccattcagacagtttataaagtacttattttagctgactgggactacatccaggtactcaggaacctaggtgcaacccagagtgtttggagggtttttaaagcccaaaccatgtgttggcatcttgccttgaagcttcaggggtactttgcagaagcaatcagtttaacaaaagttaggtggttaattgtagggggttcccgcacaaacagagtaagataagttagctaggacatcccgacctttggttactagactggaattgggtaattttccatgggattctgcatcaaggagatccaattctagttaaacttgaaatgacctcagctagaatacaagatggaggaatctttgcgttgtcttgccttattacattatgttgaaaattcttatcttcaaaagtgtccaatggtaacttctttcctgggttttaaagttggtctttcatattgaacattaactatttaagtacttgatttgaattgaagcctcttcagcatttgagaattaggctgttggcaggtttgagtatgtgtctataattctaggactggaagactgaggtaggaggatggtgtgtgaggctgaattacttagtgagaccccatcttaaacaagctcctgcccaagcccaaagccaagggctgagtgtaactgatagcaccttgtatagcctgtgcagggcccgccatgcattctcagacattccaggcagtcagcaaggaagctgtttgcagtagtgactaattacgagatcttggactagaaaagctgactctgtgcttcattcattgttctttctaagagttaaaagggaagactgtaggggaatcagcttaagactaagcacccttgtgtcactggatggctggtaattagctaggcttccagagttagcaaacattgtttcttcatcctctcctgacccataagttgtccatttatgagaatgggcatctcagttagtagaacagggtggggattcacctctgtttttcagagccttaggccactgctgcccgacagcagctagggccttgccggcgtccactcccttctccacactgcatcggcatctcacgtggatattggggatgttaggtctccacttttgtccagtggggtgacccagctcacaggggtggaactgtcttacactgccgtcacagtggtacttctaacgtttctgtaggtggatttccagatcacctgcagaatcctttccaggtggtaattagtagtgaatgtttgtgaaatgggtacaactgtgttgaatgtttgtgaaagctgccgttgaacctgctttccaggttaagctgttacctaatgatgggtcgcgatttctgggagagagtgcattttgagttctaaaagctgattttaaaatggaacttggggttccattgaaatttgtcaattcagagtcctgtgtatgtgtgtgactgtgcatgtatcagtgtgcttgagcatgtatgtgtgtgagcatgtgtgtttacatctgtaatgatgtcttcaatgtagttttaacatgcaccctttagttcaggatgagtgtgtgtgtgtgtgtgtgtgtgtgtgtgtgtgtgtgtgtgtgtgtaaagcatctgtaatactccctttttcagccttttggtattttttttctgtgcatcattttgttcttcaggatgcccagggagtggaggagcgagaggcactggcaaggatggcagctaacgtggaaaacccagcatctgctgactccgaggcctatattgagaagtacttgaggagtgtgctggccgtggaaaacctcctgactttagatcgcctgcgtcaggtgagcggtcaacagcgctgtggtggactcccatctggcctctatacttgactttctggagtctggcttgaagagtttactctcacaaaaaccactgagtgcaatggggtcattctgttttgtcaagtcatggctggtatttagaatgtagcaaaccttgaaccgtgtaagctggagtgcatctctcatatggacctctccttggtgtgttttccaattcccaggaagtggccgtgaaggagcagctgacggggaaggggaagctgagccgaaggagtatcagctcccccagcatgaacagagtgagtctctcctgccgctgctctagaatggtgtctgcgccctccttcctgactactcgttgggatgcctttctttctgcctactcttgtcacgcacggctgtgcccgctgttagacccaggatgcttgcttgagtgtcatggccacacattgcttatttgtcgtcaccacctgccctgtacaggatgggaggtcacaaatgtatgtggagcttaaaccccagctttgctgtacagaggaaggaaatcattttctgggttttaattatttttaaattaggaagtttggtatatgtttgcacaccaatcacttgaaggccatttagggtagtataaacgagtaaaacaggttgtattttatataactatggctaagatatgttgatttatatatatatatatatatatatatatatatagagagagagagagagagagagagagagtttatgtgcatattgaacatggagataattattgacaaaaaatgagccagcagctctttatctgctccttatttctgtgaagatgtgggtatggagagtaggtgcgcttttgccctcagctgctctgctttggaggaacgagcagctgcctcaaatctgtaagtgtgaatgacaggcagggcaggtttccccctggagagtctgtgggcgcagaggtgcaggaggcaatgtctgcccaccgcagacctgaagtgcggggccactctcaggcatgtagaaatgccactagttccaggtcccttcagaaagttattaacatactggcaaatgcagagatttggtatctggggtactataatctgccgaaggccaccttcgacaggtcaggttcactgagaaggggcatggagtttgtgattaatcactaagcagactttactccgagggagtaaaacttaactctctggggtgggggaaaaagtctctggggctggagaaaaaggtggaaaatatcacacacacacacacacacacacacacacacatacacacgcacacacacgtttatacatacactcacacacactctcacactcttttatttggtggataaagcaaagcaactcctactgcttatatcccccagcagaatcgctcaagcagtgcaaaaattacaatgtggctatattctatttttctttaagcgaatgattacaatgagtaaaaaattgtatgttccctaatgcctttacatgactaaatgtttcatgtaatacagataaaaaaccaaattattcccaagaacccacatacagtcgtatctaagcaacttgttatagattaacaaaatgtaagcaagcaagatatttctttcttggccagtttctcttactggtaggctgcagtttgtagttacagagaagggatcaattgtttcattatttatcttaaaaaacaatcattaaaaaatttttaaaagaatcacaaatctaaacttttatgtaaaaaaccagtcagtcattactgctttcaatcatcagggtgcacacctaccaagttttttttatcaaatcacatcaggaagctgagggcaaaaaatgggtacaagaaaataatcattgccttgatcatcagaccaggctcggcaagaaaggcatgtcatctagtgttagctgggctgtcattgttcttgttccctgacctcaaaaaatccctggctcaactattgagggtgtgactttctgaacattaaattgtcccccaagattttctgtatcaaagccactagcaaacacatcctaacctaacttttccaacagtccacacctccagattctttctaggggcgatggatagcactaacaagctccatctctacgttctttccgggggtggtggttgaatcattaatctgtgcagcagcaatgctggaaaaagatcaatcactgttattataaggaccaacaacactgcccaggaggggctggaaacccccttagagttttcatacagctcactgattaggaggggtgtgatgactcagggtggagggcaacaagcagagcgaaagaaactcccaacagcctggagtcctcaggacacatagtcctcagagctctgcctctccacagcacactcatcgtggttggttgtactgaccggtggacctcattccatgagtcctaaagctgtttgctgtttctctcacatgagcctcagcagtaatctaaatagtttattcttagacaaaaggctcaggccatggcaggatccagtgacattagagtgaaatgttttctgttcaggcccagtgaggtgtcaccccagtgtttagtggacatgaaagcctagggaaactacccatggaaagtttctggaaactgctcagtggttttcacatcccagagactcactaatctgcagtattggtcttggttatgattttgtctcactgtctctctgactgggaaacaggataacctcagatcactgtgatcctcctgcctctgcctcccaaatgctgagattagaggcacaggcactcaggccctgcttgatttgattttcaaagcaggctctttcttgatgctctcatgcttttacattaatctcttttatctcttcccagttgtcaggaagccggcaggagcttagcccatcccacagtctaggcagcaacaaggtgagttggcacttaggctcctcgcctctttcatcttctcaaacctctgtacttgcatatgtctgaacccttcatacacaccttggttttgcaacatttattggacagagtaccacattggtttttctgatcctgccgttgaggtccactaacacccttttattagaattaaaaagttagggtttgtttggagctaagacgaaaggatggaccatccagagactgtcccacccggaggtccatcccataatcagccaccaaatgcagacactattgcatacaccagcaagattttgctgaaaggaccctgatatagctgtcttctgtgaggctttggcagtgcctggcaaatacagaagtggatgctcacagtcatttataggatggaacacagggcccaatggaggagctagagaaagtactcaagagctgaaggggtctgcaaccctataggtggaacaacaatatgatctaatcagtaccccccagagctcgtgtctctagctgcatatgtagcagaagatggcctagttggccatcattgggaagagaggccccttagtctagcaaattctatatgccccagaataggggaaagccagggccaagaagtgggagtgagtgggtaggggagcagggcggggggagggtataggggacttttgggatagcatttgaaatgtaaatgaagaaaatatctaataaaaagaatttttaaaaagagttaggttttgctaaaaattatctttctggttataatattccatttacttatgaagaagaaatttcaaattgaatttataataggaaagctatgctatgatataaaaatatttataattgttattatttattagaaaaaaaagaaaacatgtaaatgccagtaacagctttatgcaaacagaaatgcactattgtttgcttaaaaaggccagcacttcttgtagtagctgcctgatctgggtcttacccctcacagtttgtttttgtcactctgaggtgcctggctaagtgttggcgctgtgctgacaggatgaccctagagtacactaggagtctgcattgtcatagtggcagtgtgttgtggggggagttgttcagaatgactcaggggtatgtagggaaatagagattggctgattgatgataattgttaaggccaagtagtgttcatgaggctatttctattcttgctaattattctgtatttgtgtttgacagaaggaggcagatagatcatgttggaacttggatagcatttagggttgcttggaatggtactgggtgactacacctttccaggccatttctgctgagcactgggagagatgagactgagtctctcgcagcctgtttgctgtcttgcttgaggtggaggaacatcacatgtttttgttgctggcctggcagcttctcttttctggatttcttggggttcctgaataacttggagaaaatggtgctgttatttccagttgctcagatttggcttgtgtcatggttctgtcttggtgacttggtctttttagtctttcctataggctacagagagcttggtacagtttacagtgctcagagtttgacacctaccccctcctccatcccttcccctcccccacacccgtccccaatgctgtggctttagatagcctgattttcatggttgtcagttctaccatggagacatctttgcatcctcctatgaatctcgcagtaagcaacctgtaagtgccaccttaggctgttgcttttgcccctgggccaagaggagacctgctctgtcacagatgtctgtggtaggtcaggcagatggcagcagacaagaatattaacagaccatgtgaatggaaaaaaagaccacaaaatagctccccattttcctgtgcaggggcctaaagcaaagcactataaaagatgatcagcacatgaatatttcatgtcatgtctctccccagtgagaaaagaatcctgtttccctcaaaatcatccctgtagcctgttaaggacattgcctgtgtcattttaaatgcataaaatgggttatgaacatttataggagagttcttaagatggacagtgtttagaaggtcagaggacctgttagactcttaaccacagccgtgcttacagtggcttggcacaggttacagggtaatcctgatggtggcagaggaagccaactgcacactgtgctataaccacagtactactacatacatgcacatgcacacaggcacttgggcagtatgctccatcttgatttctctacaaggaagtagttaatggtcagggagttggtcctacagatttcaacccagatttggtgatgctaaaagtgctagaaaatatattttgaaatcatcaaaaattatcctcatgttagttatgtctatcttgcaggcattcatggggtcagttctagttttctcttactctgtttgctgcactcagctctgctacagataacgttgttggttatgctgtagatgagtgctgtaggctagagtgtgaagtgttttatcccagagaccacagcctagccagagtactatggtttgtcaaagaagagtccatgagccagccccagcctctctccccctgttttgctctcttgtcatgagaatagatttcgttcttgggagcaagtggcattaaggaggtgtaagaaggcaagagcgggagaggctgattgaactggggttgatggggctatgagaacttgttgaattcagttagcagaatgtatgtgtgcgctcatgctcgctcatgtgcgtgtgtctttgagcgcatgcacacacacacttatttattatttctgatttactcttcccatgttaaaatcagaattgtttcaccaaaattaagttggtaaagtaattaaagagctgggttattcccatccccttagaggctaaaggaaatcctcacaaaaagtcttccaattaaaattataagatgtgaccatattgaagtgctgtttttacttacagttacaggatgctttgcctctgttttagagacatttttaatagatgcaatgaaaacagattctctatgactgtctacttgtgggtatcccatgcagaattaatttcagcttgttgctggccttggcactgcaaagctggcgatgtatagagaccttctgtaatacaaggacagctgtcaacaagtctgttttcatacctaaagccactttagagatggcatttgtattaagttagtaaagtagtgctgttgtcctctgaagtggttttgttgtgggatgctttttgggacctcatgcatgccagggaagggctctacaactgaggcatattcccagccttcctcagaaactcttggcagagttcaagtcagctggtgtcttgagcagggtcgagctaacgcagcttcctggaactgccatcagctcaactttggttccagagatgctaagcgtgagtcacccactcttcagctgcatcagagctgcctgtgggctggaaatgacataggcacatcttcttatttactgttttgtcactttcctgatcaaagtcaaagtcttatacagaaagccaaaaaattatatttggtggaagagcgggggctgatgggaggatggctggtggacagggagtgtacagggacctcctagacttgttggattggctgtgcctctgagtctggggccactcctaaaatcttgaaaggttattttttttttttctttttcttttccgttcttctctttctttctttctttctttctttctttctttctttctttctttctttctttctttctttcttccttccttccttccttccttccttccttccttccttctttctttttttttttttttttgagttctgccttttagaacaactagtctcagtgtgtggatccaatttcctagtatcttcatggctgaatcttaagctcacaaggaagcagatattaggaatagactagtcagtctttgggaagtgccatgtggtgccaggtactatggcagaaggaaggaggtgccatgccttttttccttcaggtctgagccgtctgagagagctcagaaaactccagagcaaaaatctcaaagtcccctctacccacagcctcaagttcactccctttgaagtacatttaactgtactttgttttgttttgtttttggttctgttttctcccccagcatttcaatgaagggagaaactagcatagccaggcaggtccagtttattgcaaagtcagcacttgtcttgtccagccagggacgggggtgggggggggcacacaaccataggcagccctaccctggatgctccattcatctgtggtgagttgtgcagggggaggagaaccacatggaaggaggtttctgtgcatctctaggggctggcagaaagggaggcccaccttgctcttcctcagatctgtccctaggaagcagaaccagatctccaggtactcggatcctgactctgggtaatgaggctgggaacaagtggctgtaagggtctctgtctgctctgactacagggacctgtgttgggtgctatggtggtctctctgtgccattagctcataggcctgcagtgtgcttaggctgtgtttgggtgttgcctggaccagtcatttatttatactcagagtcttggggtgtgaggcaggaagagccactgctcttgttcagcctccatgggacattgtgcactgggtgccaggagtcctgattgtgccccagggaagggacacctccttcagttgttattggacaactctgtgtcacacagcttggatgctaagtgcaacgcagctgctcagtttcctaagatacacaatgtggttgtgtcagctgccagacaagagagcctaagatattagaataaatttactctctaatgaagtaagttgtcttcagaacaaccttgtatgaacttgacttcgtgaacagagatctcaacacctcttccactgctactcttgaaactcctgaccttagtgttcagatcctgacgtgactccccaaggaacctaaagtgggcagcatcccaagaaggataattaagttagaatgcaaaaattaacaataaaaattaacagaagaatgcagtctgtaaggaagtgtgttacctgtgggggtgtagatgcccagcgggagctgcgtttcttccgccccaatcatgtgcctggagtctgttttctgtctgtttcctaatgactgctcagagagagcatcagtgttttttgttttgttttgttttaatgccatcaagtgctgagtgagttctctgtggtgaacacgattggatcacttagagcttattgattttatgatcagtccttcagctgccgctaaagcagatggattcctactgcatgtaggaagttgtgggctctcccctcagtgttgagccttccaggactcacatttccaccctgcttctcagcagccctcaggacatcctaattaaccctgggtcctttgtctgtagcacgctcagttaaactaacattaaaactgttacttaacctcagtgagaaagacctgagttatcacagaacaaaagagagcttaagatctgctcacaacttgaggctcagtaccaagctacctcccagaacggtgggaagaggaggccccgccccattcttgggctccagttgaggcataggagtgagggtgtcatctccagccgcaggagccagggcagaatttgagggcatttatttctaaaggagcctgtgttgaggaggtggcaggatgcagtagattttgggattactggttgtcggtcacaggttgtaaagtggagaggagtctgcagtgaacattcatctatgagggactcagccccatgagcacatggaagcttaagaaggagtgatacagtcagacttccatcccagagaatagcgttttagtaatgctagtaggctttttctgcagtgttgaataattttttcttaaatgtagtttttaatttgaaacaagatgacttacttttgtccctgtgcttaatagggccggtgggaaagtcaacaggatgtgtcccaaacactagtttccagaggaatagctccaggccctccagctctctctgtttcgccccaaaataaccagtctcctgatcctggtaagtttttttaatctgccagtcactgccatgaaatttgagtatctttcagaaaaaggttcaatcagaatgtcctgctaggtccacacacagactattcatgtccatcagaatgtcacctattcttagcatgttgggtggcatggtttggaagggtggtgacgttaccctgtattcttctgataaattaccctgtgaccctcttgtcttcttactgctcagcttgtttgttaatacttattgtccatttgtggtccatgatgactttcagcttttacgtcctcatatctgctaagttttgctatcaagattgtgttggcctcacacagtgctttggaaatctgttctcctttcttttgtgcatgggtttctgtgtgattggtaatacatactccttaaatgtttgacaggattacttagtgatgctgtctgaagctggcattttctttgtgtagaagattttgaattatgactcaagttttctttagtgtggagtgatctcgacttttgtgttccttatcagactgcttcctaagtcctagttcccaaaaagtttttggtattgtctaggttattgtttattcttataaatgttacagtatttactctcactgttcttgttaagattcatagtgaggtgtgaggtgcacattttccatcccagcactggggaggtagagccggaggatccctgtgagttcaaggccagcttggtgtttgtactgagaccctgtcttgaaaacaaaccttcaaaacaccacaagcaagtgagcacgcagaaccaagcacacccaaaaacagagttctccttcctctagagcagaagttagtcctcaacactggcaggagccatgcacactggagcatcacggttgctttagttactgctgtttaaattggtagatgccagctgtggtgatcttttcctactaatgattttagtgatgcctgtagtagtttatactgtgggatttgcttccaagtggctcttggcaaatgcagagcaagtgttatgtgccattgttttcacttttcactccgacaggactgggaggcgtggcagcctcttacttgaacccagtgaagtccctggtgccacagatgccaaagctgctgaagtctctcttccctgttcgggatgacagaagggggagacactcatctccccttgcacaccaggtgaggaagccacagtgaatgtttccctgagctgttgtggttctgaagctggaggtagaggaacagacccgtgagggcattggtgcagcttctgaccctggcagagcctgtcataatgcctctcccctctttccagatagcagctgtttgcacatattgacaccccatcctttctgctctaaacaaaactgccaagtctgctactaatgtgattcatgtgctatcacttagtacaacaatcgtccaatttatgaaggtgcacttagtgttgtttgtgttgccaagtagaaaatgtaattctatttttaattcttgatttcacttttcaaacaatcttgaatcataattcaccccaccctcaatgtccagtggacaatcagttctttgactcaaagtagtcacttgtcttcctcctgtttaaaacactttgtgtggcagtggagcgttagagaaaatgttctaggatttcccaacaagcaggaagctcctttcatacggtggtgaaaggaacccacttggagatgcagtttgtagtcatggaggctttatctcaacagagaatgttaaatgagatttatttctactcattcagaaacataagccatgcaggtgcagctgttgaagtgggtcttaacactagctcctccatatttcaaatgtcccagtgtcaggaatgtaggtcaggagcgtcggaggcagagcgattcttaagggcttctatgaaggcatcttcaggagagattgtgttggcatcaataagttattctgtatgtagagagagcttcctgcccagtgtgataccaacttgcacatcagcacacagagcagatggcaaagtgaaacacagtaattttgaaaatgttttcaaggacatgtagctaggcaggtcaaaggtcatttgccgttattgagatgtgtctgtgaatggagggcgcaggcaggcaaagctgactttcccaggggctcatcactgtgcatgctatgcagctttaaactggtcattgtttcatcaagtatgatgggagggtctctgcattactaaagtatatgtaaagaaattgcccttccccaatctgctctggtgacccaaagcccatatgggacagccaccatgtcttctgccttctgtaagtactatggtgacattacatggagcttgatgaccacagttccagctgctcttcactgcagtagttgtctagatggcaggggaggagtcatgttgaagacaagcagcttttcttttcagtgatcagcgaacaagtccaagccctggctgcatggagagctcatgagagtgagaggaacagcagcctgtgagagacaaacctgatgggaatagagaggcagtctgtcatgtccaggtgacaagaaatgtatgaaaatataaattaacactgggcttggtgaccgtgccttgtggtgtagctaaaacattaacagtgatttgtgaaaacatctccctggggcagatgcttccatatcctcaaggttgtagtctctgtcctcatatgcataaaaccataagccttgtatcaccaacagcaagtccttcttggtggcctgtcctaggctgggtgtccgggtaccttcgtggccttctatatttatccacatttaaccagtttcttcccctgggtagctcacttcattctgtttttaaactgttcatatgaggcagctggaaatgaaaccaaagtctgcactcttactgtggcttatagcaccctccagcagtgagtaccctcctttagtctgtgtatgctgcctgccagctctgtgccattctaagacatcccactcccattttatcccacgaacacaccagcacatgccattcagtttcagtctacctcttcttccagtgctggtggccaccctgtttctcctgctttggtttagagccatactgtcatggaggccacttagtggaagcacagttaagtgcatcccagccctctttgtgagccaaataaaaagagcaaaccaccccccacagatacacatgcctttttttcctgggagcttctaggtttttgtttgttgactgtctccctgtggaatataactacagtgggcagggctcatttgccctggatcatcctcataagatggagatataaagttgtctcattgtctatttgtatgcagatggagatgtggccctgtgtggacctctgtcacatgtgtagaaagcactgtttgtaggttagcgatgagacaggcacaactgagtggggtcttgcggtatcaagacatatttgtgaactttcctaggtggatggacatgccattaaaacaaattcctgaagctctgatttttctcctgggattcagttacccaaaatgcactgcctcctctgctgctccatccaacccctgagctactgcctcagtctctcaccttcccccactgcctgctaaagctctgtgggatggaaattctaattgcaagtgacagcgtcaacattagttttcttgcaacttgggtcacttgaaatgtgctctgtgctgctgctccctgggtgtacacccttggatggggcttcagtgccagcgcgcctggctcctgtatgttcctcttccattcttcactctcttggaagtctgattgcatacctggtggttgagattttgacttaaaaaaaaaaatccttccatgtggtttcttcaagaactgggtcatctttttttgtggccttggcctctgaccttttgtgttctgctggtagaatccagggcaagagtggtccatgctcttgaaggcctacccagtcttagcagttctgggttagttggcccgccgcctgtggcaatgccttcatctttgtgttgtcttgtaggggcctctggggggcgggtggggggggatgggtggaacagtaaggtgcctgagcccgacagtagtggagccgacttatctcatttaaannnnnnnnnnnnnnnnnnnnnnnnnnnnnnnnnnnnnnnnnnnnnnnnnnnnnnnnnnnnnnnnnnnnnnnnnnnnnnnnnnnnnnnnnnnnnnnnnnnnnnnnnnnnnnnnnnnnnnnnnnnnnnnnnnnnnnnnnnagctggtgccgaggccagggaggggtaggtacttcttaccggcttgttccacagggcttgctcagcctgcttacttacagaacccaggaccatcagcccagggatgacagcatccgctgtgggctgggccctcccatatcagtcactaagaacatgccctaggttcagtggttctcatcctgtgggtcgagacccctgtggggcagaatgaccctttacaggggtcacccaagaccatagaaaacacagatatttccattatgattcataacagtaacaacatcacagttatggagtagcagtgaaatggttggaggccccacagcatgaggacctgtgttaaagggccgtggcatgagtgaggttgaggcttacctacagagagattgatggaacattttttcagttgaagctctcctctctctgacgactctagtgtgtgtcaagttgatataaaactacccagcacagcactgagtaggattagtccccagttcctcccggcacggctgctggattctttgtcctgtgtccacccttgtcagtgtggtccctctctctattattgtattaactacaaaatgtacaacactcaaaagggaactttagggttcccttccaaatatttcttttaaaattctttttaagttgtttgctttttaaaacttatatttttgctatgatctgccatacttcttagttatagggtgtcagcatgtgagtcacaagcacagtgttggctgtttaaggcctaagacagagccctggcacctgaagaagccactcttcggccatcaggcatctggccagcataatgcatctccatgttggtggccgccaccccgtctcccctttaaggaggactgagtggcatcgtggtgctaacgggactacataccagtcacctgctctgtgtcaccaacctggtaaaaactccatgaccaatgtttgatgaccctgcttgccacctggctccaccatcactcttgtgtagatatctgatgttggtgatggtagtttagctaggcgtgagcaccctgaggttttatttgctgccagtgtctgttcagatgttccttaagtaagcaacaaactgatgttgagatgtttagaacgtgacccaagatgaaacctagaaaaagcctgtcagtgaacatgcctcacaggacctgtcccgtctccgaggcaggaagcgtggtccagcggttaatgttgtgggacttagaaacggcccgtagagagagagagagagcagcactacttagttacttaaggctttcagtatggacagaagcagagatccagatggaagcctgtacaccatgttcaggggcacgggcctgttaattggaacccactttcacttctttcttaagaggagaggaattgagcggcttcctttttgatgatcacagtttagtttggagcttaacacttcctttgagaccgtcccatgttgtgagttctctggaggctcagtggccaacgagcatcagggcattcaaggctgccaggaagagcagcacagggtggctctgcagtagagtgacatgaaacactctgtgagaaaggactgaggagcgggtttgctgcctgtcagtaccctggtactgacgcctcagaagaagaacgacaagaacaatttctctgaagtgttgtctcagagaactgggattcgagttagcagagcatagagccagctatgagagcgcagtaaccacagactgctctctacagcagcccattcctgcatttgcaaacagtgttttctagaggggatgctaacctggatgaggcccgaggtagaagaggctcagagtcttctcatggttctatcactaccccggcagggcagatgagttgggagagaaatgcaagtttgtggtgtgagaatgagcactgccaggaaccctttcatcggtggccttggcatttgcagggcaggagcagtctctgctgtccctcatgcagggcagggcagggtgggaacagtttctgctgtccctcatgcagggcaggcagggcactggaagatatgtgcttagtgcgtctgagccagagagtggcccagaggctttggttcctggctttgattcaggattgtgtgtggctcatggtcttcttttgtgatggaagttcctagttcctgttttacaaacaagattctcataacttgtgtgtcgttttctttgtgtgagggtattcagaaagagttgggcttctcattttcacagagggcagttctggttgtaatcagtttctgtctgagttccagaaatgcaaagatattgcatggaaagaggtggcagctgacaaaattgctgtctttgaccttccgaggcacatttagtaacgaatctggaaaataatgaactacaattaatgaaacccgcacccgtgttcaagtgtatttctcagacagcacatacagtaattgaaaggacttcctgctctctaattagtcagattgaattaatttgccatgatagctctcttcacgtgtctggaagtctgtgttcctatgaagttgttggtgttcttcagagcttgagattccaagtagctgcattgattagtctggggaacgaaagtgttaaagtcagattgacttcccaccagcacaagtgagctcccttctggcctgctttcctgtttctgccctcttgggtagtatggctgtattggctgcagggacttttgcttcttctgcactgtagcctcaggtgcagcaggccactgtcacttagtgctgacctgttgaggaaactctcagatgtaggtagcgcctccattgcacttagagccttagagttagttcacagaatgagctgaataggttcagctgagtctgattaaaaataagtaatagtgttcatagaattgctgaatcaaggaagtctttgaaggagccaaactagagagaaaagagcctcttcaacccatatttccttgtccctcttgttcctgttttaaaagatgtccatggacagggagattgtaggctgcttcagaatagggagttagaatgtcaggtctatgtgttggagtacttaccccccctgggtctgcaaggaagattccagaaggaaatgggcagactattcaagtatgcataaagccctcacagtgattgttgtgtttgtcagaaattttgtcccctcctatgattgacagttggatcctgtgactgaccaggacctgtaatgatcaactcacccccaccccacatgtggtcatctagagaacacatatgactggaccaccaccttcatatatgtaccttgtgctggtgacaggtaatctaagggtgctgtgtacgtcagacacccacttttccatttgaaatatagccaccagacgggtaaaaagctggcttcatcatgactgacacactctactcacattagcctgacacacagagtgtaaagcagaaggcagcttggaacatggtaataccaggcactgaggatttcaacgacaacatagcttcagatacccctggcaaggccagggccttccctgagcatgcctctgccctcactatatgaacatagtccttgacacaggcctctgttgatgagcttatgggtcaggcttggtcctcagtagcatgtggctattatcccatcagaggctctacttttatcagacttgttaaagctagccatttctaatgccctgcatctagactctgcttagaattttctcatatcagaaggtgagatgttgacttctgattatttgtagcaaaaataaaatttacaactcttataaaactaatttctcctacttgggcctaaatagttgactaatattcatttaaataaaagctgagtattaacttggccacaatttgatcaaattcatgatagtaggtagatgttagaaaaggtttataaatataaaaaatgtaggtgacaattcagtattgtttaaggtaattaatgcttcctttgtccagcttctcttgttccctttacagctttatgctaaaatttacaaggatccatcttttcccactgtctgttttattctttgtgctgtttgttaaatgactgatgtacgtgtttatttcttcagaaaacaccaagacagcacttattagtgccctcctaagagtggagggcaagatgttccttctgaactccacagatagaggcacagccagtgcagggtcccagcaggtgctgccaaatatgtttgtggcatagggaagggagtgggtattcatgaagtctgagtgagatgtgatctcataaatgactggcaccattttcctgaaccgttgccaggttgtggtggctgaacatgtgtctgctgggtttcagcagtgctcagcagaccacacaaaggctcctgagcatcgctgactccactcagtgctgggctccctaagccctggttctggagcaggaaacagataattatattcacccttctcgcgggacttcttaatatttatggttgtgaaatactttgcagtagcttttattaatagttaccagatgtgtcataaggattaatgaatttacgatgtgaagtgtttagagctcctgaaatagaggttactgtgcatggaatgtgcaaaggagtattcaaatggctgagcttggagggtggagctgttgtgtgtgaaggagcagtggcttgcagaaggtccagcttagtttgtatctggtaccttactgcttgagcctctcccccagccccatatgtggatacacagtgtgttgggtactctgtccacctttctcctctccgcctgggtaatgcctctaacttcttcagcctccaaacattcatcgcacttcttgtttcctcttctttctcttcctatccaagtttaggccctcaggaactctctgtggaaccactgcaataatgtcttcattgatctctcatcctggtgtcttccctccctaaccagtcttccaaaggaagattctcctctctgtcatcacacaaagacttctatgccccaccccttccagtttccaccccttcactgcactgagcctcttcccttactggggctgttcaagatcctggggagacaccagttccctgatgccttctgctcaggctggtcccacccagtcactcggtctatctcttctcccctgagttccctctgccttaggaccttccagtctgggatccatttctcactcttcattttagtaatttggcttacacatccctccctgcccgcaaacagaccacctctcccaaatgagagaagccaaatggacattgagacttgctgagtctggagagcggtttcatggtagaaccagggcttggtctgtttgtgccctcggttaatttttgcatctgttttgttagggagccaccgagtcatgttagggagctgctgagtcatgaggaagagtgtgcgcatgcttccctgctcaggatcacgtcagcaggagtccatgtttggtggccaccattccctcctgctaggcttctacatttccttccttccttccttccttccttccttccttccttccttccttccttccttaaaaaaagatttatttatttttatgtatattactcataccagaaaagtacatcagaccccattacagatggttgtgagccaccatgtggctgctgggaattgaactcaggacctctggaagagcagccagtgctcttaaccactgagccatctctccagccccccaggcttcaacattttaatgccatgcattttcagtaaagaatggaacttgcagcctgagcacgagagaaagaaacccttttactgtctgtactaagaaaatgccctgtaaaccttcctgtttgagggagacttcggtctgtggggaagagagcagaggcagcatcaggtcccttggacttgaaggtggagtggcaggcatagaggactgctccatttcagtgtcagctgccctgggtgtggtcagaggtctatgtgctgggggggggggtgctaaggacagaatatttttttttttgtggtaaaggcattgaggaggtggctggagtcttggagttcaagctcttccgacagcacggcagtagggctgctattacgggacaccctcgcttgttcatcctctcaggcacacatgctcctagctcccctggagtttcaccccagtgtctgagggtggaatgtaaatcctttccctactctggtccttctgtcgcactccttctgcattctccccagcacctatcctgagccgtcctactaccctatgagttagaacgggtctcgggtggtgttatctcccaactagtagccctagtggctacggtgtcatctttgccctaatatgtgtttgttatcttcaattgagggatggtgaacagtcatgcttaggcttgaaggccttgtgtacacagtcagaaccacttggaattctcagggcctgggaactaggagagagtggatggtggcctatccaggtcaggtttctgctgtcttggatacatgtggtcactgagcaactggccctagtccttgacttttcttccatgggatcctttagtaagtctttcaacctttccaggtcagaatggtgacatagagtcagtagcagagctgtggccagctgcacaggggatgtgaagcccaagctgtgcctgccctgcccgtgggtccttctctagtgctcagtgagcagagggagagaagggaacactgaagccaaaattggcatgagctggagaggcagaaatggtgggctcctggtttcttccagagaccttcacactactgtctgcctctgtctagctgctgttgacctcatcataagatgaatttggttcctgctccctccttctgtcttcatgttcttacccagattcttagcatacctctagcactccttgaatcacgtgtctgtaagtcaagccctctgctgggtgcttcaccccttcttcaggctcttctcccctcacctgctctgatgcagggcttttattactgcaatgcctgcctgagcttctgctgcctctccagagggctccgcactgtcagtgagatgctttctggctcttggctgccttctgcttgctttgctcaggagtcaagttacctctcttctttttcatagctctgttagtttcagatgcccaaggctgcccctctgtctttgtctgcttggtgctccagccagaaaagctgccttcgtcctcagtcctgcagcatacgatgggctccacgtgcttcctggccacccaggctcaggccgactcctgctttctgtttcagtgacttcatgtaaacacttgtgctcacagtccagtattgaccagcatgtgtctgtgaccacagagaagaagcatgacaattatatatgtgtgttatatctggctggggccagcctgtcttgtgtggtgtagaaccctggcaccctcaagcctagttggcaggaatgtgttggagttcctgagagttgtgacggtctccttgtggctcctggcagctttctgctctgtgcccctctaccctttgggccctcactcatgtacttgtctcctcagcccgtgccccgaatcttggtgcagcctaccttctcagatacctgggcaacaaggacagaggaggtgagtcaccaggttggggctgccccacttgcagaggtggccctaggatcctttggtcaattcctgcctttctgtctttgcttcccactttaataattagctacaatgtaggtcactgccttctccatgcacaggctccttgttacactttgctattttcaacctgctaatcatatgattgctaaagtttttggtgcttgactgctaatgtagtctgtgctttaatagcccactgctaggcagagggggtttctataaacagaactatctttttcttgtgagtgtttgcttaattctcagttttacagttcattctggtccatgttatcaacgtgaaaagcctaatgcaaggctgggagagaactgtttcttctggtctcccacagcttggcagtgcttgtcatcctgctagcaggagacccccctagtcccaccatgccttcagtctttcagaggatggctcatcttcataagggaagtaatacattcagacaacagcaaacagggtctgatgatctgagggacaattgaccctttaggtagtgccctattgtgaaaagtcccatcttagccatcccaaggcccctctcctgggagtattgtcggtggtcaagtggtcatgtggtatttaggctggcagttttgaccagaagcagcactcactggttaggctactgtgtgcctggctcctgctgctcatcccagtggctcacagcctttggaaattctacaggcagcaaataggtttcaagtgataaatttgaattccagccaagtgaaactgtttacagggtgctgggatggagctggaggctgtgtcatcttccttttgccatctttagtctgccttcactctacctggcttgtcccttccatggggagcatgcacatgcccttcagcttctctgggcttcactgtaaatgactgtttgtagttcccgcacccctttcccaccagtgatccaagtggggcattggaacacctgtcacctgaggtgctctgtgcctctccttcatgccactctggctagggtggaactagaggtgactggatctcactgatgggtgagtatggaaaggccacaggtcatgtccagcttctcttgtagctctgtgcacttcccttgcatctagcaataagaaactcgagtaggaaaggaaaggaaaggaaaggaaaggaaaggaaaggaaagggaagaaggaaggaagaaaggaagcaagcaagcaagcaagcatgtccaagttgcagaagaaaaatgattgaaagatcgcctaatctttcagcatgtttatggcaatgacagttattgatctgctggattgagtaagttttcagtcagagccccatcacaaaaatgggctgttaatctccagaggtaccgtgaattccctcccccacaaagtgtgccttgtgggcaaggaaggcttctggaagaaagcaggaatataaatgacagttcacgggaaaatgcatgatttatcaaaccactgagttaagccaagtaactggaagagacttatagatcttagctccttcccagttcaaataaatcctgtgtttcaaatgaaaagtgaccatctatgcataaatattgggatacatctttacttttctgcgcagtcttccatcttgttcccatcctgtcttctccttccccagcaccgcgggttcagaattgggagatagtgtttgactccctcagacagcttgttatctaatagaacatcctgtgctcactcccaaaaccctggggctagcgggggctgccgtcactgtgaactcctggcttcgtgtctgtgccttctgtctggtaactcagacagtgatgtgaaaggccactggctctgtccttgcttagtgacgatcccttggcatatgtcccagaatcagaggcccttaggccctgacaggacactaggagccgaaaagcaagctcctagggaaagagccctagctataggcagcctgcgccccttccttgtccctgcctcccagcctgagcaccccgccagcactgtctggggtcagagcctcatgtgcctacattgcttgctaaagcacttgcagattgtctggtgaggtcatcctttggattttgccagagaaaagtgcttctctgctctctttagtgcgtttcagtcctcctctgaggacagtggaggttgagggcatctgcttccatgggaacagatacctaggaccaggggagctaggatgggtggggtgaggtttagtgtgtgctgcttcttcctggagtgggggcctttgcctcctgtaatgccctcctgtgcccaagtgcagggatgagcatctctgtagaagatgcagatgcagcggggtctggtccattgtgctcagccacacccaaacacagacgtacagcacagtgttcacctggcatttggttcctggaccaaggcaagctctgactaggtttgctcaggtgtgcactgcaccgagccaggaacagctcctacctggctcagcatagatctggtagtgctagcccggtgggctttgatttggtgggaaggcctttccaaccttccttagtatgccttctgtctttctgcaggctcaacaaggcagccctgggcctagtggggctttggaatccatggtgaagatggcggcccctgcagtaaagatctgtgacaaacctgtcaaagtgtcttcccctccatctcccatggtggttactcagcccccagaaggacaggatggaccacccagccctttgagtgaagcttcaagtggctacttctctcacagtgtctcttctgccaccctgtcagaaacactcaccttaggcctggacaccacaggcctcggcagccagacgcctggttccccccctgccctgtgtcaggtcaccccagagcctgagctggctttcctctcctgcacactaagccatcctcctgccccagaggaggcccacgtacctgcagctcctactcaaagcacagagctggaggttcccagagcacctcttctttctgaacccgcgtctgctgtacccacgtccccattcagaatccggaaagtgcggacctcagagcttaagtccttcacaggcatgctgggtggtgcctcctccggagcagaggaggaccccctggcttcagaagaccccagcaatgctaggggacagactctggggaggctagaagtaacatctgactctgaggatgccagcgaagtccctgagtggctcagagagggagagtatgttgttgtgggcaccaacaagacgggcattgtacggtatattggaccaactgatttccaggagggaacatggattggtgtggagctggatctgcctgcaggtgagtagactgcgggtgcccgtgctgaacatggccctgctgagtgtggactggcaggaagggaacatgggatgtgctgtggaccggagcgcatcagactccttgagcctcctgacccttcataaccagaagctagcttatctaaactctcagaatccatcagagctccaaggtagtcactgaaaactgctataaactcagtaatactttaaatgtttttctcttgagtccttaccagctgtgtggcccaggctggtttgaactgacttgggcccagtgatcctccagctgtagccttctactatctggggctacaattaggtgccaccatacccagtgttctttgtaaagtcacagcagcagctctgtctcaggccacattctgtgctccagagacgccaggacacttaggggtgagcacgagcgagatggcttaggtgaggtcaggtgagagtggtgcagactcaagtcagactgcagagctcagggtgggcaggaagcgggaggccctaaagaagcatgtgttgcgacatctgtagctgtttttccagtgttgttttatcctttaagactaggcttcccttgaggcccagcactaggccctgtgtctgacccagcctgtggcctcttaggcactttgatcccttgttgtaagcacaggccaaatggtttgcttgggtacccatttccaacctgggccatgtggagcatgcttactgagctaccctaccattactgggatctgtagtatcttgtatttgtcacctcacagggaaatcccatatccactggcagctgtgccctgctcagccctgggtcacagttaatctgctttttgttcccaagtttatggagggccatgatctggggttgggtggaaggaaacttctgtgcctggcatctttcctaacatgtggcccgggtccctttgtgtgcagtgccattgcagctcttcctgtttctgactgaggggctctgccgcttgtgtctctcatccagcctgtggcctcaccagtccatttatccctggctgcagacacaggccaaaatgacacccttgtccccgatccgagtgcttcctgtgtattcactatctttaaaaataatctggcagagaataccttgatttggaagtggttcaagatgttaactgtagtagaggctggaaaaaatttcaaatctgcttttcccaaagtgcaggaataagtctgtgtctgcagatgaactcaagaattaaagagaattaggaaataatttaactcacctacaggaactaagtacgtgcattgctgtgctaggttcgaacacgctctggtgagcaacatctcctccttgacttgtaattgtcagaggagaaatgctaagggaataaatacattttgataagaacaagtgtgctgagggatagaggagggtggctgaccggaacaccacaagctgtccagacacacagagggtccaggaagcagggctggcaagttgggctgtcgccagggtaaggccaggcagtgtctcatgctgctgaggggggcccagctttctgtgtttgaggactagtaggaaagtggcctcagaggcctgcggggcaccaggtgcccgtatctgagagtcttgtggtgagtagtgcagtttcatcagggactgaaaagatgacccctcgcagagcacaaatgggaggaatgggaacaggaagaccgctttgagggttgcagatgtgtgagtggggagggctgaggttgaggtagtggtaggtatgggagcaatggtcagggttcgggaagacgtgtagggcaggtggaaggggaccatcaggaggagtgtcaaggtgacagctaatgtgtgctatcagaacaggccacgaacacaagtccctgagttggaaaggctgaaaaattgccgatcagtgtaggatcaccgtctcaggtgatccagagtcacagagatgataggtgccctgggggccaagctgtgggacagtcatacctggactgagctgggacatgggacattaagccagagccttgcttgcatttaggaaaggagctggtgcccctggaggagcagcagccagctctgccttgatggctcccaccttgctgcttcatccttcagactacaggctaggggctgcctgtccctgataacgactggttgctgtcctgagaggctactgttctgggcactgggctcactggcctctgggttgggtggcttggaggtagcagcatgatggatgaacacagtaaagaagatgactgacaaggcggctccatgatgcttgtttccttccttccctgcaggaaagaatgatggctccattggtgggaaacagtatttcaggtgcaaccctggctatgggctgctggtgaggcccagccgggtccgcagggctgtgggcactgggcgcaggcgcagttcagggctccagcctcagggagccccagaggtccgcagaagtgctaccatctcgggctctgccaccaacctggcttcactgacagctgcactggccaagggagacaggagttacaagaatcctgagaaccggaagtcctgggccagctaagatgcacctcccttgtggactcgaacaggaagggggagacctggctcctccatgggagcagggccatgaatgctttttgcacgacgcagggatgctggacaatctggttccctgttccctctgggaagctggaagctggatttccttcctctgcttggcagtggcagaggccccttagctatgctcccctggttaggggtggaaggttccaggagcccagagactcgtgggatggagccagcccagctcctccctgcctgcttgaggatgggggagggggttcccagccagatgtgttgggctcccctttccttattctgctgacttcactaatgtcttaatttaagcaatgatcctaactggtgacttgccctcacagactggacttcccctgcctgggcccagcacacacactaccctctccgtgcaccggagattatcagcctcccctcggccacacctcatcctgctgcacggctggctcacagggtttctaagaggcatctttgtgggtgtcccggtgtctttacattcaaaatcttttctgctggccattcatttcctaacaggatgcttgaactatatttatttaatttatttttccaaaagttaaaatacttcacaatccacaatcgctgtctatcccaacatgcctgcctgtgctttctggcctctggctggccagagctgcagcctctatcttggatggtggttgctggaagtggcagccatcaaatgaaaccagctgcccttgtgttacttgattggagacaccatggctttactgaccctggtgggaaggctgacccagggttggcacggatcgagccttcagtaccttgtctggatctgccaggcttcagggagctggaaaatgttttgactctgcctgtgcctggggccagcagctggccaggcaggtagtgagggcagaaccatctccatttccttctgtggatctgggctggagtcatggtatatcccagggcattaccaaccacctgtttgctgagacgtgcatggcctttgagtcccagagtgttggtggagggctcagtgggtagatcagagtcacctagtccctgttgtcccaggccctgccctgccttccacctcaggctgtatcagtacacaggttatccttggcagtttgtttgaagtttgactctcagattctcgaagaaccacagctaacaggtgtctgtagaggaattggttctgtgaggacttaagccttttaaaggaagtagctcctgccaggtagcttctcagaacccctcagcctcctctggccattgtggcctgtgctagtattgctgacactcagtctggactgtctgcattgtctgattagcccagtataaacttcactaccatctgcttgcccaaaccctgaccagaggctgcttagagcgctaggaggatgggtggccttcctggcacaggtgcagactctgcctgcaccccagcctgggagtcaagtgtcactccacttgtcaccacaatctgccaggagagacctgcctctgttccattcttgaatagcacagatttctggagctgccagctagaggcaggcaccaattcagtaactcctctccctcagctggcatcttgggatacgcaccaggtgagttagcagtgccagtcctgcctggccactctatggaagcccacagtgcttctgactgtgttctagtgagagcttttctcctgtcagcatccacagtgtcccctagagagcagtgtcccggagtcccatcctctaggatggccatgcaatggctgctagggagagaagtccctgaggatgtaatgccagtcgtgttaatgctgtgggaagggacattgtgccacctgtcactcggatggtgtaaaacgggagaaagttactattgacttcatctcgctatccggagttctcaggaagtcctgaggatctcacttggccagctgtcatcccgtggttctgggaccactgtctctctcccagcacccccttcccttccctccctgctcattggatctgaggttccctagcctttctatttccaggctgcctaagaaatccccctgcctctgaaagtaataccatttccacagagccttgcaggatactcttcatgtgaagcgctccagcttcacaggcaactggccaaagcacatgggtcctccagtggctggagggtgttttgtgagggcagtctgtctgtctgcacagaaggctctgctctcatgcacttggtgctcaatgtggatgggatcttttgggatctcatggcacacatagcaagtgtgctagaagtttatcctcgtgggtgttccttatgagttgttcctgtggccgagaggaccctgtgttcctgtctgctttgagggcagggaggtgaccttgggaaagctggcactttcgggtgggtccgaagagatggggctcaggtgcttgctggtcttctgggtttgctgagcacatattgcactctgaccttcatgttgcctgtgggccggatgaagacagtgagctgtgttcttcctgggctctcatgccagaagaggctagacaggccagctgtagcttcagctctccactgactgccttttggagcagactaacactaacttgcagctggaaacgtgatgtataggggctgtggttgttaaaatgtcaggtagtggagggtaggtggtgggtgtggggttaggtgcccatgtataagggcagagggccagtgtttctgggctgtgtttagtggcatgtcccctgaggagttgcacatggtgtttccatgttttcagttttctcaaccacttatcatgccttaggggttctgtgtgggaagcaggtgagtgacccatgtagcatttacctgtctgtccaagctgcctttgctacgtgttgcccatggatggtaacttgaagcttctagtgcctcaaggcccaggccacctcaggtcagagaccatagggccatctctagtgccttccttgggaccagtgtctagcctgtgcttctagtcccagacactgcccaaaacatcttagtctatatgctgccttccttttgtgctgtggacaaaaattgggaaaagcacggctgtgtggattgtgtaaatatgagctcatatctgtgatgttgattccaggaatccagtgatttggtacatgttaaatgggaattaaaaatccaaagaccctgtaatgaatagtaaagatgatgatttatgttgtatgaggaaccaaactattgtaattttgtaccatacatacctttccatcaagtgaccaacagcttctaaataaatccaggtgatttcttgcttatgtccgaggtcaagcataactgttcttgcctatcctcaccctgggcttcagctgactacactgtcccttggtggtggtcctggggtttccagagagcagcaagccccagggcacaaacttctgtgacccccctagatgtggatcaaagaccctggaagtccccattggcatcttggtccctgtctccagtccctcactcatttcagccccttatagaagccaggcagcatcagaaactcctgggggactgagactaaaaggaagtggagcttcagggctaagaataggtggctctgtgtgtgtgtgtgtgcgtgtgtgtaggttccctgatttcagacagggatttcaccatctgctttgacctatgattgacataggccctattatggactaaactagagaacaaagtctttctactgctgcacatagatatacactggaacagtggttctcaaccttcttaatgctgcgactgtttaatacagttcttcatgttgtggtgacctgcagttatttttgtaactgttggtgcttcataaatgtaatgttgctactgttttgaatcatgatataaatatctgtattttccagtggccttaggtgacccctctgaaagggtcaagacccacaggttgagaaccactgcctcagaacaaggtgttttagaaagaggaataagttagggctatggaacctgcctttagacctgcctagcaggaagcctgccctttctgggtttgtgctagggaagggacctcctctgccacccatggggccccactctcagccactctgctacagtaaagcattgtttccagggttcaggactcatgtttttctccctacaccaaccatcattttgcccttgtctcataaataaaatagcctgagaatgctgggtcaagggcacctgnnnnnnnnnnnnnnnnnnnnttttcagactgcggttatctagatactccaggagaggtctagtctgtaccaagccctggcatgggctgtagtgggtgtcactctttgcttactgagtgactcaagggatgtgggttctgatcctgggcctagaggagcccaggaagtcacccttggatacagagaggagagagtaccccagggagatgcttgaaataagggtttggggtcaaactctgcagacctgtgaggtagggacaggcctgtcctagcctccatcctgatctgagctgtgctgtctgaagcatgtctgagcatgcataccatgaagggaaatgattcgcagtcatctaaggacaggtggagagagtccctgcctgggcgacagggaaggctggcacttggccttccctctgctcaccactgaaaaccagaacagggcgcacggagctgccctttgcttctgctcctccagatacagctttcagagttggctcctttaagaggctcagggtgggcaggccgcagcaggaaatggagagagcaaaagcaagctacagatccttaagcttggctgtggtcctggggcggagccttactggatgtgtgccccccagcccccaacatgaagtggtgatgggttctgctcagggtttggagctgtgatctcttcaactcccctgtcccttggcaaagtctaaaaggcagagctggggcctgggcccttgcctgcaaaaccaaaccaaaccagaaactgccagggagggtgcacagacagacccctgtgcccacttcagccaactgggcacaaacaccatccccatgaatatctggacccaaagaaatcccggacagccttgctcagttatacattttattctctaataggtacaatactaaaataaacacaaattaaaaaaaagttttattaaaacaaaactgtacaaaaaagcagtatactacattttaattacagaacagtctactgtccaaaaggcactaatccagaataggagatacaatgaaacaggactcattgaactatttaatcaatacagtagagcacttgtttctttgcccatttacaccgagaaacaagggcttcttgctacagtcatcacacattgttagaatccgagtcctactgggaaggtgcagtatcactccttagagcaggctccaccaggggccaggagggggctgggagggggtgggcagcggtgggtgcccaagcttgtcttggcctctggtgggttggttctggccatgattggcagctactctaacccctctcctgtttagcaccggcaaagtgggttctgagatgctccaggtaatgaattggacctctggtgacagctccgataggggaggcatctggtgaccctgtctgaaagggcagcagctacctgggagacatggcccagtggcagccaggggaccgggagctacaccaggcaaagctacctgggcaatggaaagaagtctccccttgctccctgggtctgtgagtatccaacgatcttgtctgggaaattggtttctaaagagggagtttgcttcccagagccgagtcagactgccatcccatgcctggccttgggggtgcaagcctggccctgtctgttaggtggccacacagctccctgagcccagactctggcctaaggaagaaggatactgcagctttccaaacagtgtcacacagagaagacgaagacaggtatctgatgttaacaaaaataagtcacaaagaaatggggttaaaccaaatctcttctcacagcgccctatactacaccctccttctgcttagcagaaaattgtacgtacacaaaaatacaaatacacaattttgtagaacagtctgatttttaatatatttatatatatttatatttatacgagtggcaggttagttcattatatagagctttttgcacttttggctcatatgcaacaaggcttataagttcagctttagctttcattcagattttatagcttttgaacagatttttcacatttaaagcagcatccaatttgcactaggagtctggtgattatggggaaagatggggttagcggttatgggggtggggtggtatacattccagtgtgtgtggcatgtaaggaggattccatgtggacagagcttgccatgacgaccccttgaggtagactgaacaccttacagcagactcagacacaggtgtgattcaccctcagggacacatggcacacaagatggggacagagaccagagaagacaccaaaggggaacacagagactaagacacacaacggccaaggccaggagggcgccctgccccctctccgactcatctggcaggatcctacacagccattaggctgaatacctgcaggcaacttcaagacatctggtccctggtgtctggtcagaacacgtaagcctgctttccacttcccagctggccatgccagcttgctcccagacccacggtgaactatacacatgctgccctcaacaggcgtgcatttggctcttgttaggatgtccaagtccagctagggcccagcatcctggcctccccgatgctctgactcaaagctgtcgtccctcaatttgcatccggttgacattcctcaattacaccgggccggagaggtgcttggtaggtagaccatggacactgcatctagagggtgacacattcctcaggggcagcatgggttttgcatgtgccactgcctcccttttgccactacttggccattcaccctactgtgttcccctctctaggtgaggcagggtcatctgcacctgttacatgcaagcacccagtgtttgcattactccactgtctgaacaaaaatcctggatcaatgaaaataaggtgcctgcgtaatagattgttcctttctacttgtcactgttgtaccaactgagcacagcagtccatgacctgttctatacctcatgcaaataaaaggcccagatctagctcacactttaattattcctcaaaagaaacagtctctcactcattttaaagaatgcacattggatcttactacgactctactgctgatggcctccggctcctcgtcatctgggctgtggatgcggtcagggctccagtacgcacaggtttttcagtcatgatccctgcctgctggctctcttagaactctgctcagaggcgactcactcctgttcttcactcagtagccaccgagccctagctaagtagattccttaaaacttcctctgacccaaggtcatagtcacatcaacagaaggaacaaaggaaacagtgacaaagccagccctctccccttgcctgccctggtgaccactctgcctgcagaatggcagggacactgggttggggagcagggatgtgcatcacacctgtcctgaggcgaggtgcatggtgggaaggacagggcacaggccgactctcaggcaggtcccagaggtctataacttgcttaggcacttaaacataaatgagaagtttgctctagaaagtactgcagacccaacctaaccatggccatggaggagaggctgagcccatggggagattggagaaggctgtaggctcttccagggcagacaactgccacagtgttggcaccttgcagccagtgaacttatgtggtggctcaggagccagtttggcatccgtggtccctgatctgcacctagtgaggtacagactgccctgacacactgtttagggtcattgtgaggaaccactaagaaagaagagagctttcagagtggaactgtggtagaaccaaagagcataaaggagaaagcttgccagaatggccagtgcttggaaagaaagagctctacccaccctgagaactttggttttgtttttctggtgcccattttcagagatgagtgatgagatccccactgctttcagtagagtcaatgtaggcatcaaggcaaatgataaggggatgctttctgaaagcagccacaagtgctcacctccactcagcacacatgacgcacgcacacacacacacacacacacacacacacacacacacacacacccctcaagcctgcagatggggcccaggaaacatcagggagtggctgctgtttgcattcatacagctctaatgccatttggttttctagtctaatggcctcggagagccttggagtggacagatggcctcacaggtttaggctgggctcttaattccagtaaagcaaaatgggaggggtttctaggctaaggatgctacaaacaagactggagagattcaacctggaggtgccgggaagcaaagtcctcgcaggagcaacaaaccttcacacaagtccctgggaccggtctgtcttgagccctgggaggtgacaggcactgatttcatcactcaatttccatggcacctttggctaccaacaaagatgcaaaatcttgattataccaaaatgaaaggcacccatactctttttttcttcaaaccaaggcgtttggggcaaaatgaagccattgttaaggcctcgttggtcagccagtgtcacacagcatcagcagccccacaagccaggctgcccagtccttcagccttcctcctcaggtgcgcttacttctcttgggctttaggctacccatgatgtgacagatcaaaaggggacagtgacctggccaactctcagagaacctaattttgtaagaaaaggaactagaaatgatggtgatgatgatgatggtgtgtgtgtgtgtgtgtgtgtgtgtgtgtgtgtgtgtgtggtgtgtgtgtgtggggctggatgaaggagtgtagcaggtcatttggaagatgtccctagtctggtgtcactgaccagtagtcattaaatggccacattaactctgaggcagcttgctccattcttggactctggatattaaaaacttttattctacgtgtaaatttgaagaaacatctacttaagggcctgtcagtgtcgataaggagcaaaggaagccatggcagagtcacgtaacaccagagagccagagccttgagctccacagtgctctccttcctgtctatggtagagggacagcagggttcgtaggcggattcaacacaaaccccctggaactcaagcagggtgcctcaaagtccctggagctaagcaccggaagaactgaaaagagcaggctttggggaagccactgcagggcaggtggtgagggctggagagcagcaccccacagtgatgtgctgtctgaggatgcagctgcagagacaagaatggaagtggctgtggcacaggagtgaccctgtgtgcctgagaacagcaagtgggttggcagtgacctcagcagagtaagactacacattctcagataccagcatctagattcttacaacaatcacttctggggtttttctgggagggagggaaggagggagggagggagggagggagggaacaaagctattcccaggcaagtaccacctacactgtccttgacttgagggctagttttgtgttttgaggtggggtatctgtggtatgcagggtgtgtttaatcagagtggcccccttgagcactggagcagataagcttgggaacttatggctacacgccaattccattcctgtgagtgctcacaggtgaccataacatgctgctgatgtgcagtacatgtcacacaagtcacaaaattagctccaccagtgacttttcagaacgggatcagaaggcggccctgacctctaatggacatagcagttgctcagcagctggaaaa

SEQ ID NO: 498 - DNA, 5536 bp, Mus musculus
acagcccccgcccgccgggttggcctcggagagtttgtccggtggccgaggtagacggaggtgcagtgagaaccccggcggtagcacgatgggagactccaaagtgaaagtggcggtacgggtccggccaatgaaccgacgagaaattgacttacataccaaatgtgtggtggatgttgaagcgaacaaagttattctgaatcctgtaaatacaaatctttccaaaggagatgcccgctctggaatggacacagtttctagtgttgccttggaccttgtggagactcaaactgaagtgagtagtgagtacagtatggacaaggccatggttgagtttgctaaaatggatcaagaactaagccattatgttaaggctgtccagtctacaatcaatcatgtaaaagaagaacgtccagaaaaaatctttgcttatgatcactgtttctggtccatggatgaatctgtccgagagaagtatgcaggtcaagaagatgttttcaagtgccttggggagaacattcttcagaatgcatttgatggctacaacgcctgtatctttgcttatgggcagacagggtctggaaagtcttacaccatgatgggcactgctgaccaacctggattaatcccaaggctctgtagtggactctttgaacgaacccagaaagaggaaaatgaagaacagagttttaaagtcgaagtgtcgtacatggaaatttataatgaaaaagtccgagaccttcttgaccccaaaggaagccgtcagacgttgaaagtgagagagcacagtgtgttgggaccctacgtggatggactttctaaactggctgtcacaagctacaaggatattgagtctctgatgtctgagggcaacaagtctcggacagttgctgcaaccaacatgaacgaggaaagtagccgttcccatgcagtcttcaaaatcaccctgacacatactctgtatgatgtgaagtctgggacatctggagagaaagtgggcaagctgagcttagtggatttagctggcagtgaacgagccacgaaaaccggagctgcgggcgacaggctgaaggagggcagcaacatcaacaagtccctcacaaccctgggtctggttatctctgccctagctgatcagggtgctggcaaaaacaaaaataaatttgttccctatcgggactcagttctcacatggctgctcaaggacagtctgggaggtaatagcaagactgccatggtggccactgtgagccccgctgcagataactatgacgaaaccctctcaaccctgaggtacgcagatcgagcaaagcacatcgtcaaccatgctgtggtgaatgaggatccgaatgctcggattatccgagatctgcgggaggaggtggagaagctccgggagcagctgaccaaggcagaggcaatgaaatctccagagctgaaagatcgtctggaagaatcggagaaactcatccaggaaatgactgtgacctgggaggagaaactaaggaaaactgaggagattgcgcaggagcggcaaaagcagcttgagagccttggcatatctcttcagacttctggaatcaaggttggggatgacaagtgcttcctggttaacctgaatgctgacccagctctgaatgaactcctggtgtactacttaaaggagcacacgctgatagggtcggccaattctcaggacatccagctctgcgggatgggcatcctccctgagcacggcatcatagacatcacgcccgagggccaggttgtgctgactcctcagaagaacaccagaacatttgtcaatgggtcttctgtctccagccccatccagctgcaccatggggacaggatactgtggggaaacaaccatttcttcagactcaatctgccaaaaaagaaaaagaaagcagagcgagaggacgaggaccgtgaggcatccctgaaaaacgacagtagttctgagcagctggatgccgacggcgactcctccagtgaggtgtccagcgagatcaacttcaactttgagtatgcacagatggaggtgaccatgaaggctctgggcagcaatgacccaatgcagtccatactgagcagcctagaacagcagcatgaggaggagaagcggtctgctctggagcgccagaggctcatgtacgaacacgaactggaacagcttcgaagaaggctgtctcctgagaggcagaactgccgcggtgtggaccggctctccttccactcgcccagtgcccagcagcgcttgaaacagtgggctgaagagagagaagcaacattgaataacagcttgatgaggctgagggagcagattgtaaaggccaacctgctggttcgggaagctagttacatcgcagaagagttggataaaagaaccgagtataaagttaccctccagattccaacctccagtctggatgccaataggaagcgaggctctctcctcagtgaacctgccatccaggtgagaagaaagggcaaaggaaagcagatttggtctttggaaaagctggaaaacaggcttttggatatgagagacctctaccaggagtggaaggagtgtgaagaagacagcccggttagccggtcctacttcaagcgtgctgacccattctatgatgagcaggaaaaccatagtctcatcggtgtggccaatgtcttcctggagaccctgttttatgacgtgaagttacagtatgctgtgccgatcatcaaccagaagggagaggttggctatcactgcctcagtcagcagacagctcaggggacagtggcaggccggctgcatgtggaggtgatgcgactcagtggggctattggggagaggattgcaggaggagacgatcctacagaggtcagctctgaaaaggaagcccaggagaacaggctggtctgcatggttaaaatactccaagccacagggttgccgcagcatctgtgtcactttgtcttctgcaaatatgacttctgggatcagcaggagccagtgaccgttgcccctgaagtggatacgtcttcgtctcccaccagcaagcagccacagtgtatggttgtgttcgatcactgcagtgagttcagtgttaacatcacagaagacttcattgaatatctctcagaaggggccctagccattgaagtatatggacataaaatgaatgatccccggaaaaacccagccctgtgggacttggggatcatccaagcaaaaacaaggagtcttcgggacaggtggagtgaagtcaccagaaagttggaattctgggttcagatcttggaacagaatgagaatggtgattactgtccggtggaagtaattgctgcaaaagatgtccccacaggagggatcttccagctccgacaggggcagtctcggcgagttcaagttgaagtgaagtctgtgcaggagtcaggaactttaccactgatggaagagtgcatattgtcagttggcattgggtgtgtgaaagttaggccactccggtcccctaagatccacgagaatgtccatgaggaagaggaggacatggacagctaccaggatagggatttagagcggcttcgtagaaaatggctcaatgcattaaccaaacgtcaagaatacttggatcaacaactgcagaagcttgtcagtaaacatgacaaaactgaggatgatgctgaccgagaggcacagctcctggagatgcggctgacgctcacagaggaaagaaatgcagtgatggtgccttctgctgggagtggcattccaggggcccctgcagaatggaccccagtgcctgggatggagacccacattcctgttatatttcttgacttaaatgcggatgatttcagctctcaggataatctcgatgacccagaagcaggatgggatgctaccctgactggggaagaggaggaggagttctttgagctgcagattgtgaaacaacacgatggagaggtgaaggcagaggcctcctgggactctgcagtgcacagctgtcctcaactcagtaagggcacacctgctgacgagcgagtgttcctcatcctgcgagtgactgtccagctcagccatcctgccgacatgcagctggtcctacgcaagaggatttgtgtccatgttcatgggcgccagggctttgctcaaagtctcctcaaaaagatgtctcaccggagctctattcctggctgtggagtgacctttgaaatcgtctccaatattccagaggatgcccagggagtggaggagcgagaggcactggcaaggatggcagctaacgtggaaaacccagcatctgctgactccgaggcctatattgagaagtacttgaggagtgtgctggccgtggaaaacctcctgactttagatcgcctgcgtcaggaagtggccgtgaaggagcagctgacggggaaggggaagctgagccgaaggagtatcagctcccccagcatgaacagattgtcaggaagccggcaggagcttagcccatcccacagtctaggcagcaacaaggctcaacaaggcagccctgggcctagtggggctttggaatccatggtgaagatggcggcccctgcagtaaagatctgtgacaaacctgtcaaagtgtcttcccctccatctcccatggtggttactcagcccccagaaggacaggatggaccacccagccctttgagtgaagcttcaagtggctacttctctcacagtgtctcttctgccaccctgtcagaaacactcaccttaggcctggacaccacaggcctcggcagccagacgcctggttccccccctgccctgtgtcaggtcaccccagagcctgagctggctttcctctcctgcacactaagccatcctcctgccccagaggaggcccacgtacctgcagctcctactcaaagcacagagctggaggttcccagagcacctcttctttctgaacccgcgtctgctgtacccacgtccccattcagaatccggaaagtgcggacctcagagcttaagtccttcacaggcatgctgggtggtgcctcctccggagcagaggaggaccccctggcttcagaagaccccagcaatgctaggggacagactctggggaggctagaagtaacatctgactctgaggatgccagcgaagtccctgagtggctcagagagggagagtatgttgttgtgggcaccaacaagacgggcattgtacggtatattggaccaactgatttccaggagggaacatggattggtgtggagctggatctgcctgcaggaaagaatgatggctccattggtgggaaacagtatttcaggtgcaaccctggctatgggctgctggtgaggcccagccgggtccgcagggctgtgggcactgggcgcaggcgcagttcagggctccagcctcagggagccccagaggtccgcagaagtgctaccatctcgggctctgccaccaacctggcttcactgacagctgcactggccaagggagacaggagttacaagaatcctgagaaccggaagtcctgggccagctaa

SEQ ID NO: 499 - protein, 1826 aa, Mus musculus
QPPPAGLASESLSGGRGRRRCSENPGGSTMGDSKVKVAVRVRPMNRREIDLHTKCVVDVEANKVILNPVNTNLSKGDARSGMDTVSSVDLVETQTEVSSEYSMDKAMVEFAKMDQELSHYVKAVQSTINHVKEERPEKIFAYDHCFWSMDESVREKYAGQEDVFKCLGENILQNAFDGYNACIFAYGQTGSGKSYTMMGTADQPGLIPRLCSGLFERTQKEENEEQSFKVEVSYMEIYNEKVRDLLDPKGSRQTLKVREHSVLGPYVDGLSKLAVTSYKDIESLMSEGNKSRTVAATNMNEESSRSHAVFKITLTHTLYDVKSGTSGEKVGKLSLVDLAGSATKTGAAGDRLKEGSNINKSLTTLGLVISADQGAGKNKNKFVPYRDSVLTWLLKDSLGGNSKTAMVATVSPAADNYDETLSTLRYADRAKHIVNHAVVNEDPNARIIRDLREEVEKLREQLTKAEAMKSPELKDRLEESEKLIQEMTVTWEEKLRKTEEIAQERQKQLESLGISLQTSGIKVGDDKCFLVNLNADPALNELLVYYLKEHTLIGSANSQDIQLCGMGILPEHGIIDITPEGQVVLTPQKNTRTFVNGSSVSSPIQLHHGDRILWGNNHFFRLNLPKKKKKAEREDEDREASLKNDSSSEQLDADGDSSSEVSSEINFNFEYAQMEVTMKALGSNDPMQSILSSLEQQHEEEKRSALERQRLMYEHELEQLRRRLSPERQNCRGVDRLSFHSPSAQQRLKQWAEEREATLNNSLMRLREQIVKANLLVREASYIAEELDKRTEYKVTLQIPTSSLDANRKRGSLLSEPAIQVRRKGKGKQIWSLEKLENRLLDMRDLYQEWKECEEDSPVSRSYFKRADPFYDEQENHSLIGVANVFLETLFYDVKLQYAVPIINQKGEVGYHCLSQQTAQGTVAGRLHVEVMRLSGAIGERIAGGDDPTEVSSEKEAQENRLVCMVKILQATGLPQHLCHFVFCKYDFWDQQEPVTVAPEVDTSSSPTSKQPQCMVVFDHCSEFSVNITEDFIEYLSEGAIEVYGHKMNDPRKNPALWDLGIIQAKTRSLRDRWSEVTRKLEFWVQIQNENGDYCPVEVIAAKDVPTGGIFQLRQGQSRRVQVEVKSVQESGTLPLMEECILSVGIGCVKVRPLRSPKIHENVHEEEEDMDSYQDRDLERLRRKWLNALTKRQEYLDQQLQKLVSKHDKTEDDADREAQLLEMRLTLTEERNAVMVPSAGSGIPGAPAEWTPVPGMHIPVIFLDLNADDFSSQDNLDDPEAGWDATLTGEEEEEFFELQIVKQHDGEVKAEASWDSAVHSCPQLSKGTPADERVFLILRVTVQLSHPADMQLVLRKRICVHVHGRQGFAQSLLKKMSHRSSIPGCGVTFEIVSNIPEDAQGVEEREARMAANVENPASADSEAYIEKYLRSVLAVENLLTLDRLRQEVAVKEQLTGKGKLSRRSISSPSMNRLSGSRQELSPSHSLGSNKAQQGSPGPSGALESMVKMAAPAVKICDKPVKVSSPPSPMVVTQPPEGQDGPPSPLSEASSGYFSHSVSSATLSETLTLGLDTTGLGSQTPGSPPALCQVTPEPELAFLSCTLSHPPAPEEAHVPAAPTQSTELEVPRAPLLSEPASAVPTSPFRIRKVRTSELKSFTGMLGGASSGAEEDPLASEDPSNRQTLGRLEVTSDSEDASEVPEWLREGEYVVVGTNKTGIVRYIGPTDFQEGTWIGVELDLPAGKNDGSIGGKQYFRCNPGYGLLVRPSRVRRAVGTGRRRSSGLQPQGAPEVRRSATISGSATNLASLTAAKGDRSYKNPENRKSWAS

SEQ ID NO: 500 - DNA, 215974 bp, Homo sapiens
  misc_feature (1)...(215974): n = A,T,C or G
gggaggggccgtgcaaggctttgaaagcaagagctgttgaaggctgattgcaatgggttcaggataagtggataggagagatgtggtttttgaggtacacaaactcacttgaactttttgcatggtatgcccctgaggctactctctgatgcagactagcatttctttcttttgcctttggtcctctttatttttttgagctgacatctcattctgtggcccaggctggtgtgcagtggcacaatcatggctcactgcagcctcaaactcctgggctggagcaatcctcctatctcagcctcccaagtagctggaatcacaggcatgcaccaccacacccagctaatttttcttttcttatttatttatttttgagatggagtttcgctttttctcccaggctggagtgaagtggcgcgatcttgcctcactgcaatctccacccactgggttcaagcgattctcctgtctcagcctctcaagtagctgggactacaggtgcctgccaccacgcctggctaagttttgtatttttagtagagatgggttttctccatgttggccaggctggtctcgaacctatgacctcaggtgatccacctgcctcagcctcccaaagcactaggattacaggcatgagtcactgtgcctagccctggctaatttttttttttttaagacaggatcttgctatattgcccaggctagtctcaaactcatatcctcaagccatcctcccctctctgcttcccaaagtgctgggattacatgcttgagccaccacgcccgactcttttgtcttctttctttcctcagctgcccacttttttttcttttcttttcttttctttttttttgagacggagtcttgctctgttgcccagattggagttcagtgacacgatctcagttcactgcaacctccgcctcctgagttcaatcaattatcctgcctcagcctccccagtagctgggattacaggcgcccgccaccacgcctggctaatttttgtatttttttaatagagatggcgtttcaccatgttggccaggctggtctcgaactcctgacctcaagtgatctgcccgccttggcctcccaaagtgcagggattacaggtgtgagcccccgtgcccagcctgcccacttcatctctagctcctctttccccaggaacacctgaaggtccttagctttgccttccacgttctcccccaggccgagctactgagcctcctccttttcaaggatagtgtccttaaagggggttcccactccgtactgagcagcaaagagcagcaatacaacctgaagaagttaccaaatttccagaaatctgaccaaacctcttagtccttaaagaccaggcgtcttttaaaaatctttgtatcccggctgggcaaggtggctcatgcctgtaatcctagcactttgggcctgaggtcaggagttcaagaccagcctggccaacatggcaacaccctgtctcaactgaaaacacaaaaattagccaggcaaggtggcacacgtctgtaatcccagtaactccggaggctgaggcaggagaatcacttgaacccgggaggcggaggttgcagtgagccgagatcacaccacttcactccagcctgggcataggagcgaaactccgtctcgggggaaaaataaataaatctttgtatcccaggctcctaacatagttccaagcctgtgataaggaagtgttttaactaacctaatatattacttaaaacaaggggaaaagagccatgtcatagaagccaagggaatcaaaagtttccagaagcggatgctcaataacaccaactattacagagacatcaaatgaggaccaaaaaccacgctcctagatttgcgaagggaaggtcaatggtgtgctttgtcatgacagttttagtgcaggggtgaaggcaggtgaaagcgtgattgaattaatcattggttgactaatgacaggtggagaagggaagctggtcagtgtagactattatgttgcggggagagctggctcctgaggaggtaggaagacttcgggaaattgtccttgttttttcttatagtgttactgtttgttcttgtttttccatgggaggttctcagctgaggataaggggttaatggagaaggaaaggttgaatgtatcagagaacggctaatagaacaacagtgccatggaggtggtgtgaagagtatggaagagcggccttagccttgagatgaagacacatctactttggccactgagggggaagttagtgctggacgcagtcacagaaaaaactgtgggggtaggaagtttagggaattttcacctgagagccctattttttttttaaagagataggggtcttggctgggtgtggtgtctcatgcccgtaattctagcactttgggaggtcaaggagaggggaatcacttgatcccaggagttctagaccaggctgggcaacatagtgagacccaaactcaaaaaaaaaaaaaaaaaggagagagagagagagatgaggtctcgctatgttgtccaggctacaaagcagtggctattcccaggaggtgcaatcacggcttagtgcagcctcaaattcctgggctcaagtggtcctcctgcctcagcctcccagatagttgggactacaggtacgcaacaccatgcccagcctgagccctaattttcgcagggatgtagaagcaaggtgatctggcacagagggtggtcatgttgggttgggcttgaagagaatggtgatgatggtagaagtctctggaggtgtatgagcaggaaaaatggtttggagtgctactgaggaccccactaggatcaaagatcacaaactcttcagggtaccatgtgcatggatctgtgacttcctccagctgagctccctgcccaaaatgagagtcttggagaaaggagagtgatgacataggtttagggttcccagggcatgagtggtgttgatgatacagtcaagacagaggtttagattgcagatgtattaggttggtgcaaaggtaattgtggtttttgccctaaagtaatgccaaaaaccacaattacttttgcacgaacatataaaatgaatcccggagaagcctcggtgtgacaaagggggtaagttgaggcattggaggcttaagagcgatgtctggatacttgggagtaggcgagtgagtcaggttggatgaggttgaggttggataagaatgactgcttttcatttcctaggtggagcagccaaagatcatgacaaagtccaggtgtggccctgcggcggctggttgctggggagtgtcagtaaaggctgtggacccaggagagcaccagacactacatgaagaggcagggcaagtagtggtaatgatcttattgcctggacaaggggaccagggctttgcattcaggtatctcttactcaggtcagtgtgcaagttcaccggccccaggaagtctgtttcctctctgtttctttttgagacggagtcttgctctgtctcccaggctggagtgcaacagtgcaatctctgctcactgcaacctccgcctcctgggttcaagcaattctcctgtctcagcctcccgagtagctgggattacaggcacgcgccaccatgcccggctaatttttgtatttttagtagagatggggtttcactatgttggccaggttggtcttgaactcctgacctcaggtgatcaacccacctcagcctcccaaagtgctaggattataggcatgagccaccatgctggcctgtttcctttctgttaaaggccataataatagtgccaatctcatgggattgttgtgaaaattaaatgagatcatatgtgtgaagtgctaaatgcaatgcctggcacatcataagcactcaataaataacagctagaagaggtcattgctattagtgagatctaggctttcactaggagttcacaatgctggaaagataatgtacacctgaaaaatatgtaaggggacatgtagggccttgtttgtggaaagggcaaagatttgtggaatcaaacaaatttgtgtttgcattccaactctgccacctaccagctgcgtggcttgaggcaagccatttaagctgagagtaatgataatgccatgtggttaatatcttcattctccaatgtgttaagtgcctactaagtaccagccactatacgaggtgttagagatcaagagactttaaaaagatactttcggccaggtgcggtggtcatgcctgtaatcccagcactttgggaagctgagatgggtggatcacctgaggtcaggagttcaagaccagcctggccaacatgatgaaagcctatctctactaaaactacaaaaattagctgggcgtggtggcgcatgcttgtaatcccagctactcgggaggctgaggcaggagaatccccggaacctgggaggcagaggttgcgcggtgagccgagattgcgccactgtactccaacctgggcaacagagcgagacttcatctcaaaaaaaaaaaaatattaataataataataaaaagacactttcaagctgggtgtcgtggctcatgtctgtaatcccagtactttgggaggcttgaggcaggtgattgcttgagcctaggaattggagaccagcctgggcaacacagtgagacaaaaaatacaaaaattagctaggagtggtgatgtatgcctgtagttccagctacttaggaggctgaggttggaggctcatttgagcccaggagtttgaggctgcaatgagccatgattgtgccactgtactccagcctgggcaacagagcgagaccctgtctcaaaaacaaaagacactttatccaggctcaaagagcacacagtagcacagcgtagctggggaggcagatgaaggtatgcttataattgggaaaactaagtgctctcacaaaggtaggtctcaggcaagcagggaaatcgtgacacagcaagactccatctcaaaaaaaaaaagataggacaaagtgacttctatagcctatgaagggaccatcagaaactactgaatgggtagatcaaagccataaaaagaaaactagaaatcagtttaggaatgagcagatttgcaaaatgtgagggcaaaaaatgagaaactccttatctgcacagctaaaattcaacagctctatcaaaatggctatagaatctacaccataaatacttgttgatttcctaagtacttgctttaagaaacaggtacaagggaatgccttatttactagttctttgtttctttttcctctaatagttgaaaagagagaaactggccaggtgcagtggatcacacctgtcatcccagtaccctgggaaaccgaggtgggcggatcacctgaggtggcgagtttgagaccagcctgaccaacatggcgaaaccccgtctccactagaactacaaaaattagccgggcatggtcgtgggcgcctgtgatcccagctactcgggaggctgaggcagaagaatcacttgagcccaggaggaggaggttgcagtgagccgagactgtgccactgcattccagcctgggcgacagggcgagaccctgtctcggaaaaaaaaaaaaaaaagagaaaaaagagagagagaaaaaccaggacttttctctctgtcttgctggagcctgtgctgaaccctgaatcctgttgatagttctccaatttcatttggtgttgaagcccctgaaactcccaggctgcaggttgtaacttgcaatttggtcctctgtctcccgcctatcagaggaacactttccatgggaagatatgggcatttctagtcttgggctctctctctttttttctttttcttttcttttcttttttagaagacggagtctcactttgtcgcccaggctgtaatgcagtggcgcgatctcagctcactgcaagctctgcctcccaggttcacgccattctcctgcatcagtctccggagtagctgggactacaggtgcccgccaccacgcccagcaaatttttttgtatttttagtagaaacggggtttcgctgtgttagccaggatggtctccatctcctgaccttgtgatccacccgcctcggcctcccaaagtgctgggattacaggcgtgagccaccgcgcctggctgggctctcttttaagaatcatcttcactgcaaaagtcaaaggagacagagtagtatgaacagaagtcaaaaggggaaacagctcacaggggttcttccctgcagtccctagggaggctactgtccttttcctctaaatattttcagaacattttaaatggttttgaggactttagagaaagtcctcacttcttctctattctattcttcccttccttgaggtccttaggggctttcctctcttttcagtttcagcttaagtttaaacacaatatttccatagaaatgttctcttgttctctttttctgcctgctttgactctgtttaaaaagccagattcaagctagcaccaggacgtgccatttaaaaattaaatttacctggttataaaagagatataaagtgacgtatggaatcttgggacattccaaatccttattttttataacctgaatgtagggaggtggtaattaggatgtgtgtttaagacaagagtaccaacctgtggtaaccagtctggggccatggcaaaggtgacttcaacactaaataagagcaaaagaacagtagggcaaaacaatttcaatataaaatcataccctttatgatcttttttaaaaaaaaaaaaagatagtgatggtagatagtaatttttgtgtgcattctttttcaaataatttactcggtgacctagcacaatggctcacacctgtaattccaacactttgggaggctgaggtgggaggatcacttgaggtcatgggttcaagaccagagtgggtaacatagcgagacactgtttctacaaaaaatttaaaaatcagctgggcatggtggtgcatgcttgtagtcccagctacttgggaggctaaggtgggaggatcgcttgagcctgggaggttgaggctgcagtgagctaagatggtgccactgcactccagcctgggcacagaatgagaccctgtctcaaaaaaatatatacttgctaaaattaagaagctgtcatagtgtcaaacactgagattggcaatcctaatttggttatcctgatgttgtttactttattgggctgtgaaaatcaaaggacctgctgcactaaacccactgctggtctagatgagacctcctgaagtgcagaggcagtgcccctaagaaagaaatttccttttttaaaaaagagggccttctggggtagcattttctatttttaaccttttttgaaattttgataaaaaacacgtaacataaaacttactattggccaggcacagtggctcacacctgtaatcccagcattttgggggggctgaggtgggtggatcacttgaggtcaagagtttgagaccagcctggccaacatggtgaatccccatctctattaaaaatataaaaattagctgtgtgtgatggtgcacacctgtaatcccagtcactctggaggctgaggcaggagaatcacttgaacccaggaggcagagactgcagtgagcagagatcatgtcactcactgcattccagcctgggcgacagagcaagactccatctcaaacaaacaaacaaacaacaacaaaaagcttaccatcttggctgggtgtaatggctcacacctgtaatcctagtgctttgggaggctgaagtgaggaggattacttgaggccaagagttcaagaccagcctggacaacatagcgagactccatctctaccaaaaaatgaaatataaaaattagctaggtgtcgtggtgcgtacctgtaattccatctaggtgagaggctgaagcaggaaaatcgcttgagcccaggagtttgaggctgcagtgagctatgatcacaccactgcactccagtctgggcaaacagagcgagatcctgtctctaaaaaaacccaaaaaaccttactgccttaaccactcttaagtggttaggtggcgttaagtacatttacattgttgtgcaaccatcaccaccattcatttccgcagctgaaatcttcccaagccgaatctctgcacccattgaatactaactcctcatacccccttctcctagcccttagtaacctccagtctactttctatctccatgaatttgactaccatgtgtatctcatatatgtagaaccatgcagtggttgttcttttgtgtctggcttatttcacctagcataatgttttcaaggcccatcatccatgttgcagcatgtttcagaatttcctttcttttaaaggtatttttagaccggacacagtggcttatgcctgtaatcccagcactttgggagactgaggtgggtggatcacctgaggtcaggagttcgagaccagcctggtcaacatggcaaaactacgtctctactaaaaatatgaaaattagccaggattggtggcacatgcctgtaatcccagctactgtcgaggttgaggcatgagagtcgcttgaagccaggaggtggaggttgcagtgagccgagatcatgccactgtactccagcctgggtgacagagctagatccatctcaaaaaaaaaaaagtatttttatactttttgacaacattgcttgtattgaagatactcaataacaggatggttggtaaaagggcaagtcttaccagctttctgtatttactcatctgtaaaatggttctgagttctattactatcatttaaacacatctaagcaggggtcacaaacccacaaggtccaggcgcatgtgtggtaaagccacctggaggggggccgtggtgaagtggagagacgggtctctgataaaggtggctgctgctatttagttccaatccactctgtccaatatgtaatgtaggcccagtactgcatgcacaaatctgatttcacactctgttacccaagctggtctcaaactcctggcctcaagcaatcctcctgcctcagcatcctaaaatgctgggattccaggtgtgagcccctgcacctggccacaaatctgatttttatgtgttggccaacactgttgggccaaacagaacatgtttgcgtgctggctctggcacccaggccacctgttagaatgtctgccagggctaataaaaagctaattttagtgtggcctcattcattaattcatgcaattaatgtttatgggtctctactaaaggctaggttacacatatgttaatcttatttaaaaatgtacctattttactaggtattagtatcatatccacttttcatattaaagacaagcccagagcggtcaaataacttgcccctggtcacacagtgggaagcgctgaggtgggctttgaactcagatggttttcagagcccaaggtcctgtctcaaaggagggggactcacaggacaatgttaacccgtggacctatggacactcccagaaaacgtgatttgcaacttgtcgtgaaggacgagctcagcaaacaaggccggacgtcaatccaggcagaggaaataacttgagccagggatcaaacactaagattggcaggaaatgagcaggaagaggtagcggggtccctgacgccatctattcaattgtttttcagaagaggtatcagctcttgaaggcttacttctcaatactggctgcgagagcaagaatggtgtgtaatttacaaaagccgtcattgctgtaggtaagttgtagcaaacgactcgcgcccgagcattcccgcccccgccttcgctgcggccccgcccacgacgaccctggggaactacaagtcccgccatacagcggggagcgcccggagctcgcgccggccccgcccccagcccggtccccacccccggctccgcccccggccccctcccgccgggtcaaccccgaagagtcgccggtggccgcggcagacggaagccgaacgagttcctcggcggctgcaggatgggggactccaaagtgaaagtggcggtgcggatacgacccatgaaccggcgaggtgagagccgagccctcctgggccgccggggcggaggcggcaggtgcctggcgcgcccttccctcggccgccgtggggggtccggcggccccgcccctatagtcagcggcggggcgcgaggaggggcccggggaccctgaaacccgctcccgcgctgagacgcccggctccctcttctcccctcccttcccccctggccagccccgtccctggcgccgtcgggcccctcgtgccggccccgctgccccttccgcctgcgcccgccccgcccctgcgcccttttgccctctcgtctcccccggaggttcccgagggcgccctcggccctcgcgcccagcctcgtcctggcccctcagcctcgctccttccccgccagctgtcatcgtcgcccccgcgcgcgggtcgccagcccctgcagcccgcctcgggaccgcccgggaccccccgggaccccgcgtctcgcccgggtcgcccaagcctgcaccgccttggcccgcggcgggaagaagggcagggggccaggcgggtgccccgcggcgagttccttccacctgggcgtcctgagattggggtcaggtggaggagatgcccttttcgttgtttttggacagttgagaaagttttggttttgcctgaagtctcattcatcatctctcaataaatagctaaagtgccaagattcttgtggaattgtatctttctgacattctcttaactctgcagggagtgtagagaaggcagataaaccgagtacatttaaataatctgtagacccggggagtggagagaaccccaaaagtcaggggaggaggtgggctgggtcttggctttgatagtcaaagcagcatgactgggtgagttgctttaaataagataatgtgtttgaaaacgctttatatacaaggtcctgtcattgggggtcactattactgtctcaggagatgactttgccattgatgagactttgaactaattagaatcatttaagtaccagagacaaagttgtagcttcttagcaaaatcaagtgttgtttaatttttatgtagaaattataggttgttttcctcttctttgctttcttttgtatatattgagacatacagatcaaccagttgacataagctttgttggtttgtccttctcggggaaattggtttctcgcttggagttatctcatctatgggaattgttttgtcctgttcctgctaggtccgattaaagctgtcaggtgagtttttttccctaagaacttaattactttaagttctcaactagtgcaagattgagtcctgctttgcttcactaatctcgtgctctgacaacacacaataaacgtcgatacaattctgaaaattttcagaagcatcagtttttaaatattcaggtatctgtatttcagtttacttccagtttaccatcacaataatttaaagaaagaagccaaatgaaacataacttatctgggaattgattctgaaaggatggtttcagcacattcttaaaatttccttttcacaaaaaacttggaaatgtcagtgctaaaaagaggccgctaaccaaccaccacaaaagacatctcagatatttagagccctttccctctccctttccccattggtttcactttttgagggaaattcttatgcttttctcttataaattgccattgataaggttgtaataaacatcagagtttagaggaaggcaaagaataatagttttagctgtggaacggatgtgagctgatccttgggttcaacaatcattttgaaattgaggtttacccatagattccattagcctatatagagaagtgcattatttggtgtaaagtacctcctgtgttcacttagtgcccattcttagccttatatttcctgacgtgcatgtggacttcttttttcagtgattaccacacataaatttgttcttttccatttttgttatgaagtaattgttcacataaatataaaggttattatggaatacagtgtggtgggattgtaaatccagtgatttttaaaaattggtgtccaaagtttgtataaaaagactaaaacaggccaggcacggtggcttacgcttataatcccagcactttgggaggccgaggcgggtggatcacctgaggtcaggagttcgagaccagcctgcctaacatggcaaaaccctgtctctactaaaaatacaaaaaattagccgggcgtggtggtggacgcctgtaatcccagctactaaggaggctgaggcgggagaatagcctgaacccaggaggcggaggttgcagtgagccaagatcgtgccactgtgctccaccctgggcgacaagagtgaaactctgtctcaaaaaaaaaaaagactaaaacaaaaccatatttctttccagtaatttccttttttttcttccttgtatgatctgtaggaacctttccagtaattttgaaaagaatattactttgaacagttattagtattatgtaatactgtataattatgacaaagagtaaaacttgagtcctaatagtttctatcatataggtgccggaagcaaccttataaatcgctatctataaaagaggacggggatgagaatgggttactgtgatgatgtagttttactgtgtagactctgatatttggaatcacattagctatcttttgaggaaaatctgaaaatttccagaaaactctggtgtattaagttcttgtgtgattcagtggttgtgcttaggtgtttggagttttaaggtggttagctgatttattatttaacagttatcctcgaagtgagagtattttagtctttctgctaaactgtatgtgggtttgggaaccttagttatttgaaggttaagcattaggccctaattcagtaacaggaagagttgtaatggctaatttgtcagaaatatttgtctagtcatacatttattttaacattccactaacaaaaggaaaaagaaaaagaaaaaagttcacatactttcttcatcctaacagcttttcatttccatgccagtttgtgctcacacgtgtatgtaattttacataattttaatattacaacctttattttgcctttcttcatctgagatgcaaagctaaacaactagagaaaagggtaaatttttgtcacaagatcttcaagttctatttgcagatatcgtttgttttccagtgttgttgttcagactgtacagctaaacagataattcttgtgtgcttccatgtgccgcacagaacacccattcatacattattaacccgtctaatcattacaggagctgaaagttctgtagccgtaattggtgggattagttagatcagcaacattctcctttccaggaatttgatgttttctaactttaggtggcttaaaaaacatttaataggtaagcaaacattgattgagtgcctgccaggtatctggcttatattagataggatgagatcttaatgcttttcctcaagggatttcctgtgtgtaaatctgtataagatcaactaccaaaataagtaaatatctataaaaggtgtttggaatacctttgttacctacctagcctaagggggtagaaccgggaaacgaaagaaatgaagatagaaacagtgaaatagattatttcaggtgttagggagaatggacaagaaatttatttcaggagatatttcaaatgagtttacttggcattttccaatacttgatgtggtgaaagacacagaagtatgtaataatgtctaatagagtcaatgtagagtcagtgccttggtaatcatgatctagtatctcaatggagggactattatacagcgattaaaatgatgacagtcaaaaccatttaacaaggaagatcgttttctctgttagtggaaaaagaatgtaaagctgtacgtgtaactgatcaaatctattattattactatgtaaaaatgtatacaggaatgggcaagagctagaaagaaacatgaaaaagtgaaattgattgttcttgttagggggattttacttcctaaaagttttcttagggttgcctgttaccatcatattcagtttcttaaagcatgctttatggttcatgcctgtgaggaaatgactgtcatgggcttgaaaagaaaatgcctgtgaaaagattagattaaaaggtaaacagctgtagcaggctgctagttactaagtgccaggtgaatgacagggaaataagggaatcgagaggagtttagacttcactgaggagggtgaactttggttggacttccagggaggaagcttatgatgtgagcacgggagaggggatggcatgtattctttgaggaggaagtatggcctgagagtgaggacacagagactagaatgagtaaagcaggtttaggcagcagagatgagatctgcctgccagaatggagattctgtgaggatagctagagaatgatgggacaggaaaggtcaggtggattgcaggaagccctgaaagcagccaggccagaagtccggacctagggtggctggtccacgcactctgttttgcttcttgggaccttgtatggggcttggacacaaacacaacggggaaagattgctagatcccaaagcaagattggaagcttcagtagatgaccgatttctggcatagctgggcaggatttaaaagcgcttgctgaaaatgaagccttgtgaatgggaagcataaggaagtcggtcaaaattaagcagctgtgaatcaacaggcaaaggaaaaacccagcaagtgcgaggaagcttagaagatgctggtagtcagtgaagatagaggtgacccttaggaaatgaagggacaggagaaggtggctttgacccctggggtcattggtgattcttcagtattctcagagagatcactgacagatgtggagccaaggaggaccgtggatggaaatttctggcagtatttgctaaaacagaagatacttgttttgtcagcatctgcttgacatgctaatggtgaatgagacacacatgtattacaacattgttttgtttctactgtcaactcagtgactgaaatttggatatatgcacatagggccagaggcattttgagaagaaggtatacttttaaattcttttccccaaatctcctgttttttgtttgttggttggtttctttgtttttatttatttattttttttgagacagggtctccctctgttgcccaggctggagtgcagtggcatgatcatcactcactgcatcctcaacctcaacctcctgggctctagcgatattcctgctgcagcctgctgtggagttggtacataggtgtgcacaaccatgtctgtctaatttcaatattttttgtagagatagggtctcactttgttgctctggctggccagacctcttttcaagaaatatacatttataatataaaatacaatgttgtttaattggcattagcttttaccctctcacctccataaaacaataactgtccgacttttccacttcttaagtgctgaaaatggaagaaaccactgacaaaactattaattaaggagatggattgaagtgctgattgagtggaaatggatgtattgatctctatgcttgctcctcaagttccccttgtgtttggcagagcatgttctttaaaaaaaaaaacaaaaactcgaccaagatgagcagtgtgccctgtgacctgggaagtgcgtgaaactaactggtccactccatgcaagtccatgacttaactgtatggggctttcgctctgaggagataaagatatctttagaaaatggtatccattagtcattcatttcaacagtgttgactgaagaaaaagaaaatagctgctttttgacaactttctatttgcgagcaatggagttcaatgctttttaatgcattattttattcttcaaaccagactttgaaaaggaattgtaggccaggtgtggtggctcacccctgtactcccagcactttgggaggccgaggtgggtggatcacttgaggccaggagtttgagaccagactggccaacatggtgaaaccctgtctctactaaaaatacagaaactagctgggtgtggtggtgagtgcctgtaatcccagctactcaggaggctgaggtgggataatcgcttcaacctggaaggcggaggttgcagtgagctgaaatcgcaccactgcactctagcctgggcgacagagcgagactgtctcaaaacaaacaaacaaacaaacaaaaaaagtagtaattgtagcatttctatgtagcagaacctcagagaggttaattaacattcccagaattacaaaacccacctgtgcttttactacaatgttggacatgattatctttaagaggatcttgctatcctgagatgacaccattttcaaagatgtgcaggataaactggaagcataagtcttgatcttccatcaaaggagctcccagtcttgttgataataagatgcacatgtgagttcattggaagaatatatgtacctagtgcactgatggcagccaatcatgaattaaagaaatgggggtggaatttgagaacagcacagaagacagcacaagcaggccccttggctccaagttccaccggggtgacgtggaggaatccagatgggtgctgcacatacagtgggtttgtgtcggcatctgaggatcactgaacttggggaatccgctgcaaagtctctgatttagatgactaggtgaatgctggtgtcattaactgaatcagaagcacaggagaagcaggttttagggtggaggtgtgggaaatgatgagttctagtctcagtcaacagtgtgtcgtcagtgcttatgtgctgtgtaccctgcctgcaactatgaataagatgcagtgtgtgcctggaagcaactcagcacaattgagttttaggtgtctgaagtgcagccaggtggatggatccagaaggccattgtgaatatgagtctgaaacgaagggactggacgtaggtgtagatttcggagtcattactgtaggtagaagatagagcacctcaggtgtgtctgtgacagaggcggtcacagaggccaagaagagcaacctcaggagaatcaggtgaaagcaatgttgtggatgcctagggaggaaaaatgtgtcaaaagagtgaaaggtgaaagcaatcacatgtcacaggaatggccgcgtgattaacacagaattgtgttcagtggatttggcattatgatggtcagtgttcattttcaggataatttcactgaaacgaattaattggtattgggcattggcagtgggctgaggagtgagtgggcgtgccagtatggaggcagcgagtctcaagaacattcctctgagaaactccaggtagaaggggagggttcagagtggtacctggaggggtaggtacctttttttaaaaaaaaaagttttggggagatatttgaaccttgtatagatagagccaatagatagaagtttttgaaatatgggaggaagagaataattatataatgggaaagcccaggaatttcaagcttaattttcttgatggggtagaatgtgaggttattgaaagtaggaggaattgggtgagctggggtcttctgagtagtgaatgtgtaggaatgtggttgaaggaccctaactgtattttctatctattgagggtactggggtcatccattccgagttttttcttcttggtttttagatataagtcacatccccaaagtgtaccattcactgggttttagtttactcacagacttgtgcagccattattagtatacaattccagaacattttcatcaccccacagaggaaccttgtaactgttagcagtcagtctccatttcccacttcccagcccctggcaaccactaatctacttcctgactctatggatttgcttattctggacatttaatacatggaatcctatattatgtggacttttgtatctcacttctttcacttggtataatgtattcagggctcatccatgttttgtcatgaatcaatacttcattctttttatagctgaacaacattctgttacacagatatgctgtgttttgtattcattcatcaattgatgggcatttggcttgtttccaatttttggctattatgaatgatgctcctttgaacatttatgtacaggcttttgtgtagacatgtgttttcatttttctcagatacgcatatgtataggagtggaatttctgagtcatatagtaactaacttttgaggaactgttttccaaagcatatgaaccattttacattcccatagaaatgcatgaaggttccactttctccacatcctcaccaacacttgttcttgtctctctccatgagtattgctatcctagtgggtatgaggtggtatctgattgtggtttagatttgcctttctctggtagataatgttgagcgtcttttcatgtgcatattggccgtttgtatagcttgagagagatctctattcacatcttccccttatttcaaaaactatatctttttattactgagttgtaagacttcttcatacattctgtataccattctgttatcaaatagatgatttgcaaatattttgattttatgggtttctttttcactcccttgtgtcctttgatgcatgaaagttttaaattttgatgaagtccagtttatttttagttgcttgtgattttgctgtgatttctgagaaaccattatctaacatcatgtggattttcatttgttttcttctaagagtttgataggtttagctcttacatttagatctttgatccagttggagttttgaatgtggtatgaggtagggatccaacttcattctttggcatgtggatatccagttgttctagaaccatttgatgaaaagactgttctttctccattagattgtcttggtacccttgtcaaaatcaattgaccataactgtgacagtatgtttctggactcccaattccattccatcaatgtatatatgtctttccttatgtaagtaccacactgtcttgattactctacctttgtattaagtttcgaaactgggagtcaagtcctctgactttgtttttctttttcaagattgttttggctattctagttctgccttaagcgggtttttttttttttttttttttttttttgagacagtctcactcttctcacccaggctggagtgtaatgtcgtaatcttggctcactgcagcctctgcctcccagattcaagcagttctcctttctcagcctcctgagtttctgggattacaggtgcctgccaccctgcctggctaatttttgtatttttggtagagatagggtttcaccatgttggccaggtgccttatgagttttttaaatacctgtttcttagtcttctgaggttgattggtttcttttttaaactgtttatttgtttagagatggagtctcattctgttgcccaggctgaagtgcagtggtgtgatcatagctcactatgaccttgacctcctgggctcaagatgtcttcccacctcagcctcccaaagtgctaggattacaggcatgagccactgcacccagctgattcatttcttgagtatgaacattttatgtttttggtcacataggattattttatttgttttcagatatggggtcttgctctgttgcccaggctggagtgtagtagcacaatcatagctcatcacagcctgtaactcatgggctcaaatgatccttccatctcagcctcctgagaagctgggctacaggtgcatgccactacacctggctaattattttttttaaatttgttttagggacaggttcttgctgtgttgctcaggctagtcttgaactcctggcctcaagtgatccccctgcttcagactcccaagtagctgggggattattttaattattttcacactatcacatctcctctcctaacctggcatctcattcttgtgttagccatgttagagctcagttgtattttaatcttttatttatttaatacattttcatgtttactagtaacaatataaaagtagtgattaggttattttatatatctctttttagaaaataaagaccaatttgctttttacttatatggtatcacataattttttttctcccagggtcagcagatctcaataaaaaagggggtcccaagtaacttataaatagaacaaagtagtataggtagtgtttcctgctatgccattaaatattatattccaattgggaaaacaagtccttcctacataaatatcattgatgaatattttatgtatgaacatgtgtagacatggaaaagtattgggtatgtgacactaattggttgaaaataggatcacatgtggcatgcaaagtttgcggttgaataagtaaatcttacaaatagcttattatctatctttaaaaaatgaacccaaatgaatttaagagtaaattatagttagatatttaggaacatgactggtagataaagggaggtacacctatgtttctgcataatagatttggtttggaaattattattaattttctggagaattagaaaatgagaattagaaaagcagattattttgttcaaactgagaatgatgcatttccccagatggaacatgagttatgtaaagggagtctcccaggccctgcccgtgttttactatgatgtcactgggtgctagccatagctgatgtgtacagcgaagaaagacttgttttaaattattgttcacttttacaaggtgactaatatgctggctgaataaactgagttgtcagctgttgatattttaatattcattgtggggaatttgccctggaaaggaatcttgtttgggaaataatacggaatctttaatgttggtggaataaattaatttcttcctttttttccttcctccccttccttcccgcttcccccttctcccatcccccttccctttttcctttttccttttttttcctttctttcctttcctggctcatgggtatgtcaaagcatttgtggttctgagtactgtaaagcttgattactcatgaaataaacttacagtactactttaagatcactctggtttttaattgcttcttatacatagtactaattaaattatcttgttattttaggcttcactatgaataaactgttgtccatgtgttacttataatagtattgagtgctatattttaaattgtgaaatacaatatatttaccattttagcctttgaagtgcacagttcagtagcattgagtacatttcacattgttgtatcaccatcaccaccatctattcgcagaatgtttttcatcttgcaaaactgaaactccatctccattaaataacaactcctctttctcattttcccccaacccctcataacccccattctacattgtgtctctatgaatttgactaccctaggtacctcatataaatggaatcatagaccttttgtgacttgcttatttcacttagcatgatatcttcaaggttcatgatatgatgcgtcagaatttccttcctttttaaggctgaatacttttccagtgtatgtatatacgttttgtttctccattcgtcagtgggtgcttgggttgcctctgcattttagctgctgctgtgaacacgggtacactttagtgctgtttttacaaaggcagtgcatagcagctaggctttttttaatttagtattttaagccaagagaaaggtgttgatcttttggatttttgataggtgttttttgtttgtttttccaggctaaatttaaggcttaaatttgtaactgctatttaatcattgttttgcctttttttttcttccagacagggtctcccctcgttgcccaggctggagtgcagaggtgtgatctcggctcactgcaacctctgcctcccgggttcaagtgattcttccgccttggcctcccgagtagctgggattacaggctcccacctccacgcccggctaatttttgtattttttgtagagatggggtttcaccatgttgtctacgccactgctttgctttctaagtgctatatacagcaagaagttttcagtggcgagtgtgtcatatttaaaatcttgtagcaacacaatttaattcaactagtaacatttgatggtacactagctatagcattttatatcgaaatgtgtttcattttaaaatgcttttcatatatctgacccttaagcttgcttcagatctcactgcctttatttgattgggcatgtgtcctagatgttctgcccgtatacatattctcaacagtcctttgaaaagccttctcttactatccttcaatcgacagggttggggtgggaattttatttgacaaaaaagattgaaatagtgaagatggttgtttacatattaaaggccatctttgatgggtgttagatgtaagggacatttttaagttgccgtctctaggacaaaatgagtttaggttaggtgtattagttattaggtgatttttttgtattattttggattttctagggattggtcccttaatcataccatttaattcttccaagttattggttttatctgatgatatgcatggtgtagggggtggcagagggagaagctgttaagagcatatgagagaaacgtgaatactgaaggacagtatttggctgccttcttaattgaagataatttgaaatgaaggaactgcactattgtgggggaaatgtttgatgaaccacccatttttttcaggcctgcgttctagatgtattctgtatgagaacggcacttagagttcttctgtgcagacgaaatgttcttgcaagaaactaatgaccaactttgtggtgggtggtgagtcacagtagatttccggagagttgataatgtgcttgtgtatgatacagatttgactgtaaggagccagctgatacaatatggtcagattccattaagcagtggttttaagaaactctcatggacctctgggcctgaggaagtgaagaggtaaaattgcatgtttgaaaacttgttgcagtgtggctgagactttcttgcagcatttctgtgatagtctagagcagatttaaagacaaaacatcagaaatagactttaatgctagttgaccatggtagaacagatttgccttttttgggtttgtgtttccacatttaggtaaaacatagctctaaagttttccttttgattctctttgctctttgcttgaaaaatgtgttggctaaaggagagaccactaactacttagtactttttgaatacgtatttgagaataaatgtaaaataactgatgtgagaaaagttaagttttggccagcacagggaaggaagtttttgttttgttttgcttttttgcatttggcttaattatgtgagttaaagtgaaaaaaacaattacctttcttgagagtggacacactcttaagttataatgaatatgacattgacatttggccaaggttctttaggaagtacagcataactctgacatggtattgttcctttccttagagcttatctttttttttttttttttttttttaaagacggagtcttgctctgtcgcccaggctggagtgcagtggcgtgatcttggctcactgcaacctccacctcctggtttcaagtgattctcgtgcctcagcctctcgagtagctgggactacaggcacatgccaccacgcctagctaatttttttgtatatttagtagagacggggtttcaccatgttggccaggctggtctcagactcctgatctcaagtgatccacccttctcggcctcccaaagtgatgggattacaggcatgagccactgtgcccggcagagcttatcttttagtagcggagataagggaaacaaacagtttcatactttggttcagaaaaatataagaatataagaatatgagaggataaacaagccatggtctttacttttttaaaacagctgtattgagacatcattcatgccccatacaattcaaccaattcagtgtttttagtttgctcactgttgtacagccatcagcacaatcaattttagaacattttcatcagccctgaaagaaaactgtacctgttagcagtcactccttggccctagacaacactaatttattttgtctctacaaatttccctattctggatatttcaagtaagtggaatcatacaatgtatggtttttgatgactggcttttttcacttagcattagcttcatacacagtgtagcttgtatcagttcttgatatagtttggctgtgtccccacccaaatcccatctcgaattgtagctgccataattccctcgtgttgtgggagggacccagtgggagacaaatgaatcatggggtcagtttcttccatactgttctcatggtaatgaataagtctcacgagatctgctggttttataaggggaaaccctgttcgcttggctgtccttctcttctctgctgccatgtgagatgtgcctttcgccttctgccatgtttgtgaggcctccctagtcacgtgaaactgtgagtccattaaacatctttctcttgtaaattgcccagtctcgagtatatctttatcgcagtgtgaaaatggactaatacagttcttcattcgtttttttgctcagtagtgttctgcgctagggatatgccacatttacccattggtcagttgatggacatttgggttgtgtccactttttggctgttatgagtatccaaataatggtactgtgaacatttgtgtacaagttttgtgttctcatgggtatgtatctaggagtggaattgctgggtcagatggtaacgctgtttaactttttgaggagctgctggactattatctgaagtgactgcaccattttacattctcaccagtaatgtatgagggttctaattactccacacccttgccaacccttgtgatgatctgtctttttgattatagttatcccagtggatgcgagatggtatttcattgtggttttgatttgcattccaatgttgaatgatatggaacatcttttcttgtgcttattggccatttttatatctgttttggagagacgtatattcagatcctttgcctatttaaaaatttgattatttgtcttttttttttttttttttttttttgagacagggtcttactctcacacctaggctggagtgcagtattgccatcacagctcactgcagccttgatctccctgcctcaagccatcctcctatctcaaccttctgagtagctgggaccataggctcccaccaccatgcctggctatttttaaaaactttttttctttgtagagacagagtctctgtgttgcccaggctggtctcaaactcctgtgctcaagcagtcctcccaatttggtctctcaaagtcttgggattacaggcgtgagccattgcacctggcctatttgtctttttattattgagttgtaagggttctttatatattgtgatgcaagttccttattagatacatgatttgcaaatactttttcattccctttttcactgtcgatggtgtgctttttgaatcacacaaatttttaattaaaaaaaatttttgtttttagagacagatctcttttgcccaggctgtagtgcagtggcacactcatagctcactgtaaccctgaactcctgggctcaaaggatcctcccacctcagcctccccagtagttggaactataggtatgtaccaccatacctggctacttttttgttgttttttttagacgtgggggtctcactatgttgctcaggctggtcttgaactcctggccttaaatgatccccccatctcagccttccaaagttctgggattacgggcatgagccaccatgcccagccccagagtttttaattttgatgaggtccagtttatcttgttgttgttgtctgtgttttgggtgttcattacctaatccaaagccatgtggatatacacttttgtattcttctaagaacttaatagttttagtttttacatttagccctttgatctgtttggagttttgaatgtgatgtgaggtagggatccaacttcattcttttgcctgtggatatccagtgtctcaccatttgttgaaaagactattctttctccattgggttgttttggcatcgttgtcaaaatcaatggaccataaatgtgacagtatatatttctggggactcaattctattccatcgatttatatatgtctttccttatgtaagtactgcactgacttgattactgtggctttgtagtaagttttgaaattggagggtgagtgccctccttttctttttcaagattgttttgtctattctgaattttttgcatttctgtatgtattgtcagaccttgttggtttttataaaaaagctagttgagattttaataggatttccttgaatcttgtagatcaattggggaatattgtcatcttaacagtattgtctttcaattcatgaacatgcagtgtcttcctgtttgagtctttaatttctttaaaaagtttttttttttttaactgatatatcacagttgtacctattttgtgtttttctttcttttcttcttttcccccgagacagagttttgctcttgtctcccaggctggagtgcagtggcacgatctcagctcactgcaacctctgcctcctgggttcaagcgattctcctgcctcagcctccctagtagttggcattacaggtgcccaccaccatgtctggctgatttttgtatttttagtagagacagggtttcatgttggccaggctggtctcgaactcctgacctcaagtaatccacccgcctcggcctcccaaagtgctgggattacagacgtgagccaccgcacccggccatgtgatattttgatacatgtatacaatgtgtaatgatcaaatcagagtaattgggatatcccccacacgtctttaatttctttcaacggtgtttcggaattttcagtgataagtcttgcatttcttttacatttattcctaagtattttgatatttttgacgctattataaatgaaattgttttcttaatttcactttcagatttttcattgctggtatacagaaacacaactgatttttatatattcttgtattctgcgtaacatgtttattctcagatttttagcggtttccttaggattttctcttaggatttacttcttcctttccaatctggatgcctgttgtttatttttcttgcctaactgccctgactagaattcctagtacagtggtgagtagaaattggatagcagacatccttgtctcattcctgatgtagggtgggaagctgcccagtccttcaccattaagtgtgatgttagctgtgggtttttgttggtgctccttatcaagtggaggaagttttttttattcctacttcattgagtgtttgcattatgaaagagtattgaatttttgtcttttctgaattttgccttttctgaaataaattactttttaaaatgactgtttttcttgtttttttatccacagagactgacttgcataccaaatgtgtggtggatgtggatgcaaacaaggttattcttaatcctgtaaatacgaatctttccaaaggagatgcccggtgagttaagaaacagtgctgtgctcaatggatgtttaagtaactggaagcaactgtggctgctgaattaagttgcattgaatagatatcgaatgcctaccctgtagagacatattgctgtcttctgtgagcctgtactcaagttgaagagatgaagtctataatatgggatgacagtgtgcctgaatgagtattagaggtagtaattgtattagaagcacacagaagagactgagtgttatgttgagaagcaattgaagaaggcttcttgaaggaggtgcagctggctggaggattagctaggatgtaagtcggttccttagcatgagtggcttttacttctgccagttcaaatgctgtcagagcccatttcaagtgctatcttcatgaaggtatgcctgcagcccgcagtgatgtctttcctctaaatacctgtcagttataatctgtcctacctaatttaatgattatagattgttttggattgtaacttccagctgtacagtggattttaatgtctttgggggaaagagactcgagggctgaggatgaatatttgagtatcatttctagatatgtatggtagtatgaacaaaaggaaagggaagaacatgaatttggggcaggaaaagattattttgggttttcttagtaaatggaggactgtaaataagctgggataagattacagaagacctggaaagcagatgaggaagtttggcctgtatttttgtcaggaagattttgtttttggcagtttttgagtattatgattgaggatcaaggtggattaggaaaagttgttgattggcaatgtagagaatgggtcagagtggggataggctgaccttttctggagatcagctgtatcagagatgtttttgtattggccctgaaagtgggagaggtgaaagacatttggcatgaggctttgtgcaaagtaggattcataaatccttctagaaccagcgctgtatttggcactctgcagatattcttttgagttgagtttaattgagttgaaaagagcactgggctgggcgcagtggctgacgcctgtaatcccagcactttgggaggccaaggtgggcagatcatgaggtcaggagatcgagaccatcctggctaacacagtgaaaccccgtctctactaaaaatacaaaaaattagccgggcgtgatggcgggcgcctgtagtcccagctacttgggaggctgaggcaggagaatggcgtgaacctgggaggcagaggttgcagtgagccgagatcacaccactgcactccagcctgggcgacagagcgagactccgtctcaaaaaaaaagaaaagaaaagagccctggatttggagaaaatctgaaatcgaatccttcattatgttatcatagtgagttatttttaatttttttgaacctgtcttacgtgtctcacaaaagttttttcccacaaagatcaaataaattagtgacttttaaaagatcttgcaaagtgttctgtacatgggcaggtttattgttattaacatagagacacatacagcaaaatgtatagcttgatgaattttcatagtgaatacattccttataatataagtggcacccagataagaaacagaacgttgctagcatggcaagagactacatcaggagaagtagtttttcttttttttcttttctttcttttttttttttgaggcagagtctcactctgtcgcccaggctgaagtgcaggggtgccatctcggctcactccagcctccgcttcctgggctcaagcaattctcatgcctcagcctcccaagtagctgggattacaggtgtgcaccaccatgcctggctaatttttgtattttagtagagacagagttttgccatgttggccagcctggtctcaaactcctgacctcaagtgatctgcctgcgtcggcctcccaaagtgctgggattacgggtgtgagccaccacactgggccagttattacattttttttttttttttgagactgggtcttgctgtgttgcccaggctgaagtgaaatggtggcgatcttggctcactgcaacctccgccccaccaggttcaaccaattctcctgactcagcctccctagtagctgggattgcaggcatccaccatcactcccagctaatttttgtatttttagtagagaaggggtttcaccatgttggccaggctggtctcgaactcctgacctcaagtgatccgcctgcctttgcctcccaaaatgctgagattacaggcgtgagccaccacacccgaccggttactacatttttaagccaaaatgtattcaattcaatgcttgagtatagatgtctaccaagaaatcacctagttctagagaaatttcagctttgcaaggtcataaactttattttactcagtttgcttaatgttgagtggagtcttggggactaacatgccatctcttaaggagacaggcaggacctctgattttatgtttacagtgaataaaatattaatctcagcaatccattcttctccttcttggtatcaactaattggaaaaccaggtcaaaacattgctgtgaacataggataagaacgaaaggacgtttttggcaaatatggaaaagataaatgacgaactcttcctattccacaccactgctcggagcactctcctgactgaaatacttgaatccaccagatcagtctagttcttctgtgtattatcctggatacacatggatacattttatcacttatttgctcatgcagagctgcacttcttatactactagaacaattaatatctttttggaattatcttcttcccctcaattagttttctagatcggttcttgggattttccaaatctttgtcagcagtatatttctaaattgcttccctttaaatgactaaatctttaggccttattttatttgaattatatcttaaaacttattaaacttttatcctgtagtaaattttcgttgttgttgtttggaagccatggtgagattgtaataaaacattaatgcctgtcaccatggtaggcaaagtagtttcttttttgtttgtttggggttttttgttgttgttgttgtttgtttttgagatagggtctccctctgttgcccaggctggagtgtggtggcacgatacaaatagtttcttaagctaagttttatcttctatttttgcttctttctctcctctacccaccaaacaggcctttcttgctaactctggctaaaaagttaattggtatacttaaaacattgccttaaaagggattaaggtgcattttcccatggagagtgggagcctccactgtatgaatcatttgtgttataaaagttgaggcataggtgagtttggaaaatggagtgcattttcccataggaactgtcagtttcaagtggaaagtttaagctagtgactagtttaatccacaactcgaacatactttttttcttttttgcctcatatcttttttaaaaaaaatattttgtctcaatcttcgcatttcactgcaataatattaaatagctgtgtactcaagggccgagactgaataaaatgaataatcattctttctgctttatggaggacattcttatgtggaaaaggcttttttttttttttttttttccctcccttgctgcgggtgcgtggtgatgaaaagcacagagactgcttcgctgtgatgtctttgtgcccagggcaccagcagtttcccctccatcatgttcgtgccaccagcacaaatgtcaacacagtgagaaaggcagatgccttagtattgttatgaaaataatcccaacctccagactctctgaaaagctctggggaatcccccaagagtcctcagaccccaatttgaggggtttaatccagtttataagcttctaagaaccaaatagatgtccctggtttattttttaaaagatttattgagatataatagtaagacaatacaatccacccctttaaagtgaaccattcagtggtttttattacacttactgaattgtgcaacctgcaccactatctgcttgtacatcatttttatcaccatgttaattaatccactttctgtctctgtagatgtgagatttgcctgttctggacatttcctataaatgaaatcatacatgatgtggtcttctgtgattggcttcttagcatcaggttcttgaggtttatccacttcgtagcatttatcaatacttcattcctttttatgatgaaataatagtctgttgtatcacattttgtttatccattcatcagttgatgggcatttggattgtttctactcttttggcttcatggataatgcagtttgtgtacaagtctttgtgtggacgtccgttttcatttctcttagattcatttctagttatggaacgcttctgggtcatatgataactgtattctgaacattttgaggaattgccaaactggtttccaaagctgccgcaccgttttacattcccaccagcaatgcgtgagagttccagtttttaaaaactctcatctactgtaaagaaaatggaggtaactctggctaattaaagagtgcatatcctgcctcaaggcattcagattacaatgaaaaagcaaaaccaaacatagtgctgtccaagccaaacactcctggccagattcagcccttggctactgatttagaaccccgcgttctggtaaactagattctggtatacttctctattgagcagtacttacttattttaaaacaaggttttgaaaaatttgagcaaaattaaaaaacataatatacaaaaagttctaaagaatgaaacacttttatgtacctatcagtttaacaaatcctttccaatgcagtttaaacctatgtgaactgccttctgttcacataggaaccctttctctctccaccacagttaaccactttcttgaatttgatcttcttctttcccttgtatttcttcacattttcactttatggaggacattcttacgtgaaagcggctttttttttttttccctgctgcgggtgcatggtgatgaagcgtacaatgactgctgctttttttaagcatatctgtaagttgtttgcccagtattatgtgtacatgaatgcctttttctagtgaaaggccagaagggtgactcgaaaaagtttcactattcttataaaatataatgcatgatttttaaagaccaaaaaaaaaatgttaaaaggagctgaaaataatatcacccacttagcttgggggagaaagctcaaacttggtattttatcaaatttcctgttctttctttttttttttttcctcttttgtgtttcttttttttttcttttagattccaggggtacacatacaggtttgttacaagggtgtattgcggccaggcgcagtggctcatgcctgtaatcccagcagtttgagaggccaaggcacgcagatcacttgaggtcaggagttcgaaaccagcctggcccacatggtgaaaccccgtctctactaaaaatacaaaaattagccaggcatggtggcgggcacctgtaatgccagctactcaagaggctgaggcacgagaattgcttgaacctggaaggcggaggttgcagttagccaagatcgtgccaccgcactccaacttgggcgatagagtaagacttagtctcaaaacaaaacaagcaaacaaacaaaaaaaacaagggtatattgtgtaatgttgaggtttgggcttttgttgatcctgccatccagacagtgaacatagtacccactgggagttcttcagctcttgcctcctcctccttccgttcccccttttggagtccccagtgtctcttgttcccatctttgtgtccatgtgtacccaatgtttaactcccacttacaagtgagaacatacaatgttaggttttctgtttctcttttgtccttttaaacaaaatcagaacataggctttcccctcttgtcttatttgcaatgaatttcaaggaagtgtgcagtgaaaattgtcgtagtatacttccagctcttttagagacggaaacagggagctatacctcctcagaggtgctgctttaaacatcagaaccaaaacctgacaggaaagaacacctccgtgtaagttgcacttttcagttccttggtcaagtgtgagtccattttcttccttagccctctgtcttctattacgtgtgtatggtttggggggctgggcgggtatgcacattaacacagtgctaaagacatcagcctagagtttatcctgtctttctttcttttctgttttgttttgtatgtttgtttgttttgagacagggtctcattctgttgcccaggctggcgtatagtggtgtgatcactgctcactgcagcctccacctcccaggctcaagtgatcctcccatctcagcctcctgagtagctgggactacaggcatgtaccaccatgcctggctaattttcattctttttttgtcctctccacccctaagtgtaaggttttgagaccagaacgtttggaggttgaaagcatttggaggtttgggtgtcaagatcttcattaacctgaacactgatttttttggtgttctgtgagttgacttattctttagaacaggtggggaagatgctctaacatggatgaaagtagccacagatggcacaaataggcagagactgttcttgttttacagtaaaatatgatgctgccctctccatcccccatgtgtcatgtttaacctaatgaacaatagacagcgtaaaggttacagctgccagtctaatgggaagactgagatgttgatcacatcatcttttttagtaaggccattaaaaatctttttgttccttctgatagttttactagacatcaatttagtcagtatcattaggtaattaatgagtacctaatatgaacaaaacacacccaacccttctttggagcttcagtgtactctgaccctggtggatgtacagattggagcccttaaagtatgtgcagaattgagtgagtttgacccatgtccatacacttctcttgcaaattatattgcataatgctactgaggggagggccttatggcatacatgaagtcattttcagactaattccttgttagtggaaggcatcattaggtcatattagataatgactttttagatttctctactgctatatggatgctaatttaaatagcgattttaattgaaggaagtcatgcaaaatgtaattatggtacccacaatagacctgtttgttctctctgctgtgaaatgacttgagtggggctaatatttctcctcaaatagagtctgctcctctggagaacagtacgtggtatgttttaatttcataatggggctcttcctcagggagcccgtcctgctaattttattagagtacagtggggagagcgtggttctgtgtactcagaagttgtatatgattcctcagcctctccctttaaaaagaatactgtgatcatttactacttttgaatatacttgtgaagatgaatcagggagactcttaaaagctaaaaagataagaaaatatgtgtggttgaatgcatatcattgcataattaatggaagcaggtagtcaaattgcagcaaatacaaattttgcaaagttttaccagcagagtctagctggttgccaaaataaactggtagccaatagactgctactatagaatttgatattttagcattatcattgaatataaatattattttgctcatgcttttactacttttggtgcagcaataagaaggaataaactttttaaaaaatacaagaaaagagtctttctttagctctgtgcttgaattactacctggatactaacatttgatatgtggactcagggtttgtgtatatggttagttgccagctctagattaagttagttatggataataggaattacgtgttttgaatttccctagaattctggactcagcataaagtggtcagattgcatataatatattaaataaaatatctaattatgaacacagtttaggcaactaccaggtcctactattgcattttttttttggcttattttgcttagtttttttgacagtacttttttagcgctctttgtctcaatctgtaggatagaaattgttactaatataaatcagatgctgtataagaatctagatttctgttttaaagatggagggagcagtattccttgaggaaatgtgacatgagaaacccattcagccacaaaagttgttgtatcataacatgtttataattttttctgatgcattcaatattcgaacatcaacagtgtgccaagtatcaagctgagagttaggttaatctttaccaatccttagttccattaaatttatggtgttattaatttttttacatgatgtatctataagcatactagtaaaaaaaagcaaaacaaaaaactggaaagcagaaaaagttattctgttgtgcatcttgttagattttgcacactcaaatttgaaatgatttgattgtttaattttgagaattgtacattttcttgtgagaaagttttcttttacaaagaaaagcgtttagaactctggagtcctcaaacttcttccacagagttcttttaaaaagcacaggtattttatagatggtaaatttcacctttgctttacttctatcaaacgtaatttatatatacttttaattaagtaaaaacttatataggatgggtcataattattaagagtagtgactatctttatgttttgacctgtatatacaagtcagtaatccttttgttccacttttaggaaaattgaaatagaatttatgtaaagatcatcgaatatgtaaaagttttatttgcaatttaatttttaaaaacttttgttatggagaatttaaaagatatgccaatttaggcagaatagtataatagtataatgaacctccatgctcttgtcactcacccctgaaaaccattaatttgtggctgatactgtcctagctacatcttcatccctgtcttcttccccatattattttgaaggagatctgattttacccacagatgttttaatgtatcttttattatttgtaaacataacctcaataccatttatcatatctaaacaatttaaaataggtgtgaggaggaggaaaaaaatatagtgaggtggtggcatcaaattttcagtgtttaaatgcccaattatctcatcaagtctttttttccccgaagtttgttttgaataggattgagatgtggtctgcactttgaggttgggtggtatggtttttaatttattggctcctcagttgttgaagaagccggatcatttgttctgtcctgtggatgaattaataagtgaatttattacaggaactaggttatccttatttagtcaaacaccaaaccttgtttattttccttgtaaatattttcattctagcattccttttcattcttctgacattaccctagggaaggacctcattgccttgtgtttagatgacaacgtagctttctaaccagtttctggaactcaccgtcaccagaccgatcttcaagcctgctcctgcttcctgtaatctctttcaaatctagagcatttatgatttctactcattgagaaatgccactacgtaggtggcatcttttatatgtttatcccacattgttttctaatatttgtactgctttgcttttatctatgtattttgaaaactcccttcccttcaggctgtggctgctagaaagtgggggccactgtggcttcttcctgggtctttggtggtctgcactagatgcctcttgattgattgcagtggttctgttagtgctcgttctcaaaggcctcctgctctgatgttaccctcaaatagtagtttgaagggtgatttgcaagtctggagttggaatttctgaagggtacttctcaagacaacagaacctgatgagctatcttcttccaccccactctgtggagttcagtattctagcaatggctgtccttgtccactagatagatagattatcttgcttggacggtgcagatggacgacatttgcattactgtaacctttctagactcccaaagcaccacagcctttgttttgcttttgtcactttgacgacaatcttttgtgtcaatgctgtttcattggttgtattttatttttattttttaagccattatagagctaggttatattttaagtttgatgtttctttgtgatctaatattaggattatacggtagaataaatttccattgggaagaatttcctgaagattaaacaattctgtttataatgtgtagattagagattgcatactcaggcaccatagtccatattttacccagagatatgttttgtttggcctgaagttggaacatttaaaaatcaggttttgtataaagattcagattcattgtgtttcttaaataatctgaatctggcaacactgggttttctgccctcttccggctcccagctgttccattccgtcatttttatgatttgccaggcccctgtaggccttttccttttcaaccttggtgtagattcttactggcttcagtcacaaaagatgtcctttcctgaccttggccctgggttttgaagctcacattactttttctttcctctagttttttttttttttttcctttggtggtaaaatgctcacaagaaaattaatcatttaaccatttttatgtgtatacagttcagtggtgttaaatacattcataatgttgtgtaaccatagcactattcatcttcagaactcttcttaaaaactggaactctgtgctcattacatacgagatccccattcctcccacccctaggcctgggcaaccaccattttactgtatatatgattttgactactctagggacctcatgtaaatggaatcatacagtatttattttttgtgtctggcttatttcacttagcatgtcctcgaggttcatccatgttatagcacatgttagaatttccttcctttttaaggtcgagtaatacttcattgtatggataaaccacattttgcccatccattcatcggccgacggacacttgggttgcttctacctttttcctcttgtgagtaatgctgctgtgaacatgggtgtgcaagtacctcttcaagaccctgctttcagttattttgggtatagacccaggagtggaattgttggacctcacattacttttcaagaccatcaatctctgcactctgaatctgtcatgttctcagttttttctttagcttattaagaagtgtagccatgtgaattccctaattgttgacatgactttgtttataaattaccaaatattcttgatgtagtgttcaaattaatacattattttgcaaaaatgtaaagtgctaactcttaactgtctatttttctttaaaaatgtttatattaacatataatgactcttgtttttaaatgaattaaaatacacacacacacatgtacttcagagacaaagtctcactctgtcacctacactggagtgcagtgatgtgatcatagctcattatagtcttgaactcctgggctcaagcagtcctcctaccttggcctcccagagttctaggactgtaggtgtgagccactgtgcctggctctaaaatatttttaaaatttctcagcttctaattcaaaaaatatctatcagctataacccatataaacaaaagctgttattgccctcactaatatttaagagtgtaaaggggttttgataccaaaaaatttgagaatctctgatctagataatgtgctagcacaggttaattaaaattgtttgaggtactcaccgcaattttagaacattataacatttttccccatataagcaatgtcacgtaaatgtgtaagtcatccctgggttgctacagatgcttatttacctgtggtatttctgaagtgcctaccattattaactaaaacattttgagcaagtagttctataagttcagcgttccagcttagaatgccaagaaatgtaactattccctctccttttggggttagggtggcaaggattccctggttctaaacctctctgattgttctcttgctattgatagggtttgtggataaacagtgggaacaggatttgaagaaccaagatggaattttggtgtcatatgggattttttagaaagcttttttcagatggagtctcactctgtcacccgggctagagtgcagtggcatgatctctgctcactgcaacctccacctctcgggttcaagtgattctcctgcctcagcctcctgagtagcagggatcaaaggcacatgccaccatgctcggctaatttttgtatttttagtagagatagggttttgtcaggttggccaggctggtctcgaactcctgacctcaagttatccacccccttggcctccgaaagtgctgggattacaggcgtgagccaccacccccagctgaaagctttcaaatgagtttcaggtgctggaggggtgagagagtgggcagtggtatgggtgctatggagtctctgtgtctaccaggatattaagaggacagaagaggcagaaacaagtatctatgatggatcctggaaaaagcaagaagcctttgacaaatcactgttgtgcttaccgtgaacaagttggaattatttaattttgaatttgtcagaaagtttacagtaatgtaataaatttaaaaatattcctaagtaaaaaaaagaaaactgtaaaatttctaatgtcagcagaatgtggtcactgtgagggagaaaaggatggcaagactaactttatttttgtttttacttggaagtataaattcaaatttcgggatctctgagtttttatgtagctggaatctttctttataagtatatatatatatatttattttttaattttttttattttttattgttttagagacagggtcttgctgtggttgcccaggctggtcttgaactcctggcctcaagtgatcctcccatcttggtttcccaaagtgccaagcctatatatattttatttttaaatttttatttatttttaattaattaatttatttttagtcagagtctcactctgttgcccaggctggagtggaatgtagtagtgcaatcatggcttactgcagcctcaacctttccaggttcaagggatcctcccacctcagccacccaagtagctgggactacaggtgtgcaccaccataccctgctaatttttgtgtgttttttgtagagatggggcttcaccatgttgcccaggctagtctcacactcctgggctcacgtgattagctttcctcagcctcccaagtgttgagattgtaggcatgaccagctgcacccagatatttctaatttcttttaaattattttttcatgatccagggacagactggaatatgtagctggaatcttacaggttctttataattcttaaaaaaaaatttggaagtggaatttgtaatgcataagaagttttgattggagttctttgttttgtttacatatacacatatatgtacatttccattaaagcaagcctttttccttttttttttagaggatataaacagctacaaaattactgtgttttaaaaaataaattttacctgtgaaatgcaaactgtcataagaatcggtacatggtaactgctgttcttatcattgctctttattattttgttaattacatattcctttccagagaagattggctgacttggtgttttagtcacatgtaaggagcacggaagcttccttgctcaatttcattctcatccagtgttaccacaacagaaacctgtgtgtaaccaaaacgcttggcctgttcagtgattacccctccttagtcactcggccagtcatggccacacttgccacctgccctcttctttgggggattgggtataatatgacacagtgggaggagccagacgtttcatacacatttggtatgatttcgtgttagtcattttaatatagttatataagtagtataggaaaaccctactgtgggaaaatcccttctctgaatgtaagatttatcaggccgaacccgtatggtagccttcatctatttacatcatgaaggatgcttaaaagtaggatgggggacagagactggttaagagtaagtcacacgtccgggcgtggtggttcatgcctgcagtcccagcactttgggaggctgaggcaggcaaatcacttgagcccaggagttcaagaacagccttggcaacatggtgaaaccctgtctctacaaaaataaaaaaatcacctgggcatggtggtgcatgcctgtagtcccagctacttgggaggctgagacaagaggatcacctgagtctggggaggttgaggctgcagtgagccgtgatggtgtgattgcactactgcagcctgagtgacaatgtgagaccctgtctcaaaaacaaaaacaaaaaacaaaatattaggtcacactctggcattggaccaagactttatgccttgccatttccagaagctttacttagggtttcagattctgctttcatcattctgccccatatcagaccccttgcaggtgctgattcaggtcttcttggcctcacctctccttggagcctttgatcacttttcaaccctggctgttgccagctcagtctgggctcacgccagcttcacgtgctcataatctgacacttcctcatgctcactcccttccctccttgcctgggatacactcccacagaagccttggtctttgctttctgaggaatccacactaagacgtcctctcgcatgcccttgtctgtgtcctcagggattctcttgctgtgtgttgagctggctgtccgttgacctggcctttttgggcctgtctggtccctttgccccccagaacttggtatggatagtaaggaactgaacttaaatattaggaagaggataggccaatttatagattgggttaatttttaaattgatcaaccccgtaagcagtagcaaagctgcagaacagaggtgctgcgagggagtttaatgattaccactgtgtctggggatgggaaaggcaagagttggttgaagagaagcatgactcagacttgggtgtgagtgctgggcctactgtttaccagctgtgtaaatctggaagtttatatcacctccctgagcctctgtttccttttctatgaagtggaggtgataacactgtgatatggatcatgcaagattaccgtgggcatgagtgagttatttatgtaaaatgtctggtacatggtacctacttagtaggtggtagctgctattttgccttgatttatttattcttgtcaactctcttaaacaaattttatttattaaaacatcatattttaagtaatattcttttcaaataacactggcatatatggtaggtactcaataaatattaactgggttagacatgtagtcaattataataccaggtttctaataacaaatgatgcccttttgcttttaattgacaataatcatagctgtttaagctgtagatctaagtgtagtttcttgatgccccagatagcaactgtaagatgtttatttaagggattgtgggtttcctctgaagagcatcaatttgcataatattgctcagagttggtttcttgaactatcattatcataagaaaaggaactccgtggtcaaggtctttgaatgcttagaaggtgtcagtaatgcagacacagccagcacagcattcttggaaatacaagaagtgaatagagactttagtttgtggatcttctcattgatgacaaccagcatttatttataggcattagtattgtttatattgtgttagatcctttgcaagagtataagttctcatgacatcttacaacaaacgatataggcatcacattgttacctcaacattttcagaagggaaatgagactcaaaggtgttacaaggcttcccagggtcacatgatcagaaagtggcagaacagggatctgaactcagatctgcctaagctcgtctctccaaaactagatgagctcacagcttctcattgccttctaagattttacagaagagtttcttctctaaacatttggaaaaatgtaactggttaattcagattagatcagaactaaagacattcagcagttattgattgacatctgatacacatcactccagaagggtgtcctgataagggaaagataaatatgacatgcttttttttttttttttttttttttaaagctgacattctggagttaggaaaaacccacatacagctaagtgtgtatcatattcattaattcattcaacaaccatagagtgccctctgtgtgtttatcaggatgttgaccctaagaaaacactgataaacaaaagagaatttggttccagccttcatggtccttattagtcttgtgggagtgttatgaactgatctaagccgttttggtcatttgtaacaagatattaacaaccttctatgtttagagttaggtgagagcctgaggccttctcctgcccaatcacaccaccaggagatgtgttacaatgaaactttgactgggttctgctgcatctttattagcaagcagccacagcattggtcatgccacctgttcctgtaagctcagtgaagccacagctctcagacaagcaccttccccagaagtttcccttgagacagatgtagcaggattcaggtactcttttgatcaaaattatgcaatagaatctgaattcaagtctggatagagccctagctaatgacagggaacaggatgctaggtttgttagtcttatactttgctgtcctaagaatggaggaacctgtatctcatatatatatatatatatatatatttttttttttttttttttaagatggagtctggctctgtcacccaggctggagtgcagtggcgcgatcttggctcactggaagctctgcatcctgggttcacgctattctcttgcctcagcctcctgagtagctgggattacaggcgcccgccaccatgtccggctaatttctctattttttttggtagagacagggtttcaccgtgttagccaggatggtctcgacctcctgaccttgtgatccacctgcctcggactcccaaagtgctgagattacaggcgtgagccactgagcccggcccatatttttagtcattattttagtcacactttcaacactatgcactttaccagtgaaaaattatttctaacatttcttttgctaattaacaagccctccagttcatgcccaatgatgtactttgaaaggaaaaaaaaaaaccaaattataaaaaaaatttccagtgttgatcaggaaagaaaggtagctgaaggcgctaaacacagcttctagagcagacttaaaaaaaattttttttaaagtcttgctctattgctcaggctagaatgcagtggcactatcatggctcatcatgtacttgaactcctgggttcaagtgatcctcccacctcagcctcctgagtagctggggctacaggcgtgcaccaccatgcccagctaatttttcaagttttttgtagatttttgggtccttctatgttgtccaggctggtcttgaattcctggcctcaagtgatcctgccacctttgcctcccaaagccctgggattacaggcgtgagccgctgctgccagcctggagcagaaattcgcaaccttttgttggtcatgaaccctttgacagtctgataaatcatgtggactccttctcagaataatctttcaaaaacataaaatacataggattatcaaggaaaccagatacgtattgaaatatacctaggtcaggagttcaagaccagcctgtccaacatggtgaaaccccatctctactaaaaatacaaaaattagccgggtgtggtggtgggcacctgtaatcccaagtacttgggtggctgaggcaggaaaatcacttgaacccaggaggcagaggttgcagtgagctgagatcatgacattgcactccagtctgggcaacaagtgcaaaactccatctcaaaaaataaaaaataaagtgtaaaccactgtagcagttagtataaaatgctttttattaataagtggcagaaaatattaaatatttcataacttgagatgaggattgactataattgaaataagtattttatgttgtgatttaataaaaataggttaactaccttattgaatccttattgaataaggtacatcaaaagcctgaaagaaatggtataaaaatgtatctgtgcatatagctgatgcatcctaaaagagtaattggtcatccttctttagctatttcaaagtactttgccttccaattaatggcctgtcttaggggtgagtattaacccatttatgcctgaggttgcaatttttgcagtcagaccttggtgatgaccttgagcagaatataaataaattaagaacagatgaaaataattgcttccattttccaacttggaaatctacactttagctacaattaacaacgaaacttaaacagaagctatttgctaagaaattatatcttaaatcagaccattagtctgtcaaaatgaaagtgaaaatttaaaatatggaagtgaaacatgggatgcagagaagaacacatgtcagagaccacgcgggtgtaaattttaacatttagtcttgactgttcttaagatcttcactgctttctggtaagttaaatcattctgaccagcaatcttggagaacttagataaagagacacctctcctgggcctgggaaagtgatggaattgctccaagggttggatgggtgagtgtctggggagcggacacccatgggctttccgggccacctactcacaggctcctaaacaatgaccttcaagtgaagggctcccatgctacaaatacaaggccagaagctgaatctgaacccgcccagtaaaaagcttttggaccaggaaccagctgactgttaatgcaggtggtgagttaggtatgtttttataaaactcccatttagctccagtcatctaaaattccatctataatgtgaagagctacagaccctagttactttcatgccagacagtcatgtaagttcaaattacttttatggtctcttgaatctgtttattagagaatttactgtgctgccaggaccttctctcttttcctggaaccaggaagttgggaattactcaggtgttacattttacatcaaagatgaatcaatccgtctctagatcctgcatgtattcaatgcagaaggtaggttaggtatgttttcataaaacctccatttaactccagtcatctgaaattccatctataatgtgaagagctacagaccctagttacttatatgccaggcagtcatgctcttgaccttaaacgttccctctcacttcacccttgagttcttgcaaactactagcaaatgggccagattgtcagtgtttcctttgctgctatctggtgcaagcatctgacaactgtgagcttagtcaccatgtactgaacatttggaaactgtattactggtgttcctatctagtcaggggactaaggtggtgcttagtgtaaacattagctggtgattacaataaaatcctgcccagacgaacattctttagttggagagagacgctggtaacacaggaatcgatccagccaggcacaggaaggtttaaaactgctggtaaaaatctctgcttagaaacactgaacttttattccctattttgtggatactgtctagtctaaaaacaaatgtttagatttccaggctggaaagtttttttcacctgttcctgatgcttggcaggcagggcacacctccactgtatcttcgccagcatcatttcaacagcctttgacctgatctcctatctccagtcacgctcccacctaagcatcagcgcaatcttgcattgagtagttttgagtccagaggagccagacagacctagttttgactcaggatgttacttaatctctctatgcctatttctccatctgtaaaatgcaaataatagggttgttatgaggactaaatgcgttaatatgcataaaatgctcataactgtggctggactagtctgtccttcacatgcggaaaaagcttctgtgccttcccgtcctccacatgtggccctgcctttctgccttcccacactgtcgtgctattctctatctgaaacagcttcaactccaaaccacagacaacaaagaccttgtgacatatctttccgtgatgtctttttcaaccttaaataaggaataacagtaatgacaactttcattccttctctccacttttttccttgcagctgtaacacatatcactgtactcatgtttgccagatcctcttacagtgtctttaaaatacttcagcataactgcattgcacttcatggcttacccctttggaactcctcataagtcctcactgtttgtattcatttgtacagaagtctcatcatccctattaaattatacccaaaaaagtgatatagatgcaggcattagttttaatccacacataggaataactaattaacatttgatatcctaattacgcgtacacactccagggtggatgaggtagcatatgaacacctctaatcaaggatgcatgctctagaatagggattcttaacgtggatagaatgaatgggggggggttctataaacacggatggggaaaaggttacacttttatttctcagtaacttacaaatgaaatttagcgattccttcaattattaacataggtaatgaattatagtattagcagtacctgtgactttgtcaccaatacaaatcacagctgttttcgtatcacattctcattgttacaaatatctttagatgtttacattcaacacaactttgaagttgaagcaattattcccaatgctagaccttgttagttaataataaataagccaccatgcccggccagtgatttacacttctatatactctcttcttttattaaatacttagggaaaaagcccagtattgatgtttaagaaaactgaggccgggcgcggtggctcacgcctgtaattccagcactttgggaggccgaggcaggtggatcacgaggtcaggagatcgagaccatcctggctaacacggtgaaaccccatctctactaaaaaaatacacacacacacaaaaattagccgggcgtggtggcgggtgcctgtagtcccagctactcgggaggcggagaatggcgtgaacccaggaggtggagcttgcagtgagccaagatggcaccactgcactccagcctgggcaacagagagagactctgtctcaaaaaaaaagaaaaaaaaaattggtaggctgggcgccgtggctcacgcctgtaatcccaacactttgggaggctgaggcgggcggatcacaaggtcaggagatcgagaccatcctggctaacacagtgaaaccccgtctctactaaaaatacaaaaaattagccaggcgtggtggcaggtgcctgtagtcccagctactcggaaggctgaggcaggagaatcacttgaacccgggaggtggaggttgcagtgagccgagatcaagccactggactccagcctgtctcaaagaaaattgatagaattccttttcattcttatttattttcaaaaatacaatataccagagttggattacttaataacatacattaaccagaggaatacactatctttatcatctggcttgttttattaatagctgctaattttagttacgtgttaaattttattgcagattaattactaagaaatagcatattgatctatcttttatccatttaaattgttagatatacataattcaaattcgcccttggttacttttagtaatcttataggatgtattttataatctagttctctgtgaagtggcttttaaaacttttgtttgaattttaaaatgaggccaagttgtcttgtacagaaaatgtttgatttagatttttttttttttttttttttgagacagggtgtctctcactcaggctggagtgcagtggtgtgatcggggctcactgtagccttgacctcctgagctcaagcaatcctcccgcctcagcccccaaagcagctgggacttgagcgccaccatgcctggctaagtttttttttttgttttttttttttttgtatttttttgtagagaggaggttttgccatgttgtccaggctggtctcaaactcctgagctcaagcgatccttgtgcctcagcctcccaaagtgctggcattataggcgtgagccatagctcccagccatatagatttatatgtatatatataaaatcaatttttgatcataaagctgctttctagattatatgtcaaattgttagatcacataacaaattgtcccataaattgaatcagctaaatctgcagctctaatattttgaggaaaacacatcatgtcacataatattactttgtcaaaggtataatgaagttaacagtgttttgtcttctcaaccccttctgtgtataacaggttaagcaaagtgccactaagtgaaacagtagcaggtgtaattaacttgaaaagttatggcgaagtctttggcatgtacccaagaaattgagaaaaagagtgacttttatgatctgaatcacaactctttttgtaagccatatagttttccattatttgctttcaggaaatctaattcattctttagctgaaagatgattaaaaataatatttgaccagcctgagcaatatagtgacaccctgtctctacaaaaaaaaaaaaaaaaaaaaaaacaggtgtgggacttgagctcaggagtttaatgttaaaatgggctatgattttactactacactttagcctgggcgacagattgagacccatttccaaaataaagaaaacaaaataatgtttgatgttaaagtactatttgttttgttttgtttttttgagacggggtcttgctgtcacccagctggagtgcagtgccgtgccatgccatgaacacagctcactgcaaccttgacctcctgggctcaagcaatctcttgcttcggcctcttgagtagctggagctacaggcacacaacaccatgaccagctaattctttttttctttttttgtagagatggggtctcacattgttgcccaggctggtcatgaactcctgggctcaagcgaccttcctacctcagcctcccaaagtactgggattgtagtcgggagccactgtgcctggcatatataggtatttttatagaaaatagtgatagagtggttaattaataagaatttatattagaacaaaattctttggggaatgtggaatagaaatatgaattcatggaaaaaagtaaagatagaaaactaccgactattcaagaagaggtttttcattttataaagtatcgatagtgaatataaaaactaaaaatattatgaaatacccaaataccaaattttatggtattttgataccaatggatatgttgaaaggaattttgtttaaaaaacaatattttgggcgttatcctttgcaactattcaaacttaattttgaaaaatcttgtacattgacttaaaaatgtgtgagcagttacaaggcttcacaaaattcttttggggcacacgagcaataatacttcaattactctaggtgatacatgtgtaccttggataattaagattcatattaaaatcatattggatacatattcattgactccttgaagaagattaagttcatatgtgcaatcctttttacctcttctcctatttcatttttatattagtttcagtgcttttctgtgctgctttttctttcctttttttttttttttaaatacagggtctcgctctgttgcccaagctggagtgcagtggcacgatcacagctcactgcaggtcgggtgcggtggctcatgcctgtaatcccagcattttgggaggccgaagcgggcagatcacttgaggtcagcagttcgagaccagcctgcccaacatggcaaaaccccgcctccactaaaaacacaaaaattagcttggtgtggtggcacatgcctgtaatcccagctacttgggaggctgaggcaggagaattgcttgaacctggggggtggaggttgcagtgagctgagatcataccactgcactccagcctgggtgacagagtgagactccatctcaaaaaaaaaaaaaaaaaaaaaaaaagaacacagctcactgcagcctcagcttccctgggctcaggtgatcctcccacagcagcctcttgagtaggtgacactacaggtgcatgccaccgcacccagttaatgtatgtacatatttaaattttaacatataaaaatatatttatttatagagatggggttttgctgtgttgcccaggctggtcttgaactcctgggttcaagcgatccacttgtcttggcctcccaaagtactgagattttctgggatgtttttacataacgtattgatactcatatttcttgttaaatcaaccttaaacgttatctctctactcttttcttaccaacattatgagaccccgtgtttctccttcctgcgctcttttacaagccacctttctttatgcataagttgacattggtgtgtatgtttgtatgtatctttttctgtcagtgctagaccaaagggtgtcttaggcttcctcgtccttctctgtgggcttattatcaaaacccatgggctgtttcatggagactgtcctaatatagacttttttttttaaataaagaaattttatttacttagaaacattcagaatgtcaacaaaccagctgtcgccttcccctccttgccagttactgagtagtgttcagttaacagaacaacagttattttatataagctgcatcagagacaactgaagatgaaaaagcaacaaccatccccatatgtaactagctgtcctgagcactggcaagacctgctttaaatttccatgccagtttacagccccgtagagtaccaggcaaggctagtgaccactgggaataccatcaggacagggctctctgaagacacattgggtagtacattaactatacaaaagaagatactgcacagtttaaaaacaagtctcacgtagccttacatttcagtttttttctttaaaggagtgagttgtgtacaggggggttaaatttttatagacaaaaatgtattagaaccaacttattcatcatcatcactttcatttcattttttattttttgagagagggtcatcactctgttgcccaggctggagtgcagtggcatgatctcggctcactgcaagctctacttcctgtgctcatgtgatccttccacctcagcctcccaggtagctgggatcataggcatgcaccaccacacccggctaatgttttgtatttttagtagagatggggtttcaccatgttccccaggctggtcttgaattcctgggttcaagcgatctgcctgccttggcctcccacagtgttgggattacaggcgtgagccaccgaggcttgccttatttatttatttatttatttatttatttattttggaaacagggtgtcacccaggctggagtgcagtgacacaatcttggctcactgaagcctctgcctccccgactcaggtgattttctcaccgcagcctcccgagttgctgggactataggcaccatgcttggctaactttttttgtattttttgtagagatggggtttcaccatgttgccaaggctagtcttgaactcctgggctcaagcgattcaactgtctcagttcccaaagtactgggattacaggcatgaggcaccgtgcctgacccatcatcttcattttcttttctactcctccttttcgtcttcatctttctcttcttcttcctcttccttttcttgcttttttgcagccttgatgactgcctttttcaccccatcaggcttttcttgagttcatatgcagtaatagactttttgtgttttctttcagcttagcagccctctggtcttgggtctgcctggcatcggcagcagcgttattattccacatcttgcccagttctttccaacatcgccagtgcattggctgggttgttctcctttaatttttggtcagtgctcaggacagagcaagaaaaaggccaaaggaggctccttctctggtgcgttgggatcctggaacttcttttttgtgttccatgtagtagggacggagcttgtcatttctttttctgcctttgccatgtctgcagattttcttctctttgcagacatgaccttccaactcctgagcacttcttaggaagctctgaggagctgactgaagcctctggctgccgccacttgtgtttgcacagaggttgcatatgaggatgttttaccttccctttgcccacgctttgttattttttctcagcaaggagcgatttgcccagcacctgtcaggctctcccttggctgtagtgctgtctcttgagtgcagggcactgtgatggctcatagcataaagttgaaataaattatctttccctaaatcccatcagttgcatcagagtataccacgtttttgtttgctttatataatccatgactctcttaacagctttttgttttttctgcagttttatttgtgttttctggttctgtctttagcatattcttaaatttttgtttgcaaattcttagccgtgccattctattaatttcctccaaagctctgtatcttagaatcttctgccttctggttgttctctagacctgctgttatagagctgttgcctgggatttggtgaggaatacttttaaactaacatcttctgtctctttttaatttttagctcatggtttcttaaggaaatgcatagtttaaggtctcatgtctaacagtacagcaaggacaagatgttgacagagaacagacgtaggaaaagtggcgtctggacatttgaggtgcggcttatgaggaaagctatttttttagacaggttgtagtcatggttaacctaattcctaggctctgatttcaataaacattcactgaatgcctacaatttggcaggcactgggctaaatttaggtgctgaggatttccattgcaggagctggtgtggaggcagcaggatcacctgtaagtggctgatgacatgtaatagatgttaaaggtgttcaggaaccttgtattttcatccttaattactgtaattctcttatcccatccaataagcacagtgtaacggtgcttatatgtccctagacacgtagagtatttcacatgtaggaaacaggtttaagatgttcaaaggggaatcagttgacacccatactaagtagagagcagaggtggttttaggaaaagcaccaaactctcacactgaatattagtgagtgatagagctgattaatatggaaaattataatgaaccatcttgtgggggggtgtcctgatagccccccacactggaaaaaaccatgacattgcaaattaatttctagttggtggagtatggtgggggaggttttgaactgggcaccttagtgctttgtcttctggacctgctgttattctggagttttctccaaactagttcaccaaaaagtaacataagacatttgcatcatcttgctgctgtagctaaaagatgttctctcttacttttgaaagaaattctttctctttgttcagctcccctttcttccccctcctagttttgaactgagattatcacaaggatcagtgagatagaagaaataaataataaagacactaacactgaatgcttattatgtgccaggcactgttctaatcttcatagcaatcccatgaaataggctctcttgttggctacattttatagagcaggaaactgaagcctggagaagttagattagttgcccaaggtcacatagtaagtggtggggctgggattcacaaccaggcaattcagttcctgagcccagtcttcgccactgtgttttcctctgtctcatttcaccttagttacggataaagctgtaagagaaaatggctttctgtctgttggccaagtaggcttgctgacccctcacccttgagtgacacacttagcaggcacaggcaggccggacagttgcaggcctcctctacagggtgggggagcacagcctgtgtgtactcatttccttctcttgagtaccactaatttgatagttcacgtatcctctactaagaggtagagtgagacagcttagggacatcagaagtactactttcggttcttccacatggaaacatgaggaacgaggaataagtattctttccctaacacttacagtgcacttaagacaaagttttttttttttttggactgaatatacgtcgatggacacaggcccagatatggagaaagggcaggtttcctctaggcaagatttgcacggggaacctgaagctcacatagcttcagccctgcgccacagcttagccttagtcacataggtttccctaggtcatagcccagtctcaggctgcccactttatttgaaggcaagggaaaaacaacagtccaaataagataatttgaaacaagcatcttttcatttagttttctgctacaaagttgtctttaatttcttctcctgtatcatttgccatgggtgggagggcaaaatattaaagtagaaagaacatagttgtattttttttttaattaaaaaaatcttttttgagacagagtctcactttgtcacccaggttggagtacagtggcaggatctcggctcactgcaaccttttactcccaggttcaaatgattctcctgcctcagcctcccaagtagctgggactacaggcacccgccaccatgcccagctaaatattttgtgtttttagtagaggtggggtttcaccatgttggccaggctggttttgaactcctgacctcaagtgatctgcctgccttggcctcccaaagtgctaggattacaggcatcagccactgcgcccggcctagtacgtggctttagaatgagagacctaggtttgaatctagctttgttactgaacaaattatttaacctgtttgtgatatgccttccttattactctacaaagtggagaggataagacctaccttgtagggttggtgtattaaagtgtaccaggtatttgacgtttagcagtttaaaaaaggtagcctctattattattattaaagcaattaaaaatagagacttaaaaaataatttaacaactttaaacgagcaggtgaacagttttttcaggcaaatctcccttcatctccgctgggaaagaggtgatcagtattgggtgtattgtctgtttatctacatacacacccatgtatgaagatgaatacacaaaacaaattttcagatatacctcctataggcaatactagttacctgtatgtgtgtgcaatttagttttaaaattacaattcatatcctcatttacttttttccaccaagattataaatttgctttcaaagcttttaatactttaaaactttttgtcgttgtccttcaagcattcaaagattcccgttgctttcttcaaaacatctttagcttagttgacaaataccataaacttggaaggcatactcttattaaaaagggtctcaccttgtcgtccctgctggagtgcagtggtgccatcacggctgactgcagcctcgacctgctaggttcatacaatcctcctgcctcagcctcctgagtagctgggacaacagacgcatgccatcgtgcctggctaattaaaaaagaatttttggtaaagacagggtctccctacgttgctcaagctggtccttgaattcttgagctcaagcgatcctccctcctcagcctcctaaagtgctggcattatagttgtgagccaccacacctggtcggcatactgttctatagagttggttcgatcgatcctgggacatgaaataatgaaagaattattttttcttctctaagacagttcctattgcctccctccctactccaggtgttgccccaaatttgccatattttgcttgtttgttaggtaggttggaaaagtcttttctgccctctatcttccctccccttccccacataccactcactctacttggaggctagaacatgtttcctccaggatgttagcctaactcagaagacagggcttcatgaggacgggaaagagcagggaaacaaacataatgcaactcatgcagggagcgtggagccaccggagcaacaggtcctggagagaaaatgcagtcctgatgatgtcacagccctgaacagttttgattttgtctctccagcagagtattatttagaggtaaatattccttctgccttggtttggatcaccactctatcacagtcatgcgccccataatgatattttagtcaacaatggactgctcatatgaaggtggtcccatcaaattatgaaggagctgaaaaattcctgtcacttagtggcatcacagccattggtaaagttgtagtgctatgcattactgatgcatttatggtgaggctggtgaaagcaaactacttcactgccagttatataaaagtctagcacatacaattatgcatggtatataatacttgataatcatcataaatgactatgttactggtttctgtatttactacagtagactttttatcattattttagtgtatatgcctactacccatttttaaaaaggttaattgtaaaacagcctcaggcaggtctttcaggagttactacaaaagaaggcactgttatcacaggagatgacagctccatgcctgttactgcccctgaagaccttccagtgggacaagacgtggaggtggaagacggtgatactgatgatcctgaccctgtgtgggcctaggctaatgtgtgtgttttaggtttttaagtctaattttttaaaaaagttctaaaaatataaaacttctagaataaggatataaagaaagaagatatttttgtgtagctgtatagtgtttgtgttttaacctgactgttattacaagaatcaaaaagttaaaaaagtttataaagtaaaaactttacagtaagctaaggttggttagtttactgaagaaggaaacatttttgaaaataaatttagcgtagcctaagtgcacagtgttaatgaagtctacagtagtgtatggtcatgacctaggccttcacgttcactcaccactcacccactgactcacctgatgcaatggccagtcctgcaaactgcattgatggtaaatgccctagacagctgtaccatttttaaaatcttttgtatcgtatttttactgtaccttttgtattttattttattttatttatttttttgagatggagtcttgctctgtctcccagactggagtgctgtggcgcaatctcggctcactgcaacctccgcctgccgcattcaaactgttttcctgcctcagtctcccgagtacctgggattacaggagcctgccaccacacctggctatttttttttttgtatttttagtagagacagcgtttcaccatgtcggccaggctcgtttcgaactcctgacctcaggtgatccacccgcctcagcctcccaaagtactagaattacaggcgtgagccactgtgcctggccccttttctatgtttagatacacaaatgcctactattgtgttacagttgcctccaggaaatgccatacaggtttgtagtctaggagcaatagcctataccatacagcctgtgtgcatagtaggccgcaccatctgtgtttgtataaatacattctatggtgcttgcacaggttaaaattgcccgtaatgcatttcccgaacatattccttaagcaatgcatgcctgtatttaattgtggaccttgggcaagttatttaatctttaagcctcacttccctcatttataaaatgtggatgataataggattgatgctgtagggttattgtgagaattagagaaaataatatgtgaaatgcacttagaatagcttttggatccagtaagagcacaagcatttattgaatctagatttgaattcaagtctgcctagctcctaagccatgttctttccatcacaccccacgatgcacagcagcgtgaagtatgttatgtaggtagtgaccctactttactactgaagttgcagagaggttgaatgaggttaagtgactacttaggatcctaaagcccatgttcaaggcagaccataaactgaatgagggctgcttactcttagtgcagagtactacttcttatagtgtcatgtcatgaagacagtttaatatcttgaattatctaattacctcttgtctcatcaactagactgttagctgcttgggactattacatccatgtgccatctgattatacatgcttaaatagttagaaacttgagacttaaaggaataacgattactttagcatagtgcctcaggtacgtgtgttatctagtatgaacattagtaatcaaatacaatttcccaaaataaattaacacattaatttgggcatctggaccacaaaacaagtattaaatgtgaagtttacaaatatttacttaccacatgacccagctgttctacttttaggtacccaagggaaataataacgaatgtctacacaaagactatgaaggagcttgaatgtggttaaagaggtcaaaggactgaatagatatggaacagaaaaatcagtgtgatgggctaaggaagtagtttggacttggataggaattaatctttataatagtctaatgtggagagaaactccattgagaaaatttttctcttctttaaagtctaaacacgtctttagaagattctcagcatcattggttgttagagaaatacaagtttaaaactgcagtgagaggcccctgtgctcccacttgaatgtctgtaatcaaaacgacagacgatgctgcactgggtgttggtgaagatggggagcaaccgtgactctcatgtcttgctgacgggaatgtaaagtggtatatacactttggaaaacatttttaccgtttcctaaaaagttaaatatacttttgggtataaacatacttaccatgtgacccaacagctttagtcttaggtatctattcaggataaataaaaataaatgtgtacacaaagacttattcttgaatgttccaaggagcagtatttataatagcttcacgctagaaacagcccaaatgcctatcaactggtaaatggataaacaaaatactatgcacaataaaaaaggaataaagtactgataacatgctgggtgtgcatgaatgaatcttaaaaacatgctaagtgatagacaccaggtagaaaagctacatattttatagtatcatttatatgaaatgtccagaaaaaagacagtaggtcagtggttgcctgggcctagaggaaatatactaagaaaaaaatgtatatgtaaataatgctaagtgtatgacagaacaaagcaattagaaattagcaattgtagcaattagcaattctgggctctataccaaatgccacctggtgtttaaggagatctttcctctgtggctggttgtaactcatgcctccaagccccgtgcaagctctgggaattgtccagcttacacatgcttcctcagtactagttgtttcctggtgatttttctggctgcttggagtctcacctcctgcatgtgaagtttactcagccaaagacaaagactgaagggcccctgagcagattcctggagttctccctctgcattgcttccttctccctggccagcagactctagctgcctcagcttctcaggtctctcatccctggcaactcagttctggccaccaggctctggcctgggttcccccttcctggcccatggtctggaaagtatctataggcagaaaacctgggcagtcgaagggctcacttcccttgttctcctctcagggatcctcattttactctgcctgttgtccatcgtctgaacacatttgcttcaggtcttttgcccagttttcttgctgtttatggcaggagagctagaaccagttgttctatcatggctggggcttcacatgtatggtaaatgccttgtctgatgcccatggcaaacaatgcatggaaacaagtgccctctccgaggttcttaccagcaaatggtgctttcgtgcagacgagaggaaggtgacccctctggccagaccaattagaagaaggcaccacttctgagctgtctcagtcttacggaaagcacatggtgcctttttctttgcacccctcctaggccgtggcccttttctgccgggccattgtggcaggggctgctctttagcccccactccctctgggtcaggtgcctccatgaaggacacaaaccatacaactgcaggccctggccaggtggtctcattttaccaggtacctcttttcctgcagcagtgtttagcatgtcagttgctgaagggaaaacaaattaatcctgttatcctctaacccatttgtgttctttgtgctctacttgtggctcatattgatgaaaactctctgaaacattcttctttggtatttctcattcacaggaggggttaaataaatttggctaaaagttaaaggaaaaggaccagggaaaaggtcattcatgttattttattttgaatcaccatggaaataaaaagtctcaggatcccatcttaatatcttacaaccgaatatttccttgttggttctcatattgaaacaaatgtcatctgccatacactttttgtttctatcaaactaaacgaaaaatggagccctgtaaactcttggaaagaagatgctttcttgggctcattatttgggggcaataaggctggaaggagacgtagggtgtgtttggttgtgatctcatctgagaaaggatctgaacacatttctgctggtgtgcctggacaatcagttcttccatcttcaagtcatttctagaaatggtgaagtctgtagccctctctctggtgagtagatctgtagggctgtctgtgtgctctggaatggtatctggaattcaagtgttctgggcagtttacacaaaggtatactgaatgtcaatcctgtgaacttttacaactcattttagatatttttagattctatccccttccatccattaccctctgtctttaattatatttcccatttcttccctgatccatggtagtctgactactcttcctactactttcctgctctcatgtggtggatcaaggatcctttttttttttctctctctgagacagggtctggctctcttgcctaagctggagtgcagtgatgcaatcatggcttactgcagccttgaccaactggtctcaagtgatcctcctgcttcagtctcctgagtagctgagaatacagacgtgtgcatcaccacacccagctatttttttttttttttttttttgtggagaggtagggtctcactgcccagactggtcttgaactccagggctcaagtgatcttcccaactcagcctcccatagtgttgggattacagacatgagccgccacattcagccaatgatcctttaagtgatcaccctctatctttctgtgccctagatgctagttcagagtgtacttgatgctcaccttttagttgtatgtccaaagcttgtgccagttctcattggttagttgtgaggcaacggaagcaccttaagggactgtcacacagatatgcttagtcacaccctgcctggagaggggagtcaggaatcgtcacacaaaattacaggagatgaactcaaggagtaattaaagcagctcttagaattggtctttgggagctagagacccaggcctgctgtgctaacctcccctttcactggcctttgtgacattggactcaggccactgtaggatggtgggaggagcttgttctttggatttctgaggcttaggtagtttggatggctgtgtgagctgcagagagtaaatgagatatggctgagtccacatcagaatggagagacagatgtagggagccttctcgccctccatgagcctgttctttctgtagcctgggtacgactgcccatggcgccttctctatccaaactctcacctcccagtggtgcctctcatctggttttcctccttctctggcagttccttttttcagtgtcttttaaagttaccttattgtagaaacgtaaacttgcaagttaatgttactattctgttggtgtcttgcatttacatttgatcctcagtggctctacttcttacctaaggtgttagatgatcagcctatggaaataaactaagaccatgcaaatgcgaacaaacagactgttaaccagagtgcactccagcaagggagttggccaccatcacttgggtttggcagatgcacagaggcaggcaggggcacgtgaaactttatagtggagaaaaggaaaccttcgagggttttctgagacgaggctgtggcctgggggagctggaagcaggctaatagaagtggatgtcttaggtgcttgttgtggggagcatacttgactttctcttgctgattctgaatggcaagcaggggcaaaaaataaggaagctaagagtcactgaccaaggtcccaccctcatgggccaatgaccaaggttgtgaattagagctctggttgtacgtggtctgcccgttgtctatttgaatattcagtctctcccaagccaacgctgacctagaacatggagccccatagctcttcataaattgtctctagcacactgtttcttaaccttttttgggttatagactctggactattttaagaatctgaaagctataactcctctgcctagaaaaaaccaaaaaaacagtagcatggattcacagacccactgaggcccaaccatggaccacagatttcattttatttatacagatttaacaattttatcttttttgtgactatgatgcagcattaatccgtatggagtatatagactgctacctctttcttacaccttagaagtaattgccaataaattaatatgcacatatgtttaaatagcactacttttatcctataccaagtaggtgatatggtaggtgagtcaatatgtgatactgatgagaaacctcattaagcaccaaaaaggatacttttttggtcatttcaaccaatttttatttaaagctttttaagttcttatttccctgccatcagaataaattaatggaatatcatggcttagcatccttttcatgatgaactgcaaatacatgattttctaatgttgagatatctgacttaactggattgtcagctccttgagggcaaggacttgtgcctgttctgcagcctctcaggaaatatcgaaatgaacacttcagggctctcctcacatggtgcctgccccagactgtctgccgtgctttcctcattcacgtttctctcttcatttttttgagcggtaactattggcttctataatagtagccatcatttcaaactcccccaaaactctgattattggaagcagatgagccaaccccttctggtctgtgaccttaaattaagtgtatacctggtctcttctatagagaaaagcatggcttctgtttttctccatctctgaaagcattttttttttttgcttttgattcaagtatattctgaatagttgataaatggaattccaatctttggataaaaaggtgtattaatgagtctgttgaaacttttttttttggatgagtatcaggacactgggagaactatagcaggcatggggacagcataaatcaggactggacagtttagacaagctcgtcatttcatgtcacgtccaataagcattgagtgcccaccagatgatgtcaggcacccggaaagaaacgccttctgtgtcctcagggagctcgcagtcacagagagggcaatatagctttgatacttccttagaaaagaagacccaagggaattggaagtccctggtaggggacagagaaggtcacttttgttttgaaggagaagtaggctatcaccagggcaaacaatgggaaaggcaccctggtaaccgaaaggatagaagtgactgagcctgaaggacttgctgagcttttagagtaatgcagtggaggcataagcacgggcgtaggagattgaggctggagagttggggagtggtggtgctgtggagagccttgcttgcttgcttaaggagttagaatttcatctgcgagggagttgggagccattgaggggtttgaggccaaattatgaccaccagatcagtgtgtggtttagatgtgtgcttgggtgagagcacagctaggaagttgcgtggtaaaccaggagggcatgaagcagggtggcgttgtgccccatcagccacgtggcccactcccttgcttccacttggtcaccatcaaacgtcctttcagcaaggcttctcttgaccaccatgtttaaaatttccaccccacttccacttccgcaaaccccatccaccttccctgctttatttatttccttagcacctattatatgacatatttactcattcattcattcactcattcattctatttttaataatttaagctcttgcagggcaaggtttttgtcccatttttccaggctgtctctccagggcttagattagtgcttggcacggcagactgtaaatatttgctgaatgaatgactatcagaaggaaaaagggaggttggggttgtgagacatttcaaggtgaaaaccatatcttaggacagggataaacaaagccatcttcagttaagctgttttttcccttgtgagtagtgaaataggtagtcgtgaaacttttggaaattgaattttcactcaaggaagttaaggaaatcttcgctaagcagtcaattttgggagtaattatagtgaatttcagtttctctcaacctgctggctgacttaaccccaagacattgcatcatgagacagaatcacaataatgatggcatctaacatttatcaagcatgcgtcagcatacgtgtgccatgcacttcaagtatgccttttgtttttcttttcaattttttcatagagacaaggtctcactatgttggccaggctggtctggaactcctgggctcaagcgatcctcccgccttggcctccgaaagtgctgggattacagacataagccaccatgcccctatccccagcctctttttttgtggggggaattagttaatttcattttttttttaaaaggtggggtcttgctctgttatcccgactagagttcagtggcacaatcatagctcactgcaagtgcaagctcatcagttcaagtgatcctcccagttcagcctcccaagtattgaggaccacaggtgcatgccactattccctactgagttttgtattttttttttttggtagaaatggagttttgctatgttatgcaggctggtcttgaactcctgggatcaagtgatcctcccgcctcagcctcccagagtgttgggattacaggtgtgagccaccacgcctggcctctttttaatttgaagtaccaagctttccaacttagatctaaactctagacctaccactggttatagtgaagacaaaggctttaggtttaatttgatttcatagctattaattctaatgacattactgctgcgagggacatttgactttgggattccttgtttagcctagctgggattaggttttggaatcttaaagcagattgtattatgtaatggggtgtgtagaatctgtaatatagccctgacacgattgtgatggctctgtctgttagattcttaggacttggatttggaagtgttctccttattttcctatgaatttgtgagtcggtgtttttcttcaagtctgaagaaaagaaaactcttttctgttttctcttaataggaggaatttgaaactgcaggggcctagtaggaggtggtagttgttcagatctacctgttgctgctgtgtgggaacttaagcctagcatttccaagtcttctgaattttcaagagaatttgaaaatccagattttctaatgtgatgtcttctaattttctacttttgatcaatacagtgaggcctgaacaaaatgcttgtggaccttttttttaaaaaaaacttttttggtgacagggtcttgctctgtcacccaggctgagtgcagtggtgtgatcatagctcactacagcctccatctcctgggctgaagcgatcctcctgcctttgcctcccaacatactgagattacaggtgtgagccactgtgcccagtcgggcctgtagaccttgagtgtgtggcctctggttcggagatataggtgtagaaaaggtgaagggctggggggaaattagttaatttcatattcagtgaacattttccccagatcaatctaatcaagcagaaattcagtcatattaatctgatcaagaaacacgatggaaaatagggattaaattgaaaaccacaaatactgagagaaataaaaattagaagctttctttgcttgtagtctaagaatatcttaatccgccttttttttttttggtctgtggccgaaggccagatgtctggcccagggcctcagctcagtaatgtattctaatctctgtatatagaataccttgaagttatttgaatttgccatgattaaaatgagtgtgtattaccctgtgaatgtgggatatgaaatatacttcatcaaaaaccctccacaaatgagtcagtattctttggccagatttaaactttctttttatttttctttaaaatttttatagagatgggggtcttgcagtgttggtcctgaactgctggactcaagcaatcctcccacctcagcctcctgaatagctggactgcaggcccacaccactgtacctggctagatttaagctttcttatagtgaaagtggacgatgaaatgaaactcattctgccggtgtgtttcacagatgagaaaagacaagtgatttgcaagtgattgagttaatactgagtgtattctttgaattatgctatcccagtatatgacagtttgaaattatggaatttatatatcagagtcttcatatttctaaagtcctatgattatgaaatatactagttgtggttcagtggccatattgcttggatgtccctctgttctcaaccagttgttgtttgtgtgggtggaagattcgaatagaatggggttgtcaaacttttttctacatttaaataagttttctccaaggactgcaaattaccagtatctaccaactgtcctgagtgggattggacacaggagatgtctaactgctcttttcaaacaaccttccttttctaggtctcctcctaccttctggggtaattggcaccagtttcagtcttttcttgtattctgtggatgcattttctatctttttttttttttttttttttttgagacggaactccctctgtcacccaggctggagtgcagtggtgtgatctcggctcaccacaacctccgcctcccggcttcaagcaattttcctgccttagcctcctgagtagctgggattacaggcatgcaccacaatgcccggctaatttattttgtatttttagtagagacagggtttcaccatattggccaggctggtctcgaactcctgaccttgtgatccgcctgcctcagcctcccaaagtgctgggattacaggcgtgagccaccgcacctggcgcattttctgtcttaatgtcgtgtgtttcagttgtaaatatctccaagtttcattgaacatggaaacattgttttctttattgttttggacatgattttagagacagaggatggtggtggaagtggttttattttccccataatacttcttcgagagtaacataggctgtttaagaaagatagtgtctagggaactcatgattaaactgagaaatttaatcatgagtttaataaatgaataagtgaagtttaataaatgaataggagttagcctgtagagtccaagacagaaatagtcatgtatgaaagccctgagactgaaagattggtacctgggtcagtcccacatgggtgaaaggaagaccagtaaaagatgtagttggagatagagaaaggggccagatcacctgaacagcttaagaaatatttgcagaataagcaaaaagccttgtgttggacattcccgtaaaggaagaacactttgtccttcagaagcttatggtctagccgagatgacatgtaaaagtttattctatcatgagacaaatcgagtggtcctacataagcagtagaaacagtttcggctttatgtaggaattggggaaggaaatcacttttgtatagggttcaagtggatggatgcttgagggagataaagtgtgatctgagcctttctcttgtgggtgggccttaagcaagcagaattgctagggggaatggtgttacctaagttaggtatatggaggacaggggagtgacgtagctgagttgggggagatgacgcctgagcctccagtggtccacaggtggcactgatagggatgttggaggctcactgctccttttcttattgtcagtgaaaagagttgaacagtgaatctaaggcagcttcacattccttgtgccagttcccagcagatgctttctgctctccgcttagacattccactgctaggggaactggctgtctcttgaaacagtgttaattattcttatactaaagaaataacccacttcctataatcccagcactttgggaggctgaggtaggcagatcacctgaggtctggagttcgagacagcctggccaacatggtgaaacgctgcctctactaaaagtacaaaaattagctgggcatggtggtgggtgcctgtagtcccagctacttgggaggctgaggcagaagaatcgcttgaacccagaaggcagagattacagtgagccaagatcttgccactgcactctagcctgggcaacagagcaagactctgtctcaaaacaacaataaaataaagagatatcccacttgcggcaaccttccccagtatatcttactgaatgcagccctggaagtgacctaaaacaagttagcttccctgccaggtatgagtcccctcagctttgaggctgggcagcctgtcttcctctcatcttacccgctccagctacagggatttccccttctttcactggtagagttttcaaatccccccgcctcctgaatgctattattctccagtcatactctactttatcaatgttgctattagaatttatccttcaaaagtggatggaaaattctagatattgaggacacaacgaacagggctttttgtgatatttgtacttcttacagagagttgactggagtaagcaaatgttgagaagcttctgttgtgagtgtagtcactttctaaatttcaagtcagctcggcttcattccatgtatggaaagtacagtgggggaggagtgacaaagaaaaaaatcatactcatcacacagattgttgtttggttgctggtagtgccagccaagttcaaaaaagcaacaatatcatgacgtagtatggctgtattagaataagctctttgtgatgtatacatccgttatacagcgggttggggtggggtcttgttgaaccagagattccaaatatttcagttgtgaagatttcagcaactcagacctttagaattaaaagagatgatgggatttggattcagtatttgattttggtagttgacaacagtaaatgatctataactttcctttctactgatattattttgtgttttacacatatgtgatactgtgtggtttacttttggacccaatatcaattttttttgtgtcatggacagaagtattacaacattttcagaggtgatgagtttataaaatttcttcttcgtattttggcattctagagattacagatataatttgatttctttgtatgatgtgatttgttattcaaatgagaagtgagcatgagcccacaagccagatcagtaaaaaggaggaagaggttagtttattcatagataactgtctttatcccagatatgcagccatattgtttgttgtttcccaagctgcctgcttccaaaaaagcacattcatccatggtcatccacctgggctggggaggtctccagtaactaaacagtcactatttgggagatagtaattgttgcaggcaagaattataagtgggtgctaaaatttgcaggtgaaagtatgacgatgagaaacagagtgtttacatagtttaaaagtttatcccccacatgattcttatttgttacgaaggtaaaaatagtaattttactgtgggaaacctcatagatccagccttgaccaagtgatcagaattaacatgatcagtaatggcacatgcacctcatatgactcttggtagaatgcaccaaggagggcgcaatgtgacttcagtggtgggcttgccaaaatgcacaatctggatttagtcaggaggaagcattaggcaaacccagattgagggacattctacaaaataaatggccagtcctcttcaagtgtcaaggtcatgacagacaaagtgccccaggttggaggagacatgacaagtatatgtaacacaaggtcttggaccaaaaaaaggacattagtgggggtaattggcaaaatttggaggaggttgtctataggttatttaataaactgtgttgatggttaatttcttggttttggtcattgtagctgtggtgatataagaaatatttggtggttaacatttgaggaagcttggagaagggtgtacaggatttttttgtactatttttggagctttttgtaagcctgaaagtatttcaaaataaagttaagcaacaacaacaacaaaaataattcaactcagctgagaaattacagctttagtgcttgtacttgagacatttctctggattggtcagcagctgcttttgcttcctgaatctccacagtgatctggatagttgaggtttctaattaagggatcttgggatgagtgagacatggctgtattgaattgcagctacactttgacaaggtgttgtttaattaattaatttatttatttttgtacagggttgtaattacatctttgggtgtcccatgcctttgcaggttatttgagctttactgtcatagccatcagaatccctagctgcaaacttagctctgtaattaatttactggtttgtttctgtttttattatgatgatgtgaattcaggttagtcccatggattcttctgctatgtgtcatatgttattgaatttcatacttgttgtttgtcttaggaagagttgatgtttttggtataaaaacattttatttaaacttgaaatatcatactaaatatatatttttcccctcagaaaagacactttggagtttctataaataaaatgaatagtaaatgtactataaaatagagtaaatgtactctagcataagcaccaagtgctaaccttttattaggtaatcattagaatgggagaaattagtacattgggaaatgttagcaggagcagtggttaatgtgtgattcgtagattgttaagtcgagagtgttttgatcagtgtgggcaagaacgtggaccttgggagtcagaagacctagttttgaatcccagatccatactgcttattacaggttgagtattccttatccaaaatgcttgggaagtgttttggatttggatttctttctttttttttttttttttttggattttggaatatttgcataagggcaatgagcatttcctttgaacatgaccttttgagcatcatgttggcgctcaaaatgtttcagattttggaccatttcagaaagattttggattttcagatcagggatgttcacatcacaacctgaagtatgttcacttcacaacctgaagtatgtgctagacgggttgacttttctgagccttactttttgcatctgtaaaactggaatcctaatagtatcttgcaaagttatcatgagaatggagtcatgtagcatgcagtgcacctggtctaaagtgaggcctttcatccatgttgaattctcttcttacctcccctgtaggtttataacaaagccacctgcaattgatgagaaactgctttgcttataaagacaataaaaagatgatagcatgtcagtaacctctccagatttcagaagtcttttttttttaattttcgaaaacatttttctattttttaaaaaattttatttttttattttaatagcttttgggtacaagtggtttttggttacacggatgagttatacaatggggacttctgagattttagtgtacccgtcacctaagtagtgtacattgtacccaatatgtaatctttttatccttcacccctcctgctccccctcttctgagtctccaaagtccgttatatcactctgtatgcctctgcatgctcatagcttaattcccacttattggtaagaacatgcaatatttggtttttcattcctgagttacttcatttagaatagtggcctccagctccatctaaggtgctgcaaattgggaactgtgttacaataaacatacatatgcatgtgtctttttcacataatgacttattttcctttgggtgcatacccatagtggggttgctggatcaaatggttgatctacttttaaagttccttaagaaatctctgcctgggtgccgtggctgatgcctgcaatcccagcactttgggaggccgaggcgggcggatcacttgagatcaagagttcaagaccagcctggccaacatggtgaaaccccatctctactaaaaatacaaaaaattagccgggcgtggtggtgtgcccctgtaatcccagctactcaggaggttgagcctggagaatcgcttgaacccaggaggcggaggttgcagtgagccaagatcacgccactgtactccagcctgggccacaagagtgaaaactctgtctcaaaaaaaaacaaaaaacaaaaaacaaaacatgcatactattttccatagaggttgtactaatttatatttctgccagcagtgtataagtgtttcagaagtctttttgtcaggaaattcttctacatctcttattccagagaaattattttcttttatgtattagccatgttggatattactccaaaatctcttaaacaggtatcactcatttgctagactttctgtggtgttttaatgttcttgtcagaaatcacttgatacaaataagtattaaatttcttttagaagaaaatctcaggagacaaagcaacaaagagatggtcgaagacaattggaagcaaacattttcatgtacagtttcctttcaggtttcaggccctgaaagttgagttttgatcctctgagaagggccaattattattgttcctattttattccagtttcaaaagtactttcctttattcttaaattgtttgatttcagtattgccctgttattatgtaagtgaacatcatcgtttttaggaagtttagaaaagcttgtccaaccggacttagtttgttgtgttgttgttctgttttgttttaggctttaagcagcctgaagccatggtctttagtttctatctctagtgataagcagaaaagaaggatgaggaaggggctttactggcccagccagaaacagaaaccgtgaacccatgactgttttctgtgttttggacacccggattgttaaagaggcatgtctgcaacttaccctcaaatggttcaggaaaaaaaaacatatatgtgtatgtgtgtatttattcatataaatccttgggggaaagggaaggagaaggagaaaagcagtcatggcagtgttaacaattagtaaattggcaggaaaggtctatgggcattctttgtactttttaccacttttctctaagtttgaaactatctcaggattacattgactgtatatattgagttttttttttttttttttttttttgagacggagtctcgctctgtcgcccaggctggagtgcagtggcgggatctcggctcactgcaagctccgcctcccgggttcacgccattctcctgcctcagcctcccaagtagctgggactacaggcgcccgccactacgcccggctaattttttgtatttttagtagagacggggtttcaccgttttagccgggatggtctcgatttcctgacctcgtgatccgcccgcctcggcctcccaaagtgctgggattacaggcgtgagccaccgcgcccggccatattgagttattttcttgtcccctgatgagatgtcagtaagtggcagtttcagtgggaggaaggtgggaggttagaagtgcttatgtgtgcggagaggaataagtagtgagtaattcagtaagtacaggttgagcatcccacatagaaaatccaaaatgctccagaatttggaactttttgagtacccacgtaacactcaaacaaaatgctctttggagcattttggaatttggattttcggatttgggatgtgcaactgttaagcatagtgcaagtattcccacatccagaaaaaatacgaaacccaaaacacttcaagcgttttggatgagggatactcagctgggttaattcactggcaagaaattagtggtttctttaatttagccttttttccttagccagaatagaattcattgttttgtagaggagcctgtacagataagagagtaatctgttgctttttcaaagcagagaaaactacttggaactgaaaccagatgataaaaaagtaaaagattaaaaaatatatatttataagacatacacaaagataaaagcaaaatctataaggcagaaatattaggactgttgaaattattatctgtgctcagtcctccttctaccagagagatacaagttgtctgtgattagcagcctgtcttactagctaatagacattcatttatccttcaaattactatgtggcttcaaaggtattattttatattcttactgtgaatttacataatgtttattattttacccttcaaaaaaagtcttctaaactaaatttttttttttttttaacttttctttcacgtcaatgatgacatctgttttgggagctcaggggccagccgaaggtaagagatttggtttgttatgtgatgcttgtaaagatcttatatgcatgttgttgaactcttagaagttttcttctcaaaaaggaaaatattttctatcattttgtacaagtaatgcaagctgtcagcctactcacaaatctgaagccatttattggcatgggaagggccggaggtttatggaaaagctgtatttgcactttgaccacttctggctggtctcctagcagctacaacacagattccttttgtgccatagattggctcaagactggtagttccaaactgtggtcaaagccgactcatcctctctgctcccaagacagctagggatgcattcccagccaacagaaacctgcgcggcctcaagccgcctccatagattggctctagactggtagttccaaactgcggtcaaaaccgactcatcctccccactcccgagacagctgggggtgcattcctggccaacagaagcctgcacagccacagccgcctcaagggaacatgctttcacctctgtctcttagggaatgtggagccctgcttgaagtgggcacaaagtctgtttcttaactgaccatgaagttacttggaacttccaggaaatttagatttctgtctccattcttggggttttgtttttcctttacagtccgtggctgaattgtaattcagttcgctattattattgctaaaatgtgtattatagacatggctgtttgggactctgactttttaagatcatttatttattaaattttttttccctaaccacagggactgaatgacaaacagaaagtcaccctgtcagtataaaacatcattgtgaaaaagccgaatagggcactggtttctttatatatgtaaactttctctcatcttttctactgaaaaggtgctggattattttcgttttcttatttttatgtatattttttgagatggagtctagctcttgctcaggctggagtgcggtggcgtgatcttggctcactgcaatctttgcctcctgggttcaagcaattctcctgcctcagcctcctaagtagctgggattacaggcacccaccaccacaccaagctgggttttgtatttttggtagagacggggtttcaccatgttggccaggctggtctttaactcctgtcctcaaatgatgcacccacctcggcctcccaaagtgctgggattacaggcgtgagcgaccgtgcccagctttttttttatttttattggtgcagaggctggaggttgcagtgaagatatgaaggaaccattgcctggtgatttaaaaattgttcatattttatttaattcagttgcatgtttagaaaaaatgttgtgttgactaaaatacatgggaggttaaacacctcagctctggggagaggtgtacttgttgaacagggagaccttgatttttcctttatgcttctatgttattcgaatttgttacagtgtttacttggaaagaaaagacttgtccagtttatgaaatctttgcctggaagttacctataataatttacgaaattgctaagccttaaagaggaccatttagagctgtagtaaataaaaagtaagtgtttattagtccccaactttgtgccaggctgtggcactttcatattggggaatagagctaggctagcctagtggtgcagaggagggaccttagagccagactgtgggctggaatcctagcaccccaacctgctagatgtaaggcacttaccttttttcttcctcaggttcctttgaacagtgtcgagcacacaggcttagctccattatggttactttgggaatagcctctcgactcaaattgggaataagaaatgtcactgttaaagaaatccctaaaagaaagacaagtaaaaaaaaaaaaaaacccaataataatggagaggagagtgccatttagaacctatctctgataaatatacagttggccttctgtatctgtgggtttcacatctgtggttcaaccaaccacagattgaaaatagtttttaaaaaactatgaaaaataatacaacaataaaagtaaaaatttagggccgggcgcggtggctcatgcctgtaatcccagcactttgggaggcggaggccagcggatcatgaggccaggagattgagaccatcctggctaacacagtgaaaccctgtctctactaaaaatacaaaaaaaaaaaaaaaagccaggcgtggtagcgggcgcctgtagtcccagctactcaggaggctgaggcaggagaatggcgtgaacctgggaggtggagcttgcggtgagctgagatcacgccactgcactccagcctgggcgacagagcgagactccgtctcaaaaaaaagtaaaaatgtaaaaagcagtacagtatgacaactatttacatagcatctactttgtcttaggtgttttaagtaatcaagagatgatttgaagtatatgggaggatatgtgtgggttttatgcaaatactacaccattttatataaggacttgcacatctgtggattttggtattcatgggaggtcctggaagcagtcccactcaggatactgagggatgactgtatacacatgtgatagggcttttgaagtgagaactaagcttacaagaatcaggatggtttttacttagccttattaagaacagaattaattaaataaaattatggagataagcgtggaaagctagaacaggagaaacttcgtttgagctccacattttatttactcctactctgctgtaatgattctcactatgggtgacacctggagtttgcaaggcagctccccccagtttgatgcccagtcctttggggccatcttccatcctcctccttttgctcctctgtgtttgaaaatggcttagtgagccaccactgctgatagatatacgttttagctttggaaaaacatggagggtgagcagtgtgtaacacaacactgcagctggatgatgtcttctgggcccaagggctctcaggggctgtcagccgctgggggtctgctttcacttcctggcctcgcttccttctcacagccccatccagggaacaggtgtctcccctgcctgctgtttcacacagagatgcaggtgtgccgatcctcacctgtccagaggtgctgagccagtcgtcctctcggttgctgccagggttatctgcctccccctttagttgcccttctggtacctcccagaactgctcactggctttgcagcctgtgctctccctgcaggcccccacccttacccccatcagtttcatcggaactattttttcaggagtttctcaattctgatccaggcacaagcaagcactcttggtttcaaaaccttgttcttttttcccccttctcttcctttttggcaatttccccacttcccccatcgcctgtcgttttgagttaattttagctgggtgatggatatcagtatgcattattaatttaccatcttaacctaattttctttcttaaaaaaattaaccttttagacttctggtccagataatcttgtgagtttacacagaaacattctcctgccaacatcaaaattatagcagagatagataaaatattttagaatgtgcgaatcatgtaatcaaactcgaaaacaaatttagactgggcatggtggctcacagctgtaatctcagtacttgggaggctgaggctagaggattgcttgaggccaggagtctgagaccagcctgggcaacatagtgagaccccatctctacacaaaactagaaaaacacaacaacaacatatataacttcaaggaccagcagtaagcgagggctgaagtgacatatttccagggctttggaatcagaccaggtgcctggaggtgattggaagttcaactcttgccgactaatgggggcactggtgtatggttggggactggagccaggctcaccatgtgaaaactgatttgggcgagccttctctgtgagtgaaagcttacagtcagtttttggccaccaacattgagctaatgtctgtgttaataggaagggatggagacattgggccttgagaagacccaaaatctgggcttcagtaatggaaatgacagcataaactagtcatggaaaggtggccatcaggagaggaaaaaataagcaatcatgtaaaccataaaataaacactccctgctaagatgtacctgcaaactaacatgcaaaccatcatcaggaagcatagcaacagactcccaaagtgggagaatgtgacaaaatgtgaaccgagatacattttaaaacaattgcacttaaaatctttacggagataaaaatcacaaaacacaagtaagtagatttcaaactgacagaaatcgaaaaagtgaaagatgcagtcagtgaaaaatttgcctttgcttagttggtttaaaaagaaataattagtgaaaaagaagcttttcaaacagtgcaaaagaactatgtgatattctagaaagtggtgataaggtgaaagatcaaaacagatcatctgtaagatcccaccaagtagcattttaatacagattgttcctgctttttatgcatatagttttttggtacaaatatggaatcatactctagacttttataactttttcattaacataaactttttttaaattagtaagtcttctataccctcaaatctatacttgcacatgggcatgtcataatttatgtaaacattctgctattttaagctattttggacatgctatagtgagcatctttaaatgttatttaaaaaatatctttttctttgactacaaaaataaaaatattgaaaaaatataaaaacatgaaacagatcactaatttcgctgcaaaaaaataaactatagatgtaattctgtgtgtgtgactgtaggtgcatgtgtgtgtgcaatagccattttattacacattttgtgaatagttttccatgtaaaatatagagtcatatcacctatagcatgtttagttctcattgtaagcctctacatacataattaattcccattgtatgacagtaagttgttttatttcactattatgaacagttctatcagttatggtttataagtaatgttgaggttttcttaacacacacttatgttcattttcaacaggtgtttgcttatgatcattgtttctggtctatggatgaatctgtcaaagaaaagtatgcaggtaatagaatccagcatcctgtcaactactgatggtgtagaagaggggttcagtattttttcccttacacgattgcttggcaaaccccccaaactgtgtgtttcctctgctgtcacaccacaataacagtcatcaacacagaagatgacttaatgtgaccaaatgttgggggagttttccctgcaccccaagcggcagacactggctgggtgtcctctaactcagttccgatgctctctacctggggacagcgtcagatccacagactgagggctcagtcccacaagaccgctccctccttcccaccagcgcaggtccaggcctctagaacttctgacctactggcttccaattagggttcccacaacctcctctttgggtttgattaatttcctagagcggctcacagaactcagggaaacacttgtgtttaggggtttattacgagggattttctttaaaggagacaggtaaacagccagatgaagagatacagagggtgaggtctggaagggtcccaagcgcaggagcttctgtcctcatggaggtggcgcggcgccctcccggcgtgtggatgagttcttaccttcctattgggccctgtgtgtttagcaatccagaagctctctgaacccagtccttttaggtttttatggaggcttccttatataggcatgattgtcaaccgattagaaatgtgattggacaaaaagtgcatgactgaacacagcacgtcctgtctgttcagacttttcttggccattctgtgtagcattccttcctttaggatatgaggcaagaccttgtggaatgagaagctcttgacccacaatcagatgagagtcttgcctccggcaggtaaaaggagggcaggagatcagatagtttcctgaggctaaaatgccccaacatgtaaaagactgcaacaagggttaatgagccaggaactgcggatggtaacctacatctctataattaccataggatatatatgagtaccataggattcttttgcataactgtagaaagtacagacaacaccctcccgtgtttgctattagagtttttaatgttgattggaaaatgggagattcactgtgtgccattcttggtatacgttgatgaaattacatcactagtacacacagtggctattccacattcacacgccccagctcttacatgaggccgggagcacaaggtcgccccttagattgccctggaggcctgagactgggctggagagacaggatggcatagtgaaagaaggggagcaccggccaaggagaaaaggaaccctaggctgcaggcccagccctgcttcttaccgcccctgcgcctttcagtaaatcacctcacctgtcagagcttcagttttctctttttgatggaaaggaatatgccatattctctctaaattttcttttggctctggaagtctgttactctattattcttctaaatgatgactgtctcaagccccatctcaccacaagtttaggactgcagtgacagcctttgattgcctttattccttactgcttttgtcgcctgtttttaaacaatctcttttaaatattaagcatcatattgttttggcttctgttatgagaaagatgaatattatggctgttttgaagttaagattcatttggtctaggtggcccaatatcagaagtataagttaactggtattaaaaaaaaaaaaaaaggaaatgagacataatggaatacccttgccataacataaaagcatccagttcttccatgtggtattgagactaagtgaggtagggtgacttgtcagattcacattcaattactgactagtgacatatctcatttggcctgtcggggagaatttgactctgttctttatgtccatgattgaaagctgagggaaatttccaggctctgactccctgtcctaactggtatgtgttgtagatcctgtaattagaaattgtcactgagggaaaggagagggggttggtatatatgattattctaaactctggtacccaccgaataaaagcattgcctgagtggtaaatagttaagtccaggtacacctgggtcccaagtataaatttcagatatttataatcattgattataaagtgagcagctcattggctctgcattgcaggggattcttagtcgtgtttatttattcaagcatgtattacagggagctgattttccctcatgtgctaactagaaataacctggaaggcataagcctttgggagcattcgtcaaatttaaaaatcttgtttggagataaataagcagattatacatttttgagatttttgtttttgttttgtgaattgttcatatgtagttttggcttaaaatatcttttctcttattctctctctctcaggtcaagatattgttttcaagtgccttggagagaatatcctgcagaatgcttttgatggctacaatgcatgtatctttgcctatggacagactggtaatgttaaataacatgaaatcacataaacaaccatcaatgaaagaaaatagaaccatgtttattttactgagtaacattgctgatttattccttgttgtttttgctttcagaaagtactgtagatgttgaaagtagtcagtaacattattttaaaatgagtgtaataaaattaggattgggatcttttatctttactgatttttctcacaaggcactggctgcattgtttttcgaaaaaatacagagctatgactgttgaacacattactagccatgcctatagatcatgcttttttaaggctttcagaaccataacagataaaataccaaaaagaacatacttgttaatatctcaccagtaataactaagaagctttttggcttttgagtctctgtggtcaagaaaagaaaatttgaagtgaactagttacttttgtaagagtaaagtatacagcttgtccaactagaaatgttctcacagaagaatgtgttggatattttcaagaagcctcatgtgtcgtgttgaaagggcagaaagctggggccaggcggcgacagctccagtcctgctcctgcagctggccagcagagagacctgggcagttacttaacctctctgcccttcagcgtccttatctggaaaggctgatgatcatagaccttcttgtagggttgtcataacgagttcccatgtgcaaactttttacagaagtcctggtacttaggaaatgtggcacattagctttaggtattatgataacaataaaatgttgcatgacaaaagcagcaacttgtaggttaaaagcatatttgcaaaaacactgctactaaaaacagaaggaattatacttaagtgtcagtagttactggttttcgggcagtaggactatggtaatttaagttttttctttctattttcctgtgttttctaaattttatttaatatatatttcttttacaacggagaaaatcttttattttgagacggagtcttgctctgttgtccaggctggagtgcagtggcacaatctctgctcattgcagcctctgcctcccaggttcaagcgattcttctgcctcagcctccggagtagctggcactacaggtgcctgccaccgtgcctggttaatttttttggtatttttaggagagaaggggtttcaccatgttggccaggctggtctcaaactcctgacctcaggtgatccacccaccttggcctcccaaagtgctgagattacaggcgtgagccaccgcattcagccgagaaaataattttatataagaaaaaagattattctttagtttccacactatagtgaaagggtagtgagttaatttgctctggggtccacagggagaacctatattttttgtgctgtgatcactggttgggagcaggcactatagtattaattatatggctctttcagcttatttcggaaaacttttagacctcactatttctcacttgttttaggtattttcttaaagtatgaggatgattaaataagtttatttttctttttttttttttttttggagatggagtgttgctctgtagcccaggctagagtgcagtggcgcaatctcggctcactgcaacctccgcctcccgggttcaagcaattctcctgcctcagcctcccgagtagctgggactacaagcacgtgccgtcacgcatggctaatttttcttttttttttgtattttagtagagacggggtttcaccttgttgcccaggctgatctcgaactcctgagctcaggcaatctgcccacctcagcctcccaaagtgctgggaattacaggcgtgagccaccgcacccagcctatttttctttctaaaggacatttgcttttcactttcacatgtgcagtaaaaaagcttctgtacttattattctcattatatttgggtgtatttctcactgcattttggcgttttgccaagtgtttattatgagcaacggaaagagggttatgtatttaacgtctcaaagagacaatagtaactctgatttccatttttttaggctctggaaaatcttataccatgatgggcacagctgaccaacctggattaatcccaagactttgcagtggactctttgaacgaactcagaaagaggaaaatgaagaacagagttttaaagtagaagtgtcctacatggaaatttataatgaaaaagttcgagaccttcttgatcccaaagggtaaaggactttgagactttagtgtttcagcattgtgaactgaaacagacttaaattggcttaagtgcaaatctttttaattttttcagagggtctcgctctgtcacataggcttcagtgcagtggcacaatcatagcttacttcagccttgaactcctgggctcaagagtttgtttgtttgtttgtttgtttttaaacccaagaaatttcaggtggaattcagctctttgtgggctgtgaggtgagggagaggcataatcagagagatgaaacctagtctttaggacagtgagtttttaaagattctcaggaacaaaaacaagtgcccatgatttcatggcacagacttgtaaagagaattggattggaagtcttaggaggccttcacaaacgctggtttgactctacagctgtaactgagtgaggaaagtgcacggtatctagaaatctgttcattccacagagtttttcgagttcagattttaaggaagcgcaacagtggagaaagatggagataatgaccacagcctgtggcttgttgatgtaaaaacagcattaggaaggtcaaagagccaaataagctgaggcctacagaaagtttgcaggacaacaggaggacatttagttttgctggatgaggaagatgatcaaggaaaagaggatcttagaggcagtgagtcatagtgactctcagtcaagagcaaacagaaccctcagctcctctctgttgtcagttttccttgaccaagatgataatctttaggattctaacagggagattgaattgatgctcagtgcttctgtacaaactttacttaacaaacatttattgagtgatcattatatgccaggcactatgcaagaactcacagtgtggacagaatgagagttttgtaaacaaataattaaaatacaacgctatctgcttttagcttgtgaaggaggctcctacaaattagagagcaaagggacaatgactgatcttgcccctaggagaagggaagattccagagtgtacttgcttgataacatttgtgcggagtgggaagttggtccactgggaagttgggtgagaactactcaggtgtagggaacaacctctcccacaccttgaaggtgtaaattaatcacctttggagaatgatccagcagttcagtgtggtcggagagtaggatgcacagaagtcaacatggaacaaaaggaggccaagatgggaggatcgcttgagcccaggagtttgaggcttcagtgagccaagattgtaccactgcaccccagcctgggtgacaggatgagagattcatcctgtctcaaaagaaattaaaaataaaaaatgttccaaaacaaagaggctagagagtaccttacggtccaggtacccacatcctacttaatattatatccctgtatatttttttctttgttctgccttgaacactttttcttggactttgacctcgcaaagatcatcacttttctgagatccagcccagacctactctttccagaaattcttagctgactgacttcatacctgttcattcttctgcttaatccagagtgcttgtatggcatctttttaacttatctgcacatgtacagtctttagtaatttctcctatgtttgtcttgggtataggttagtaattaacagcttacttacggtaattacttacagtaattaacagtgaattctgaagagcttcggatttgcatagctcaggatctaggtcctctacttgttacctattgaacaagtttcttaagctttccaggcctaacttgtcagcctagagggaacttgaagagggaaatgataggatacaattatctcagagggctgttgtgaagatagactgggatgatacacctgaggtcttagaacatttgctggcatacagtaagtgctcaataagtggtagctgctgctatctccccagtgaaaatttcttggaaattttttttttttagtttctgaagattcaaagtaaatggattaaaatctctaaaggtgatctcatttcagtcaaagaccatttgagaaaacttcattttttattcacgtactaattatattaattcagcatctagtatatagtaatgtaattatgttgttttactcaggagataatagaggatacattaagaaaaaggaaatatgaaaggaaaaaagtcaataatagactatatcctgggcgagaagtaaatcaaatattctatatctactttatccagttacatggtaataagtgacatttttaatggttgatcctagggtactatagattttagatttaagagtcatttccttatcccctgattttactgtttatatgaagggttattctagaactatcctcttcttgctgtctttattatgggtgttagtgattgaatgtggttcagcttctgtgctagtcattcattatatgtgttctacatttcttcccttcctctcctgccttcttagttactagcactcgctctccaaatgacggaagctaacacatttggagtcctcactgtcatcttaatctctctaatcttcactttgttagtgaagtctgttcattcacttagtgattcttatgtgccaggacttgtgctaggaactgcagactcccaaaataattagacattattcttgctgttctagagcccaaagtttattataatacaaatggataaaagtaaattaattcatgcctaaggtgaggataaggagaagctgactaagaggtggtcaagagcagattataaaggagcatgcgtagcaagctgaggagtgtgcacctctcttcataggcgtcaaagaaccacccaaaaacttgacgcattggttgggcacggtggctcatacctctaatcccagcactttgggaggctgaggcgggcagatcacttggggtcaggagttcgagaccagcctggccaacatggcaaaaccctgtgtctactaaaaatacaaaaatgagctgggtgtggtgatgcacacctgtaatcccagctattcgggaggatgaggcaggagaactgcttgaacctgggaagcggaggttacagtgagctgagatcctgggtgatagagcaagactccattggaaaaaaaaaaaaaaaaaaacaaactttaaggattataatttattacttattttaaaaaagattttgtgtagttcaaaagtggacacacattcgtgatttaaaataaggataaacaaaaatataaaatgaaaatcagtaaccttatcattgacattcttttttataatttgatttttaattgacaaatgagaattgtatatgtttatggagtacagtgtgttttgatcatgtatatactatggaatgattatatcaagctaattaacatatccatcacctcacacacttaccattttttttgtggtgcagacatttaaagtctgtctactctcagcaattttgaaatacacattatgttgctgactatagtcaccatgctgtgcagtagatctcaagaacttactcctcctaacagaaactttgtacccttattttttggtttattcttaatatttttggtttatattattattcttaatatttttggtttatattattaagtatgctatctgtgctctacatttttctcagatgtcctttattgggtttattagttccttctttgctaagaggggttttcttttaaaaaaaaaaaaacttaatgaatatttaattttaattttattgaatcttttttcatgcgtttattgaaatgatcatacttccctcctccgcccccttaggctgtcaatgtgattaaagcgcatggctcttttttccaatggtggatagcctagaagccctgagataagcccagttttgtattttgaaatcattggattcagtttactgtctttggtttgtctttcttcatgactgagactggtctgtagttttcctttctcgcacagttaacatttactgagtttctgctctttgtaccacattctctgtaagacaaatagattgttcatatttatttgactctgcattctttgtagtaagtaaataggcatcccacaatatacccttttgagtgatgtgatatttaatcacattatgaagttttcttcgcagtgaagattttaaagtttggtttaaattcttctgggatcaagtcagttggttttacttatttggggtctttcttggattcattgtatatttttatggagcagagctgagtcctttttaaaaataggctattgttaaaaaatcatttctttgtttttcatgaacagaagccgtcagacgttgaaagtcagagagcatagtgtgttgggaccttatgtcgacggactttctaaactggctgtcacaagctacaaggtaacaacatcctgtatgtgaactatttaaatttagtgtagtagggtggggctcttttttttcttggcttaatttgttatttttaaaaattgcatatataatagcatcacttaataaatcactttacaaaaatcctaaaaatgagatagttgatcacagacaagcgaataaatatagactaaataggatgaggcttttaaatgaaaagttatcagacttagtgaatctaaagtgggtttggaatcaatctagaaaattgtgaattttatcttttgttgttgttttcccattctggggcctacttatacttccttttgcagttaatgtttttactttgaggctttttatgtatcatggtgaatttttttgtaaacattcttcttctaatagaaaattgtgattttcagtttttgatgatgtgtgtcaggtaggattgtgttcagttgcacctaacattaaaaaaatgtatcagagttatttgaaacatggattattatctgttttgtccattatatattctcagtgtctgaaaagtacctgtcctatggtaggtgctttcagtatacatttgaaagtgtgaatgaatggtgattgaaacaaggcttttcatggaaaagaaatatggaggtagactctccagggctggtatggtggccccaaatgtgttattagggacctagattccttccagtggtcaacacagagaggtgtggtaatgtccttattcccatagttcaagatggctcttagaaccaacacgagatagcatgcctacacccttaaggagaattcccagatggcgtattttaattttaaatcttattcactaaaatgtcatgaggccagagtgagctgcaagggcatctgggaaatgtagtctcttagctcggccatatgtgccaagttgaagattgggctgccctactggaaagaagtgaagactgggtaatgggaagcatctagtcgacttttgcacatacatttttctcactcctcattaagatccttgtaaggcagatgggtgtcatagctctgcattgttattaatgcagttaaaatccaggttggttaactgttttagagcttataacattaaaaaaaaaaaagaaaatcccttgaccttcctattgtattttgttgtttctcttttttagtagtagtagcaaccaagtggtaaatcaatgcagaaaattagtctcttgaggttctcatttttaaaaccaggtctgctaagatagtggtagtcggtgatatgcctgtatgaagcgacaaatggcacaagttatttaagttatttgtgttgcttatttgtataatctaatttaacaataaatttgtattgcttctgtattaaagaaactacgttttttcaaatttctatattagatgagggttggtgtggcatacttgttcatcttgtgtgaccaaaggtgtagcttctgaactttgagtcaaggctgccacctctgtacctgtagcaaatgatgtactttgaaagttttcagagacagtattggctattgtactccatggggctcaatattcattgagaaacaaaatgttaactccaaatgttgttgactaagtagcaaaacttgcaatgaattttgtagtatagcaggattttagtgtgtattacacaagtaatgaaacgtgggtctatgacttgtttccacttaggatattgagtcgttgatgtctgagggtaacaaatctcgcacagttgctgcaaccaacatgaacgaggagagtagccgatcccatgcagttttcaaaatcaccctcacacatactctctacgatgtgaagtctggggtaggtgttcagatgcatgacctgtttttatatttctaaagtggattgtggttttatttttttcctcttcaggtgttagatgaattaaagtcctggctagacttgtgtatcaatgaggactctggacgagaaacagaagctcctctaggtcaatagaaaaggatgtcatgtagggaagcaggtcattccagggttgttgggacatctgaggaggaccaggttctagactgcctctcgaggaataactttctgaacagcacacatctggctcccggggtggtgacacctttgaggacacctctagaactctgtgttccaggcatacccatagctgtgatccaggaagcaggaatagagaagttgcttctgtccatgctgctgcctcgtagcaccctggaacctggagaatgtgcttgcatttccccagtcccgctgccagcagaaagagccagaaaggggcagcaggcagcctctgctctgcttttgcgttccagcctctagcaggtgtatcctgagcctgggtggccagggagtctgagaaatgtgggtttaagcttcctgcccactcccactaaaggaaggtggagcagaagttaagtgcaccgatggcccactgtctgccccagcagtttttgagttttaaactgtgacggctaactgcgtgagccaatggtaatgctctcgcttgcccaggcactgtgcctcacacctgtaatcccagcacttcgggaggccaaggcgggaggattgcttgagcccaggagttggagaacagcctggtaacataatgagactccatttctacagaatatttgaaaattagcaaggtgtgggtggttcatgcccatagacctagtgactagggaggctgaggtgggaggattggttgagcccaggagcttgagactgcagtgagctatgattgccccactgccctgggcaacagagcaagactctgtctcaaaaaaaaaaaaaattctagctgatttagcagaggttcttttgcagtgttgccttctgtgaaacactattagaaggaataaatgacactggggcaattgtactataaaatcacttgcttttgtggaataactttttgagtgtttggttttgaatctagtgaagagtaaacccagtcagagataaacatgcttctgctgcattgcaaacttctctgttgcctagtatatttgcgttttccctctttttatgtgaattttacatattttattatgatgcctaccccctagtgtgtccattttaaataccagaaggtaaaataatcaccctggcaaagtgctatattttggcaggattttcatctgctgaaagcatatttttctccttttaccatcacagcaagattagtgtaacaacaaaaagttctttgtttcttatttccttttcagcataaaacaaaaaacatactgaagacttttttttttttttttttaactaaaagtacttttgatttgggacactgaataaccttttgttaacagcatgtttatttatggaaataaatgtctattttaaaggaaagctttaaaaatgattcagtctatagattttggtgttggtttcctacattccttatattgctattgaagtacgaagtatgttacatgtatgtgcttgataagaaaacacttttgataaagatatctatgtatctgtatgtatataatatcttaattagaaaaagatgtaaatctaataacacctgacatgaaatggaattatatatgaataagatgtaaatgttacaaaatgttttgagattttgaggggttcttctgttgtataaaggtcagattttttttttatgtcagaattgcaagtgttttgtctcaggattattgataaatatccatgaaattttaaacacagtttccaataatagtaaaatttgagtcttataagtacttttgtatactgctctgaaaatttcattgggcacccttcaaaatggcccattttggaggcactgttttcctgagataattagctttcatcctggctggattagtagagttttataaattttctgtgtctccaccgttagattgtacagttttcttacagtgtgttatagcagcacaaaataattttgaagtaacagtaaatacttttaataaagggtttagatcataacccatttggttgtgacagaactgctttttgtattgttttttaagagacagggtctcactgtgtcgctcaggttggaatgcagaggtgcaatcatagctcactgtagcctggaacttctgggctcaagtgatctcccacctcagtttcccaagtagctgggactacaggcacacgccaccatggccagctatttttatttatttttatttttttgtggagacaggattttgctgtgttgcccaggctgtttttgaaatcctgggctcaggtgatcctccttccttgtcctcccaaagtgctgggattactggcatgagccaccacacctggccctgtgttcctgttgattagtattgattgatttcctttgtagacatctggagagaaagtgggcaaactcagcctggtggatttagctggcagtgaacgagcaacgaagacaggcgctgcaggggacaggctgaaggaagggagcaacattaacaagtaagtgctctcaaagcttatttttattgctttatttatttaatagccaataggggaacatctgtggttattaaaatattaaggtgatttgaaatttttttctggtattttcaatgggcctgggcccattttaggttttgttgagatgcctgatggggctgaagagcacagcctcagtcaggtcagagtttctcagcagtggccctattgctgttttgggtcaggtaattcttttcatgggaggggtgatgctgtgctttgtagagtgtctagccgcatccctggcttctccccactagatggcgatagtagctgccgcctcttcccccacccccaggtgtgtcaacccaaactcactttcaacaaccatggctgttccctgtgggggcatagtcaccctccagttgagaaccactggtctaagctatagagaggatcaaagctaattggtctctcagagtggaactgttgatcttgacctgtgtgttgctctttggacaaacttgtactaaccacgttgagcttttcctttactaaacactgtcatgcttgtccaagtccaagaagctaagactttacgaagtaatattttgtttaccagttccttcatgtgggctcattttaggttttgttgaggtgcttgatggggctgaagagcacagcctcagtcaggtcagggtttctcagcagtggccctattgctgttttgggtcaggtaattcttttcatgggaggggtgatcctgtgctacgaataatacgaagtaatattttgtttatcagttccttcatatggacttcacattttctccctcaagccaaattgttagctcattatgggtaggaagtttttctgtccttggctcccagaaggacacataggagtcataaagaaaccaaatggagatgataaaacactgtcacccagatgctatcctattattgaatctcatatatacaatttttgctttgtactatggtttaattattgtgtttctggcttcctttcttaaagatacatggttttggtgttatattgacctgaagatttatagctcacatttttaggtactacaaaatattaggctaagcatttttattgcttatagtagtattgggggaaaataactattttgagttgtgtgcttttgaactgagcggcaaaatgctgacagggtgctgctcacatgcaggtacaagggcatcttagtgttcaatctttgtgctaaaatgtgacatttgatatatttcatttttgtaattattttggtttgttgcaccatgcaggtccctcacaaccctcggtctggttatctcagctcttgcagatcagagtgctggcaaaaacaagaataaatttgttccatatcgtgactcagttctcacttggctgctcaaagtaagtttgttttttttcccttcctggcatacttttggtggttggcaagaaggaagaaaaaagagtagactgttaatcccttccaggtatcatttcctctatcggtgtgcaaatgtataattattaggctcttatggtaatgacatttttgatggaataaacataggttttttcctagcaattcacatcctagcttactagaacctggatgcagtggggttgctggacgcacacggaatcacacgattgcttctggagatttaggggagtagagaaagggcctcctgctaatctgaccactgtgtgagtcatggaggaggagcctccgctggcctcacactcagctgggccaccctggccttccacagactccttttgttgggctaacattttggagcttgttttctgtttaactttgggacagtcagaccttggtttctgtttagctttactcatgatgcctttaatttgcttttggcttcttaaagatgttgttagaggctgcagagtagagcacacagtcattcattcattcattgattgattcagtatgaacaagagcaatggaagtgagaaagaagaaagccaatgtgcggtggtaggagaagaacgtagcctccattttaaaacagaggaaaacagagggcgcttcttgccctctctggctcgtaagggagataagatgtgcacacacaatattagaacatgagtttgtgatagatccatgacagagatggtgataacatgtaataggagtctggtgaaaaaagagagacttatttccagcttcctctagccttccagagcccctttagtcttcataaggtggtgtggtgagttggatatcggactgggaattagagggtataagttgcagtgacaatttaacccatttatagaggtgtcacctcactaaatcctttaatactcttttttttctatttttaaaatggagaaataattttatgtgccctgtttaattttgtgatgttttattttcttattgatcaagaatttgttgaacacctggcatgcgttgcattaggggttgaaaatactaagatgagttcaacacgggccgccccagtagcttagtagaggacatagttactgatttagtccatagcatgtttagaaaaaggcctttgtgaaatgaagtaggggtttcttctggtttcctcctcctctcaagagttaactagtattcaactttttaattcaaaactctgcacactatttgaatatcttttgttaaaataaaacattctttacgtaaatgtcagtgtgttctctcttaaatgtaatgctaaaattcagtaaattttccacagtagaatatcaggtccattacttcctttggccaaaatgcaggactgttagaaatttaaacaaaagtgtaaacaaatcatgataattaaaaccgcttgtaaaggttcgtcaaacaacctcacaaacatcagatagtaagagataattattaggaacaaaattaaaacaccttggcccaccataaagacaattctaaccttgtcttttaaaatagaacattattattcagatattgttacttgaatcctgacgtcagcttacataactaaatacctcaagtgcttttaccctaaaaaaaaaaatttacttttctttcctgtctcaaacagcataagaacttctgcttctgtaagactaacaaaaatgttttgtagttttttttctgtaattagaaaaacaagcaaactgcaaaattcaagactttggaggatgaatataattattctttttcataaaagccattaaaatcatagagtaaataggtttctttaaaaaattagtgaacaaacttgcagttatataggatattaagtctagagatcaaatgggcagtctaaggactatagttaataacagtgtattgtatataaaaaaatttgctcaaagtatattttaggtgctcttatcacaaaagataaccatgtaaggtgatggatgcgttcatttgtttgaatgtagtaatcaattatattactatgtttacatatatcaaacgtgctctataccttaaacatatgtatttaaaaaatttttttttaaatcgtttcattaccaaatgagtttttttttttttttttgagacggagcctcgctctgttgcccaggctggagtgtagtggcgcagtctcggctcactgcaacttccacctcctggatcaagcgattcttctgcctcagcctcccgagtagctgggattacaggtgcgcaccgccacacctggctaatttttgtatttttagtagagacagggtttcgccatgttgaccaggctggtcttgaactcctgacctcaagtgatccacccgcctcagcctcctgaagtgccgggattacaggcatgagccactgcgactggccaggaatttgttttttttaatagaagaagtctttttttttttggagacagggtctctctgttgtccaggctagagtgcagtcgtgcagtcataactcactacagtctggaactcctggactcaagtgatcctcccacatcagcctcctttagtagttgggactacaccaccatgcctagcaatttttttttttttttcaatttttagtagagatgaggtcttgctatgttgcccaggctggtcttgaactcctggccttgagcatcctcctgcctcggcctcccaaagtgccaggattacagttgtgagtcaccatgcctggcctgtagaagaaatcttgataagatacttcttcttcaaactttccatagaaacatttcctgatcatatattgtccttgtttcagtgttgctacttgagtccatttaaaacaacaaatatcttttgttggccgggcatggtggctaatgcctataatcccagcactttgggaggcctaggtgggaggatcagctgaggtcaggagttcgagaccagcttggccaacatggtgaaatcgcatctctactaaaaataacaaaattagctgggtgtggtggtgcatgcctgtaatcccagctactcgggagattgaggcaggagaatggcttgaacctgggagtcggaggttgcagtgagctgatatcatgccattgcattccagcctggtgacagagtaagacaaccctctcaaaaaaaaaaaaaagcaccaaaaaacaagaaatatcttttgttaacttaatcgacatagtgaaaatggcacgggtaatcactgagtggcttcattggcctggaggccaggagcacctgttgcaggagtatctggtgccatgccaagggcttcatgggtatcgtctcctttccttctcagaagggaaagggtggtgttcccagtggtcagatgacacagagggtgcagaactaatgaatggcaggatcgggattggaatcatcgctgacttgactgtgcagctgtttttgccaaggctgtgctcttcttatcaaaggttaattttcattagaaggatactcacttcatattaccagtccttgatagaaaataatgaaaaaaactgttcatagtacttgaacttgaagaatgaaaccataacattttttaaaaggtcacttaatctgctgtttagttaatttaggttatcattgcaactttcatgtattaaaaataactcatgtgtttgctgaatatttgtcattatctttttccttaaaaatgtatgtgattggctgggcatggtggctcacacctgtaatccctgcactctgggaggccgaggcaggcggatcgccaggtcaggagatcgagaccatcctggctaacatggtgaaaccttgtctctactaaaaaatacaaaaaaattagccaggcgtggtggcgggcgcctgtagttccagctactcgggaggctgaggcaggagaatggtgtgaacctgggaggaggagcttgcagtgagccgagatcacgccactgcactccagcctgggcgacggagtgagactccatctcaaaaaaaaaaaaaaaaagaaaagaaaatatatgtgatctggctgggcatggggctcactgaggcctgtaatcctagcactttggggggccgaggtggacagatcacctgaggccaggagtttgagaccagcctggccaacatggtgaaaccccatctctactaaaaatacagaaatgagctgggagtagtggtgtgcacctgtaatcccagttacctgggaggctgaggcaggagaatcgattgtacccaggaggtagaggttgcagtgagccaagaccatgccactgcactccagcctgggcgacagagtgagactccatctcaaaaaaaaaaaaaaaagaagaaaaaaaaattatatgattttttttaacgtcatttggacttcacagaagatcgtaaataggggcattttttttttttttcgcaaaacatgttccagagcttaagcagttttcccagagctctctccaaattggttgaaatggagatccttttcctttaaagtgggttttaggtccctgttgctttttccttcttaaattcttagtctgactcacccagatcctagtttgacatgggcatacttccagtattcttcaacataatttccattgaacttgtacaattgcccatcttctataacattttcagtttcacagcgtctttttttttctgcctcatatttgcgttgtaattgtgttgtgctcttaatgtgtgtaacatctgagaatgagagaagctgtggcttttcttggtgatttggtccagaatagatgtgagtgctcttctcccagggaggatggaacaaccattaaatgagggttacgcattcgctgagtcatcactggagaactatttcatattaagatgatttttggtcctctgaataaccatctaaatgtgggcctcttaacgtgaagtaacttctggtagtgagtgctcagataatgagtatctttctaattcatctccctcttttcgttcctactgccacctccctaatgaaggccacttttcatctgtcgcctggatgacagtcgtttccctcgagctttcttagtccagtcctttctccatggttaggttgcaacatctttctacattaatacttttaaccttcagtcttttcagtaactgtctataggcccttaggataaagtccaagttccttttttttcttttttgtataaacagggtctcactatgttggccaggctggtgttgaacttctggactcaagtgatcctcctgccttggcctcccaaagtgttgggattacaggcgtgagccgctgcgcccagccacagagtccaaattctttaatggcgtgtgacttacaaggtcctttatgagctgaccccttttactttttttattgttcatcttgtgcttcttggtgttacaaattccagctaagtgatgagtgttgtcttgcctctaggactttactcttgttccacttggaacatgctttcccctcccatctcttcagtctctcctccctcctctcccctctccctttacctgggtgatgcttctctatctttgggtctcaagtgtcactttctgtgagagtcttccttaacctttcaagatttggctctctgctgtttgttttagaccatattgtatttatctctatcatcttagtccttgttatatagtattacttaccagcatcctccctagtggtgaactccaggaagagtcgagtgaatgagtaatttcagctctgttctgaatcagctctgtgacctttgaaaagtctgtcgttttcctgggtctcactttctcatctgtaaaatgaaataattggattatatgtcttcacagagttctttcagcttttaaaaattctgacttccaaaagtaaattctttcctatgactatttaatttgctgttgccacctttgaaacaaacctcatctgatttgcctaaacagttaaagagtaaacaagacactttctactttctccttgaatgagtgccagttcttttgttgtgatttcctttttgctgatggcatgaggtcatttttaacataagggtattgttgctccatgaacaagggcttttaaaatatcaagcatttgttgtttgccaggtttccttttctcagcataaattggagcacaatatacatgcttttctcctttggtagttatcgttacaaatcccctttcagctgagagcatttgctgttcacgtgggctgacagtgtgcagtggttctcagaggacaatgcgatgctgccagtgaaccaaatggtgatgagattgaattcctgtgctttcgttatatcacatttgaatttcattcatgttcatgggactcttcatgaattttttctggaagttgccaaatctggagcaccagctatgtgagattaatgtctaggagtgaagagcaaagcaaacagtcatggcttttacctcctaaagtccaaattagttatagttcttcccatgtcatgcattaaattatattttcttcagcaatataattatgttttctgtggaaaaccaaactttcactggtatatgaataagggacatattgtctgtgatcatattgaccttttagtaacaccttaggaatcattttgtttctgaaactagggcaagataatttggaaagatgtcaggtcaccttatttaatcttcaggcctgaactttctctgtgttaccaaatgtgtattgtgggcagctgtgggggagtggaaatcatgttggacttgaaggcagagtctaactgggctaggatattgttcaacttaccagttctagatttttaggcagagtgcaagatttaacctccattgtccgaacaaacctgttttctcaccgataaaaccaggctctgtgataaatcgaactcacaaaaggtggagacctaagtaaagtgtgtgcacaaagactggggaaatcacagattgtaccaactcattttcattgtaataagattggaaaagccttttattttcaaaagcagttttccataggttaatgctgccccaaagtagagttagctttcttatgctctagtgagtttcccattactggcccattggagtgttccctctaatcttgagagtctgtcattcagtgacattctgttcctaaaaagagtatattcaatctttttgtttgcttcgatgatttgtctcagcctgggttggtatcctaatatatgagtagttatctattgattgtaacagattacccccagaggaacagctgcaaacaagtcatttattgtctcagggtttccataggtcaggactccgggtgcgtgtggcttaatgacgtggctctagccgggttgtttcacatggatgtaattaaagtgttggggatggggggctgccgtcatcatcatctcaaggcatgaccggtgtggggaggtgtctgctcacttacatggttgtcagcagggtccagaagatctgcttccaaactcgtgcctgtgggcctctcttcgtagggccacctcacttcacggcagcccgtttcccccagagtgaaagaaaacacccaagacagaagccaccatcttctttgaatctacccttagaggtgacatgccatcactttcattccttggagaccgatgaataagtcctggccaccctcaagggaagcagagagtactagggtgtgggcgccaggaggtcgcctgcataggcagccttgtctgtggtgcagcagagcgcagtgggcttgatgccccaagtcttcttttgtgcttgagttaaatctctatttttaatgttctcaagtgagggtggtttttcattctgttggaagccagtcggtcctaaagccgtttcactgtacttagcagtttgagtgtcatgaagacagtatctcttctcaggaccattgtctgaacggtggaagtgcttctgtagaacttgcaatcttagtagcttttgaagtgctatcagagcgaagaaaatgaagttgctttaacatacttttttgtgagactataattgtaccttatgttttaaaaactttacaaggtgcttgatagcttgtaacagcaactttctgagccattattaggcttcacagagactcccagtacagggggttgtggaggaggttgccaagtaagtatcatgcttgttcctctaaggaggaagatgttggaggcatttaaggagtccttttttattctgagtagtctgtgttcttgtggtatcatcttgcctataaaatagggcagatgacttagaattaatttgtgttaaaccgaaataaaggtaggtttcatgacatttccccgtcctttatcaaaggctaaaactccctatttttagtgcaatggcttggcagagaagaaacagcacaggactcgagtccatacacctgcattttagccctggctctgtcattgaatgtgtttgacctggggaaatttgttcaccatttttgatttcaggtttctcatatgacgtcttcttccaactttaatatgctactcaactttctgttttctcctgtaggacagcctcgggggtaacagcaagaccgccatggtggctactgtgagtcctgcagctgataactatgatgaaaccctctcaactctgcggtatgcagatcgagccaagcacattgtaaaccacgctgtggtgaatgaggaccctaatgcccgaattatccgggatctccgggaagaagttgagaaactccgggagcagctgaccaaagcagaggtaggaggcaccaccgcgtgcgccctgtgagtccaggaagaggaatcagcctagagcttgaatttccttcccctgggctgtgagggatgagtactctacttaaaatttgcgaatttcttacagcaagagaactttgggatgagtaataaataaaggaaggttgtcatattagaattccaaagaggttttacagatgttaaaaagattgaacaggagcaaatagaattgagaaaatgtttgcatttctattcaggcggcagacaaaagagagaggtataatagaataggagaggaagagagatgctggagaccatgtgtatgtaattttaatttttgtgcagaaaatgatggagagcaggatttttgttgaatctcatttgttacctggtagaagtcggaatgaaaatcttgagtcttctacaccttcataatctagcttttccatgttgtggattaattacgtttgtagaaaatattttgtagtagaagtacccatgtatttagtggtactctattacagctgttttctgtgtattctgtaatggataatgttgcattaataaatttgaaaatctaccaactctgacctgcaatcccaagtgctcatcttcttgggaaagtggaatgaaatattagattcaggattcctactttttttttttttttttttgaggtggagtttcactcttgttgcccacgctggagtgcaatggtgtgatctcagctcactgcaacctctgcctcctgggttcaagtgattcccctgcctcagcctcctgagtagctgggattacaggcgcacgccaccacgcccagctaattttgtagtttttatagagacagggtttctccatgttggtcaggctggtcttgaacttgaactcctgacctcaggtgatacgcccgcctcggcctcccaaagtgctgggattacaggcgtgagccaccgtgctcggccaggattcctactttcattagcatttctcttcccacagttactcagcactgtggggctctttctggagtttgctttctttctcatacctgttttctgggaataaatcagtaagagacatggtcaggatgattatcttgatcgtatttttacctgttgaattttatcctgtttttataggaataattttatagtccatgaagactgttgtctccttggtgttaataacaccatccagtctgcaacatgtacacatttagtctgtacatatgtggataaattcctgaagtcatcaataagggctagaatgaatcatgtgtctgagtctagatgtataacctattaggattttaaagataaacgcttagaagctttacatttttgcatccttaaatgtaattatatcttcacaatagagtgtcagaaaaggaaaaagccttctttttgggcatattttggataactcaatgagtttgtggtcctcagacaatcgaggtacttcgatctacaatcgaggtacttcgatctacaatcgaagtagatgtcagacctcagcgtgacattcagccatgaggaggcagattgttacttttgtccttttagagttggccacttctttttccagggcatcttctagacatttcatgaagtaaacattttgcttgtaggcaatgaaatctccagagctaaaggaccggctggaagaatctgagaagctaatccaggaaatgactgtgacctgggaggagaaattaaggaaaacggaggagattgcacaggttcgtgtttcctgatgatgaagcgcatgaaacctcatggcagtttgcacaatgggacacatggtgtttctggttcctttttgatcttcagcttggctgatggcaaatctcacactatcattaggaatctagatctgaaagaatctatactttgcaaaattaatttgaaggataaacaggatataattgcacttgattgtttatgtaagaaataattttttagtatcagtaatctttaaaaaaaatttaatgaaataactcctttgtagcccctggctcttaacaccgcattctattaagtgctttggagacctaaggaacttcctgaaattacaaaattactccatctagtgcatgtggccaagaaaaaaaaatactgctaatagatattaggccatgaacttcttggttccatgtgaaaacccagtgaaagtaagatgaaattcctaaatctgaggtgactgtctctcaccattttctagtgacagtgatagttatgaaatcgtagggtggtggctgggtgtgatggctcacacatgtaatcccagcattttggaaggccaagacaggtggatcacctgaggtcaggagtttgagcccagcctggctaacatgtcaaaaccctgtttctaccaaaaacacaaaaattagctaggcgtggtggcacacacctgtagtctcagctacttgggaggctgaggcacaagaatcgcttgaacccgggaggtggagattggagtgaactgagatcgtgccactgcactccagcctgggtgacagagcaagactccatctaaaaaaaaaaaaaaacacgttagggtaggaacattagaattcgtctaggaagatctagttaagtttagcattgggagaaaaagtctgtctacctaataatagatttacactgtagctttcctgtttcatgattttccaactgttttagaaatacatatggtaatgtggagctcaggaccccatctaacaggcttttcataatcagacaactccagtagtagcgattgaatcagtcttttattcttttacttctactcactggccctagtttgttcttttgtagctaagagcgttaagtgtcccacccaaacacagtaactggtgatggcagtaacagccagcgtttattggatacacttatgtattgagccctatgctaagcacttttaactacagaacttgatgtaatcctctcagtagtctaacaagatagggactgttactacccaagttgttcatctatttaaagtcatctctctgcctcttcctcttccttttctaagttaaaattccctgttgtttttaactgttccttgtattagagaatatatagaacttgctcaatctgttttcactcagtagattccatcttgaaatgtgctgtccagaatcaatctgtgtatcagatgttgtaggatgatactgttgttacttagcataaagtggatgttatattagcacagactgggattaaaatagattttaaaaacatttttattgcagacattttcaaagtagataaaaattagagaagagtatactaaatctataggtacccatcacctggtttcattaaagatcagcatatggccagtgttgtttttgtgtccctgcattggcttatcttaaagcatatccctaaaattatagagaagagatcagtgtataaactatttctcattacatatctccctgtgttttttataaattataagtcattctaataattgtcccatttggaagctactttgtgtgagccattctgagctgctccaacagtaaacatttgttgtcatgagtcgttgtgctgatagaaaacagggcaagtctaagtgagcctacatcttggggagcttagtgttggcaccttttcttttcctctctcaggggtcccttctgggggcactgcctgattttattcaacagctccttcaatgccttaaccttccagagctcccaggctttagtgctgttgaatgtttttcttttctcattgaaaaaacctggtctcttgatcacttacttcttcctaatccaaactgatatctttcaaaatctatttctgacagtagagctacaaagtgttaataagtcttctggaagatgacttgagacatgtcagttgacatggtccatggtcagataaatttggcaatttccgggcaaactgaattcaatgaatttcttttttgaaggacttctcacgtcattctgggggcagttgcaagttagctgggttctccatgggtcctctgggctctgtaacatcttcctgtggggtgcaagccctcggatggccctaccacagaattctctgcagcctctgcaccctttgacccttacatcatccaatacttcaccattgtttaattgttatgtatagttttagtccctgttgagtttgtaagttcttaagaaaaaagactgtatcttttagtgttgtatgctcagtaatatttttgcatagaaagaactcaagatgagtattttctaattccagtgccatatctgctataccacattgtcccttatttttatcttttatgttcccattaaaagatacacacttaagtgaaatcaaaaccttgagatagatcaggggttgacagacaatgcatgtgatttaaacctggtctgccacttgcttttgtaaatttttttgtcatatagctgtgctcatttgtttatgtattatgtatggcttcggcagcaggaatgaataagacagagaccccatggcccacaaagactaaatatttactatccgacattttataggaaaagttaaccaacccctgatatcagaagcaatatttgatgatatcagtaaactgtattttatcatatagtactttgttatgagctgattcctagatgttacaaacatttgtaatttttttagatgatttaaaactttagtttttggtggcaaacggaataatgaattgacagttttccaccattgtgcctctttcggctttgacaaaaattttgtagcgtttttaccattatagaatctcaaatgacagaaatatgcacagggaagtagtgtaaaacagtgataactaggataacttagagaaaggtatagttagttacctcatcttatggacatgagtctttttcaaggagaatcacttcttggaattgagtgcagaaaactctgatggttagcattaaatgactcaaaacttctgaaagaaccctgtagttctttttgttagaactggatttaaagacttgatttgaagacccaggaccaaaatacacatttcaattttgtggtagtatacttctaggcaggatatattggctgagttgcagtgattgtataaattacgatggcatgcctagaaatagcaaaattgtgaaactttattttaattatgctgcgaacttactttgtggctgtagttaaatgacttagtttgtcttgcctttccccagaatcagaggtcttgggtgattgactcattgctacttgctatttacccatagtcgaagataccctctccagccccgactgtaccctaactacagagcatctggttgtgagatccatgcccatatccttacgatgtacagatgttcatatattgtatgggttcagaggcaggcacaaaaaaggaaaggcccgtgttatgaaaataacgcttgagtgcatatgcaaatttgtttgtttttggataaattcaccacactgatgttttgagtgctcaccatgtgtccttcactgtgctaagtgctgggaacacaacagtatataagataggatccatacccacacagcacacagtcctgtgtgagagaaatggcccggtgaacagttacgaagtagaacacgtctgctccagatagaaaaaagaggtataaaatcttttcagctaacgagaacacagagaacgtttgttttgtttgtttgttttttgtttttttttggggggggggttttgagatggagtctttctctgtcgcccaggctggagtacaatggcatgatctcggctcaccacaacctccacctcccgggttcaagtgattctcctgcctcaccttcccgagtagctgggattacaggcacctgctgccacagctggctaatttttatatttttagtagagatggggtttcaccaggctggtcttgaacgcctgacctcaagtgatctgcctgccttggcctcccacagtgctgggattacaggcatgagccaccacacccagcccagagaacattcttagcactctcaaggacctggaacttgtttcatgcagtgctgggtttgacaggagtgagaagacatgaagccagaggggaagcaggccaggttgaagggccttgtgatccttactgagggagtttggcctttatcctgatggggaggtcactgaagatgtcaagcaggagagtttattgatcctcctttgcttttaagaaggatcccggttgaggaaagtgcacacacttttgcttttatatatacagagttaaatgagatgaattcaagacatcagatattttcaagaatgaaaactgagaatcactagtacaattagttactatatgtaatagactttatttttcaaaataaaattagaattaacaaaaaaatcatatagtttggaaagagaaaaatgcaataaatctataatgccatagcctaagagaatgtatttgaattacaacactattgaataattgtaacattgtaatgtaaacgcttggatatctcactgcctcaatagctgtgaaattaatacttctctgataacatttacaggaacgacagaaacagcttgagagtcttggaatatctcttcagtcttcgggaatcaaagttggggatgataaatgcttccttgtgaatctgaatgctgacccagctctgaatgagcttctggtgtactatttaaaggtgaagtaatgtgctttgctactagattcttgttacaaaataggacaatatttcacagtactttagtaaacttggggaaccatgcttactcagaaaacagcaaaaagttatagaaccatcttgggtttctggactcagttttcttttttagtctttgatgccattcaacctgacaatataaaaaaatgatactctgatattatttccaacaagtcaaataccttacctaccattatttaacgtgatttgtatcagggaattaagtagataactttaaaaatggatgactttgaagactaaatgattcatttagtaagtatacgaaagcttttatggtttatgtgaagcacattcttttgtgagcagtgtgttagctcacaagaaaaaaatgtataaataaagttcttaggaccagttggtatgaaatttatgtttccagtaactcttaggaaaaattaaaaatttgggttatcaatctattaaaagagagagagtataggttatttagagactcagtgagtcagagcacagaacagaaaagaagacaaatattggtatccactgaaatctataaatcatgggatatattagtaagataagagacaacttcagaataagtctgaaccctgagacaccacacagattcgaggagtgcccagaatgggctgtgtcaagcccagagcacaaattacttatcatatatgatggactacacgactctaacacagagttgataactgttggcacacagtttctttcccctcacatgtgtgggtttaatgaacatgaccaggaaagtaaagctaacaggctgactatgtgggaaacagctctaagagaattgtgtggtttcatttcagaaaagcctggagagatcctgggtcagtgactctgtgtcattttgagaagccctgttgttaataagtatcttatatgatgtattgtcatgctgtgagttaggctgtgtctttgatgcataccttcatatgtgcatgtctcaagtgttgtggttcagtggcggcaaagctggggtaggagggagtgacctgtctctctagtctacggccaagccctttgccccctctagtctaattcctttgtaaatggagggaaggtctctggctactttgccaggttcctgtgagggttggagatacagaagcacttcgtaaacagaagcactatacaaatagaaaagatcccacattccacttttttgtttgatacctgtatggtttcttatacacatattatccttgcctattaaaaaatgatatattattggctgggcgtggtggctcacacctgtaatcccagcactttgggaggctgaggcgggcagatcacttgaggtcaggagttcaagaccagcctggccaacatgatgaaactccgtctctactaaaaatataaaaattagccggggtggtggtacatgcctgtagtcccagctacttgagaggttgaggcaggccaatcgcttgaacctaagaggtggaggttgcagtgagctgagatcatgccactgcatcccagcctgggcaacagagcaagactctgtttcaaaaaaaaaatgtattatcacattacttactttgcttctgaacagtgctggtagcattctgagttaggatgtcagctggggatattcatatgaatgtgaccgggaaagtaaagctaacgagctgactacgtgggaagagatgcgatgttagaataggacctaaatattctgtccttttctcagaaccagacattctttttctttgcattgtactgtagttcaaattggtacacacaaacacacatatcaagaaaaaactctgattcatatctgctccttaactaaaaacgtaaacaaagaagctgtttaaagatgtttggagagtcatcaaagtttctggtcatcttgtgtggaggtgtttgggttgtgtttcagactgtgtggccagccctgtttggccaagtctgaggcagtgttgatttcttgatcgcccaagctaaccccacagcaagcatatcttcaagacaaagcacattcaaaaggatgatctcagtccaagaacagttttatggtggaatttggaggctgagcattattcattactttgccttccaattcaaaagtcaatttagatgctgggcagatgaattcacgtctctggatgacttcagccactccatgtgtaagtgaaggcattggattaaaacatctccaaagttctttctagttccagctgtacagttctcttagtcttctagaatataacaccccctttatttatcctggaattctttatagtagcatacttcagaatcattatacccatctatcaataaagagactgagatgctatccctgcttaactttatcttattttgattacctgggcacacaaaaggaaatgattgtgcatttatttttatatttttttaatgcctacatatgccaggcctttgttaagtgcttggaatacaagatggacagtaaacccacagtcagtcagtgtcatggaaggagttaaaatagggcaggatgacagtggctttttccaattgtgagctcaggaagcacctctctgaggatgtgactttaaaagctgagatagaaacggtaagaaatgacccatgtcaggatcaggggaagaacatttcagacagaggaaacagctagtaaaaggcagtaggatggaaataggctcagtgtgctcaaagaacagatgggaggccgatgtagctggcacatgctctgtgaggggaagatggtgagtgtgagggtcagagacaggcagggacaggttgtagaatgctttgtaagcccgggtaagaatttgggctttattggaagttcaaagagaagccactagaaggttttattcttactttttttttttttttttttgaggcagggtcttgttctgtcacccaggtgagagtgcagtggtacgattatggcttattgcagcctcaatctcctgggctcaagtaatcttcctgcctcatttttatatttatttatttatttattgagacggagtcttgctctttcgcccaggctggagtgcagtggcacgatctcagctcactgcaacctccacctcccaggttcaagccactctcctgcctcagcctcccgagtagctatgattataggcatgtgccaccacacctggctaatttttttgtattcttagtagagacaaggtttcaccatgttggccaggctgggcttgaactcctgactttgagtgatccacccacctcagcctcccaaagtgctgggatcacaggtatgagccaccgcacctggccacaatttttttttttttttttttttttttggtagagacgaggtctcactgtgttgcccgggctggtcttgatctcctaggttcaagcgattctcctgccttggcttcccaaattgctgggattacaggtgtaagctaccatgcccactcttagaaggttttaaataggggatggtgtgaccagctgttgtggcaggagtggaagggagtggcatgcaatggagacacagtaggaagctcctgtatccacaggcaagagatcctggaggctgaatctaggatgtagtcatggaggtggggatcacaagcttattcttgatagaccttggaggaaaaatctgtaaggttttccctgattgacatggggtgggtatgggcttgtaagagaaagaaagaggactcaagaattatatctaagcttttcagttgactgactggtggtggtagtgccatccattattattggagaaggaaatagacttctgttgggttaggggagatgggaacaagagtttagctttggcgcttattccatttgatatatcttcagacatccaagttgtgtcaagtaggctgagtaggcagaaaataatagtggctgaggctgggcacagtcgctcacacatgtcatcccagtacttcaggagggtgaagtggaaggattgcttgagcccaggagtttgagatcaacctgagcaacatagtgagaccctgtctctacaaaaaataaaaaaaaaaaaaaattagttggtcaaggtggtgcctgcctgtgatctcagctactcagaggctgagacaggaagattgcttgagcccaagaaggtgaggtttagtgagcatggatagtgtctctgcactccagcctgggtgacagaaaaagaccctgtctcaaaaataaataaataaaaaaaaaataagtgactaagactgcgatagtggttgtggaggtggggaaaaaaacggaactaaagtatgtagctctagggtggtgatagagatgtagtttatttgtagatggcatttaaaaccatgggagtaggtgagttagtctaggtcagggtcaaccaactgcttttcacaggccaaatctcgctcccttcctgtttttgtttcaaccatgcctggcttcatttgcttttaaaaaatcttttaggccaggcatggtgactcacacctgtaatcccagcactttgagaggccaagacaggtggatcacttgaggtcaggagtttgagaccagcctggccaacatggtgaaaccctgtctgtactaaaaatacaaaaaaatgagctgggcatggtggtgcatgcctgtaatcccagctactcgggtggctgaggcaggagaatcgcttgaacctgggaggcggaggttgcagtgagctgagattgcaccattgccttccagcatgggggatagagcaagactctgtctcaaaaataaaataaaaataaaaaaaattttcgcaaaggtaataggacaatataagagggctcagtgtaaatgatttcaattgtgtatatgtaagaatacagtattaatcagtgaatttggttttttcttaggaacatacattgatagggtcagcaaattcccaagatatccaactgtgcggcatgggaattcttcctgaacactgtattatagacatcacgtcagaaggccaggttatgctgactcctcagaagaacaccaggtaacatacttgaattagtgttcatatcacaagagtttttcagaggaagaaagtactctagtggcaacagtggcctttgttgcttttaagttgaccacattaagtaatccagttggttgggcgggccccttacatttagctttaatgcctctcacacccattccttcctctctatacccactgccatggccttacgtatttaggccctcatcaagtcttgatcagagcccctgccaacaccacgagctgcctcctggttcactcaccacagccctagaaggctttcctctgtttgtgacagaaaatcccttataaccccccagtttatctcctcctcctcagcacctgccaatcctttgacctgctaactcctgttgggtctgcagggttaagtgctgccatgttctcctgtggggagtcactgtttggtctgaatgcactgcccttaagaggtatcggaccatcgccctgttgtggcagtgcttcttagtgtctgcctgtgggctgtgaacccttattaccccattagaccatgagctgcttgaggacaagggcctttctttttttgattctccattcctggcgcataatatgagactagtacacaggaacttaatacaccatggaggaatgaaggggctccaaattttatgaatggcacgtttgtcactttgtttccttcagctatagagctgttatcccctgttacagagttggaagtataacagtctgtaactgttagagacagtggttaactgaattatgttgacctttcaaatgctaatttgtttcattttatgatgtcaaaaaatcattaatatcactgattttatccataaagtcttcaagtattgagactatcaagctctggggaaggatcaagtgagaaaacaggagcagaagctggtgtggccctcacagctgtgttgtgctgttctctaatgaggccataaataatcacacagaaccccagcctcagcaagggttctccaagaccaggatgcaataagacagagcaggccacgtcatcgttgcgtttaagtgcagatgaaaacatggtcactgtgccacccaaagaatacccttctctgaaccagtatgagtgactgctacttcttcaccagttgcagcgttattctgttctagcctgaacccatggatacgattttgtgaaatacccattcatacgattactcccactttctgacagtacccagcatatgtggaacccctgcgttcttaaattctgtctgaagtcatccacccagagccaaaatcttacaacagtttctttctcacaccggctccctgcctcccctcccctcttcccctctgccctcttctgtgcctcacttcctcctctccccttcccttctcccgatcccttccctcctttccttccctcttcttgacagggccttattctgtcacccaggctgtagtgcagtggtgcaatcatagctcactgcagcctccaagttctgagctcaaatgatcctcccacctcgtcctgctgagtagctgggactacaggtgcgtgttaccacacccacctaatcttttaaaaacttagttttgtagatacagggttttgatatgttgcccagattggccttaaacttctgggctcaaatgatcctccctccttgacctcacaaagtgctggattacaggcataaactactgtgcctcgccaagatccagttacttttagtgtgtaaaaacctgcatcatgaaagaaatctagataggaaataaaattttgcatgtatgcatacacataaatcacgaatactatatcaccaggtaaatgctccatagctttacagagtttaaagaaactaaaatactgtaggttgaggtgattggcatctcttacagaggaagtagaaacccagctgggcttggattacagagtaagagtaggaggatgagaggaatgggaacctttctccaggttgtaggactgatagaagcctggatttggaggaagagttgatcatgtgtagtgtacagaaaataagccttttcttttttttttttttggcaggagttaagaggccttccttgtgggaggaagagcctttaatgtaaagttaaaaaaattgtacttgatatcctgtatcttaataaacgagtccttcagcaggagaggggcatgatgacactggtgtcccaggaatatcagtgttaccatgctgtgcatactctaattatttcccgcccttccaaattcttcccttagtggtattctacccaccacttctgttgaatgccattttcatgataagcagcacagtggaactggtaaattttccttatattgataggatgtgatcattttccttgctatgggaagttaccgaagactttaatataggtctcatttctcattactgatatcaggagatgtttgtagagtctggttgtttggttattttcattcacgtagattggacatatttgtttttgttgtatattgctaccatcttttcattattggctgtaatggttccctctttactccttaatatactgtggaacaaatttagaacttttaaaaatggaggttatttattgatctctaatacttcataccataagcatcttaagtaactacatagcacttggaactttgaaaaatgggggataataatctattatacaggcatacgttggagactttgcaggttcggacttccacaatgaagcaaatatcatagtaaagcaagtcacacaaatttttgattccccagtgcatatataagttaggtttatactatagtctactaattgtgcaataacattatatcttaatatatattccttaacttaaaaatactttgcggctaggtgcggtggctcacgcctgtaatcccagcactttgagaggctgaggtgggcggattacttgaggtcaggagttcatgactagcctgaccaacatggcaagaccctgtctctactagccaataatcccagctactcgagaggttgaggcaggagcatcgcctgaacctgggaggcagaggtttcagtgaaccgagattacaccactacaccccagcctgggtgacagagagcaagactgtgtctcaaaaaaaatttttttttaattaaaactctgttgctaaaaaatcactggagccttcagcagggggtagcctttctgctgcaggaaggtcttgcctccatgttggtggctgctcactgatcaaggtggtagttttgctgaaggttgggatggctgtggcaatttcttaaaatgtgacaacagtgaaatttgccacattgattgactttttctttcaagaacgatttctctgtagcctgtgttgctgtttggtagtattttacccacggtagaacttttcaaaattggaatcagttttcttcgaccctgacactgctttatcaactaagtttctggaatattctaaaccctctgttgtcatttcagcaatgttcacagcatcttcaccaggagtagattccatctcaagaaaccactttctttgcttattcataagaatcaacttacccactaatgttttgtcttgaggtcacagcagttcagccacatcttcagtctccacttcttattcatgtctcttgctatttccaccacacctgcagttacttcctcccctaaagtcttgaaccccccgaaggcatccatgatgattggactccttccaaattccttgttaatgttgatatttttacttcctcctctgaataacaaatgttcttaatggcatcttagaatggcgaatcctttccagaaggtttttaacttactttgccaagatccattagaagaatcactgtctatagcagctatagccttatgaaatgtattttttaaatgataagacttgaaagtgaaaattcttgatccatgggctgcagagtggatgttgtgttatcaggcatgaaaacaacattcatatccttgtacatctccatcagagctcttgggtgatcaggtgcattatcaatgagcagtaatattttggaaggaatcttctgagcattaggtctcaacagtgggcttaaaatattcagcaaactgtgatgtaaacagacgtactgtcatccaggctttgttccatttacagagcacaggcagagctgatttagcataattcttaagggccctaggattttcagaatggtcagtaagcattggcatcaacttaaaagtcaccagctacattagcccctaagagaatcagcctgccattgaagctttgaagccaggcattgacttctcttctctagctaagaaagttcgagatgacatcttcttccagtagaagtctgtttcatctacatcaaaaatctcatcagtgatcttgctgcagcttctccatcagcacttgctgcttcaccttgcacttttatgttacagaggtggcttctttccttaaacctcatgaaccgacctctgctagcttccaacttttcttctgttgcttcctcacttctcccagttcatagaattaaagagagttaggaccttgctctgggttagggtttggttgagggaatattgtggctgggttgattttccatccagaccactgaactttctccatatcagcaggaagactgttcagccttatcattcatgtagtcgctggagaagcacctttaatttccttcaagagcttttcatgtgcactcacagcttggccaactgttggtacaggaggcctggcttttcgtcctgtcttggttttcgatgtgattcctcactgagcttaattatttccaccttttgagagatgtgtgactctttcttttacttaaacagttagaggttattgtagttattaattagcctaatttcaatatggttgtgtctcggggaataaagagacccgaggagagggagagagtcaaaacccatactacatttactaaatttaccattttacatgggtgcagttcacgatgttccaaaaacaattagagaggtgaggtcagaggtcccttatcacagacctccatgacagacgtgaagtgagcacgtgctgtttgaaaagtatctcctgtagccttgcttaacataggatagcgtttgtaaaaaatgtgatatctgcaaagcacaataaagcaaagcgcagtaaaatgagatgtgcctgtgctttgtaccataaacattttaggtgaatcagcaaaggagtaaatgcaaatattaaaattcaccaagaacaggttgtgtttgggggaattattgttttccctagtaactatatctctatgttattgggaaattaaagcagaagacatgatactgtactcatcattcacgtttgatctcttctccttacagaacatttgtaaatgggtcatctgtctccagtccaatacagctacaccatggggacaggatattatggggaaacaatcatttcttcaggtatgatgttgttcatgtcccttaaagagattgttgaagattgtgctctgaaatagaaaatacatgttaaaaagtaaacctttctctacaacaattatgttattgtgtgtgtacgtatatatttgctgcatgtgtattatatatgtgtgtgtgtgttcattcactgtatatggtctgaaccctagggacatataaacaatatactctggaaaaatactgagtttacctacatagtttttcccttttatttcccactagaagatgattcttttgccgtgtggtgtaagaatttattaatgtttttctgacatgtttatctttttttttatttatttttttacggaaacgtagtcgtggttttagtttccttatctataaaataaggttcttttaggaattcttttcagctctaagtcatggcaaattttactgtaatgggttagacagatcatttattcccctgacagaaccagaaatctaaaggaacatagttgttagtgttggctaagcctctcaaaaaaagtcatggctaaagtctggtcactgtcttggcatctctctgtggcctgaagttggccatgctgcactgccgtcaaagcagcattcaggtacaggaagaaaaaggagaaccatagctgcactagccctgactgtcctgttcatccaaaaaaacagagaagtcttcccagagtccccagcaatcttctccttctgtctcctttgctagaatttgcctcttagctacaaagggggctgagaaagactgtgtctcacctggggctgtacatgtggtttcccaaacaaaattgatgttgtgttgacaaggcaggcaggctggatattgtaaaaagttaacatcctggtctcttgttattgtcactggtcggtgtgctccagatgtcatactgacttttctgtagctaacagagatcctttgccatgggccagtgatattttggttactgagaaaagggtagatgggcacaaagagcatggagcatttttttccttcctaaattaaatgacgtgtaaactgctttgttttgtgttcaaaaccctcatcgtttggattaagctgatctttccagctttagctctagtgtgccctacaaattttgaatatcccgttgttttactcatttctccagcgaatatgaacatttccattttcacatcttttcccacactgttccctctgtcctgctttctccttatccgtgaagactcagttcaaatgatttcctcctgtcgcaccttcctttatcaccttgctctgaaaacgtcctcagctttcctttcactctgagcttgtcacaggcgtgtggcctagtgtcatactttctgttgtaagtttttgctggcacatgagtgtcttatttctacgacaagattatcaacttcctgagtacagtaattgccttgtacttacatggtatccacttggcttctaacagataccagtacttaatgaatgacatgaataagtgcctatcttaacttcagaaaataatactctttttcccaccaagactcaatttgcctaaaaagaaaaagaaagcagaacgagaggatgaggaccaggatccctccatgaagaacgagaatagttctgagcagctggatgtagacggagactcctccagcgaggtgtccagtgaagttaactttaattacgaatacgcacagatggaggtcaccatgaaggccctgggcagcaatggtgagcaagtcgggcgtgcacttgagaatcagttccagttggtagaggctgaggtggggagatcgcttgagcccaggagttccaggctgcagtgagctgagactgtgcccgtgaataaccactgctctttagcctgggcaacatagcaagacgttctctctttaaaaaaaaaaaaacggtagagtgttaaaaatgtttatgattggggactttcaaatgttaacaaaaaggaaaatctttatgttgctattctctgtattttgtgtctttggctttaatttatatttatcaaaatgttctgccttaatatgcagtcagatcactttgatctgatggatagaatctctcttgtttattttattttaattttttgtgagagagtctcgctctgtcgcccaggctagggtgcagtggcacgatctcggctccctgcaacctctgcctcctgggttcaagtgattcgattctcctgcctcagcctcctgagtagctgggatgacaggcgtgcacaccaccatgcctggctcacttttgtattttcaatagagacaaggtttcgccatgtcggccaggctggtctcaaactcctgacctcaggtgatccgcccacctcggcctcccaaaatgctgggattacaggtgtgagccactgtgcccggtcaaatttctctgctttagaaacttgcctgtcattggcttatgattgtatttctggaggattcgccatgtcttaggttatgtgtagaacatataatagacctgctttttctgcagggaagatggttgaggatatgtctgagaatatataacaacatgagtgattgaaagtcaggaaagctaagtttatgccaaattgtctttaaagtattaggtggtatagttaagatgacagacaacattaccatatagaacaacatttgaagtttattatgttgtaactctcgatcatgtatcttttttaaaaacgtgtttagatccgatgcagtccatattaaacagcctagaacaacagcatgaagaagaaaaacgatctgcactggagcgccagaggcttatgtatgagcacgaattggagcagctccggagaaggctgtctcctgagaagcagaactgccggagcatggacaggttttctttccactcgcccagcgctcagcaacgcttaagacagtgggctgaggagaggtaggcggcacagaggggcctgttaactttatagctcaggcttgccacctctaacacacctagggaaagtgtcaaatgggaacattaagatggtgcttacaaaagaattatgttaaaagataagtgttaacagccaagaaccactttgcatttgtttttaaaaggggaattgcccatttatattgcattatttaaaactgttggtgttaggtgttgctccattttcagttggtatggcttttggatttggatatagaagtacacttgatcattgtattatgctttaggttctgaagcttgggtagatgatttttagaaaaacaaagttggttatctggactgattagctcaggtaggtaaagcatggtgctgatgagatgcagattgcaaatttgatctctgtatgggctaattagcattgcattgaaatgccttatcccatggttgcagactgtacttcactaacctcatactatttaaagtttggtctgcaggcaggcagcttcccttttacctggagattgatagaaatgtaggatttcaggcctccacctcagacctgctgagacagaatcttgagttgatgaagatcccctggtgatctgcatacaggggcactgctgttatctacagccggcttgctgtgtggctgctttccagtgcttatcgtgtagttgaggttcaagcgtgtgcatgggtcagtgtcagcaacacagtccctgcgtgcagacgaccacggaaaaagctcaattcacactttggcaatgatgtactaccactgtatgattttctgactagctgctttgtgttaatctcttccctacctctgccgcttctttatttttttttagagaagcaacgttgaataacagcctgatgaggctgagggaacaaattgttaaggccaatctattggtgagagaagctaattacattgctgaggagctggataaaagaacagaatacaaagttaccctacagattccagcctccagcctggatgccaacaggaaggtgaggttgccgttccttgaaaaaaacaaagatctcattggataagatcgcctgatatttcctggtgttatttaagcttcagatccctgtctgtgcctgccccaagtccagatcctttgtcctccatgcttttgggtagaattgacttccttttccattctctacctttgagtgtatgtatattttatctgctaggggaatatactctgcatctcacctggccctgacagttcatttcactcaactttcttccttcaaatctgtttaaattctttcttagaagtcttttctgattaatcttccccgaatgtctttttttccttccttatgctaccactctacaaccccttctccacaagttaggtgttcattttgcttatgttattttctacttggaatagcttgctctgtaaaactgctcattagttgtgtcatggtgtcatgtatatattcaggatcatactttttttggtataataaatttaataaaatgtagggggaaagtcccatcacaatcttctatctttgccattcagttgggtttttttccttcatctttttttttttttttttgaggttcttttctagctcttgatcacattcatacataatttttgatggattaggtagaattttctattcagatgaattttttgtggatccgtgtgttctgtttagcctgcggtagtcaacacagcaaaactttaatcaatccatcttggatattctatttttcttttttttgtttgagagggagtcttactctgtcacccaggctggaatgcagtggtgtgatcctgggtcactgcagcatctgcctcctgggttcaagcgattctcctgcctcagcctcctcagtatctgggattacaggtgtgtgccaccacgctggactgatttttgtatttttagtagagatggggttttgctgtgttggccaggctggtctcaaactcctgacctcaagtgatccacctgctttggcctcccaaagtgctgggattacaggcggatattattctaatttgatagcaaggattacatctttccctatgacatcatagcatcaaggtcagcgttttgtacagggttagatatttggcaaatatgattcttagtattttgagaaaggtattgtaaatatgatatgatcgttactttacagatcattgtttttgtatactctgtgtgtattttgaaaatttttacttaattagaacactagtatttgtagggcaaagtctgggtacagtaggactcaccaaaaaccgaagaggaaggccagtcacaaggagaaggttcagggcctagtttctccttgaaggctgagaagtacaagatcctctttgattttatagtgtataagttgaaaaaagcagaaacctgaaagatttttccccagtaagcatgaccgcagcccttttctccgtaacctcttttgggctttgttgaaaggtgtggctctgcactggggcagccatgtcaacgcctggaagaactcatgtcgcctggcatctctccttagttaggctgactctgtagtctttcgtgcaacagactattttttggtatttgaaaagttgtttaaagtcctgtccattctgtgaactcttctctggtgaatttttttcttatttccagttttgcaagagggctaagttatggtagctgcaccatattgcccgttgctattatagtcccaggtccagcattctcccccaggaaagccactacccacacaggtcacaaatgggatttttgtatttattcactggctggctgaatataaggtaggagggcctttaattttgactgtaagatggccgggcatggtggctcatgcctgtaatcccagcactttgggaggacaaggtgggcggatcacctgaggtcaggagttcgagaccagcctggccaatatgatgaaaccccatctctattaaaaatacaaaaatcagccaggcgtggtggcaggcgcctgtaatcccagctgcttggggggctgaggcaggagaatcacttgaacccaggcggaggttgcagtgagccgagattgggccactgcaccccagcctgggcgacagaaagagactctgtctcaattaaaaaaaaacacacacacgcattttgaccgtaagaattctcaaatgtttgttttattatttaaatttttttcttagaaaatgattgtaggcaagatgttaatgaaacatcaatgtatttcaaagttctcttcagttttaagtagaacatttgaaaaattaagccagtaaacctaaattgattagataaccagtagatatgtctccctcggggaaatgtataggggctttttttttttgaactttgtggttttttaaaagttctaaaattttttctacattaaaaacacattgctcaagttctactctgaaaaaaatccacattgctcttataagctggaaaaacttcagagcatactttttttgggggggaggtgtgatacttgcataatagaacattacttttttttaattttattattattattttttttgagacagagtcttgctttgttgcccaggctggagtgcagtggcgcgatctcggctcactgcaacctcctcttgggttcaagcgattcttctgcctcagcctcctgaatagctgggactacaggcgcccaccaccatgcctggctaatttttgtatttttagtagagacggggtttcaccatattggccaggctggtctcaaactcctgaccttgtgatctgcctgccttggcctcccaaagtgctgggattacaggcgtgagccaccacacctggccaaacattactattttaaagtgaataactcagtggcatttggcacggtaataatgtggtgtgagcaccgcttccatctagttctgtatgatcttaataagaaacccaaacaatgcatatttggaaactggtatcattaattgcttccacgtgggtgaatcggggacttttcagtttactcttttaagtgtttcatgttttataccccctgaagatgccatccattacaataaaacaaaattcagcctctgagagggacgtttcttccccatacaccgcagcaaactttccctctctccccattgataacgttgtggtcatatggtggcctgaataaaatacttttatttcaacttgctgttaaatgtggtcttttgggttttaaacttaaaatcatttccaactacagtcaaaatttaaatgtggtggctcatgcctataatccctgtgctttgggaggctgaagcagggggatcacttgaggccaggagttccaaaccagccttggccatatagcaagaccctgtctctatgcaaaacagacaaaattagctgggtgtattggcatgcacccgtggtcctaactacttgggaggctgaggcaggagtatcactggagcccaggnnnnnnnnnnnnnnnnnnnnnnnnnnnnnnnnnnnnnnnnnnnnnnnnnnnnnnnnnnnnnnnnnnnnnnnnnnnnnnnnnnnnnnnnnnnnnnnnnnnnnnnnnnnnnnnnnnnnnnnnnnnnnnnnnnnnnnnnnnnnnnnnnnnnnnnnnnnnnnnnnnnnnnnnnnnnnnnnnnnnnnnnnnnnnnnnnnnnnnnnnnnnnnnnnnnnnntagctggcattacaggcacgtgccaccacacccggctaatttttgtatttttagtagagaggggtttcaccatgttggccaggctggtcttgaactccttgacctcaaaggttatccacctgccttggcctcccaaagtgctgggattacaggcgtgaaccacccaagcccagcaactccccccaaaaaatttttaatgtaagtttatacttaaagtgaagtttataaataggttttgattgcacttgggtaggaaggtattatgttatagcttgtaagactttttggaggctttgtaatcaacagattaaaggatgattgccatttgagttttggtgtaatgacatttgactgatgggggtggaattgtcagctttgacttccccgctgcctgtgtgtttctcacggtcattcttactctctttgcagcgaggctctcttcttagtgagcctgcaatccaggtgagaagaaaaggaaaaggaaagcagatttggtctttggaaaaactggacaacaggctgttggatatgagagacctttatcaggagtggaaagagtgtgaagaagataacccagtaagttatttaagagaaaatcacttaattggtaattatggaaggagccaagctggaatgagtctacccatttcaggggaaaattgttctttttccaaaattataatcctatttctggagtaaggtttattttaatcccctaaattgtttagcaaattaacaattttaataatctctctttctggtatcttcttttttcttctcatttctgtcttttagatttctagcagaattctccactttccattctgacttctgttggtgtgcgggtgtctgtctcctgtgctctctgggaacctctttaggacagaggccaggcctcattatttgtctctcctcccattgctcaacccgtttaaccttgcagataataaacctacaatatatgttttgtaagttgaacatcggtggtatcttaatatttacactccaaggagcatttttgaagaagttttgatcataacataaatgccataaatctatacattggtactctgtccttaacttgcaggttttcttacttagatcagccatgtactcatacgtatttaaaatagaagtgcatattatgtatgtctgaacatattttcattaccgttagacctgtttccgcatagagttgtttacttcctttgccttttgttttgtaaaaatgatttttccagattgttatcaataaaaatgtttcttatagttaggtgatgtttttgcttaaaacatgtttgtctctttggtacccctctcctatttcaacttagaaataaaacaacagtaataaataatgaaagagccactcccataggggctcacctttttttttttttagatggagtcttgctctgtcatccaggctggagtgcagtggcacgatcttggctcactgcctcctctgcctcctgggttcaagtgattttcctgcctcagcctcccgagtagctgggattacaggcgcccaccaccacacctggctaatttttgtatttttattagagacgggatttcaccatgttgggcaggctggtctcaaactcttgacctcaggtgacccgcctgccttggcctcccaaagtgctgggattataggtgtgagggctcaccttttattagcagcagttttatctgatgacttgctaggaataagcagagcagataagaattactgtctttcccaaaagaaaggtgaagtgtagtttagcacactctacttctttttctggtcaacatatattgtttattttgtggcaaaatttccatgtaaaggagaatagctgataaaagtaatgacctgttactgggatcgctctgtcatgggtggaggatgctcacctccattgtgaatgggaatgaggaagagtgtgtatgggagtaatacagcgctgtgctttagcaaaaactttagaatgttttactctaaaaaatacaagagttaggatgatgaaagttaagtttaataacctagagtgcatcaaaaagcagtaggttgaatgcatttattgtaaatggtttttctgaagttgtgtgttctcaatctctttacaggtaatacgatcatacttcaaacgtgctgatccattctatgatgagcaggaaaatcacagtctcattggggtggccaatgtcttcctcgagtcacttttctatgatgtgaagttacaatacgctgttcccatcatcaaccagaaaggagaggttggttttctcttcatgccttgtttcctgtagagaatagtttaagaaacaagagggtggtgatgggatattgttgctattttttgtcagtaacgtgtcttattaataccttgtgtttccaaggactcttagggtagagtaactgtcagagactaggcctctaaattcccatacaccattaacctgacaacttgactgtaaaagagaagagaggtcatctcaagggagcacgaaccaaatctggagaaatgtttctgccttccctcattgctgcaggtggcaggtcggctgcacgtggaggtgatgcgactcagtggtgatgttggggagaggatcgcaggaggcgatgaggtggcagaggtctcctttgagaaggagacccaggagaacaaactggtgtgcatggtaagtcccagcttcatcctagtattacgttgatacaaaagtcattgcagtttttgccattacttttaatggcaaaaatcacaattacttttgcaccaacctaatagctgattttgagaactgcaggtctttagatggtaagtattatgttccttttcaaattttggaagtagagcagagcctcccccactcatgataatgcaaaatcgcctcctccatttccaaacacccgctagtgagccagacctgctggtggctgagaatccctgcaggaacagttcttataaaaagaaggtgctgggggacaggaagtcagcgaggggcgcaggtgcaatgtacaagtgagaaggaggtgaggtgaagcgaagaaggcctaaacctgactcttaattcatagctcatcctagaaccagtcctctttcccagtaaacatctctagaattgaagctgatgttgaagggagtaagttacgtgtcagccacaaggtagcgggaagctggagctgttggagttgggctgctttctgtaagacttcgcgtatattgagagggcttctggtgtttcagttacttcactaggaagggggaggaatcttaattcactgaagggttcatttttattatattgtacttgatttcagagcagctcctttgagtcatgtgatgatcggagatggagacatagggttgatgaccccacaatggcccattttaaaggtgatggactagtaaatgcaactctcaaatatcaccttctactattaaagtaaaataacatacaagggcacttctcacttgggaaatttatccttattactgaaaaaaagtagtacattctaagtcatatgggcttcctaaaatgaggttaaaataccatgttttttaatggaagatctcaaatatacataaataaaagtagtgagaaatgtgttacgaatccccattcaccttcgctccacaattaccacctgtggtcaacctcgtttcattcatacactcagccacttctgtgctgcccccctcccttagcaccccagcacgccccagcatcatatcttatctgtaaatagttcagtgtgtgtctccaaaagatgagtccttaaaccaatataaccataattgccaaaattagtaatgtgtcaaaaattaataatttcttaatattaaaatcgtcagttttcttaattgtcttggttggtatgtctcttggtctgtttcagtctttaggccctggtatgctcgtgctctctcactcgctcgctttctctttttgcctctcttaccacacctgcaattcatttattgtagaaactgggttgttgacctgcagtttcccatagtctggattctgctgattggtgttacttagtatgttaagatgcatttgctgaaaattggtagttaggtatacaggtgttacctgggggagggaggcagccagggtgctttgtaggtggtggcctgcgttcttccatcaggagccacatcttgtctagttgtttgtctttgagggatgatcagccactgatgattcttacctagatgcatcattttgttaggagttacaaaagaatggttctataattctattgtcatttcatttttctccagagaaaatcttcctattaacaactgttttgctctacagagataatttgtatagaaaaggaaggataaatgttgcatctctccctttatttacaatttttatttatttattttatttttgagacagagtctggctctgtcacccaggctggagtacagtggtgtgatctcagctcactgcaccctccacctcctgggttcaagcgattctcccacctcagccttctaggtagctgtgccaccatgcccagctaattttgtatttttagtagagacagggtttcgctatcttggccaggctggtcttgaactcctggcctcaagtgatccacctgtctcagcctctcgaagtgcaaggattacaggtgtgagccaccatatccggactaatttttaaaataatgaattggttttccaaaatgtgacaagttagtttttttgtccttagtcttaaaagcatgattatgaactcttggacttaaccatatttggtgtgtgtctatctgttgcattcactacctgtatttaaacacaaatgttcccatctttggccagtgggagccgcttcagttggcccttgagtcctgttgtcataactctaaccttcctggactggggtagctttcttgttttccggtgtgatgaatattccgatctcatcttgtgtatttcctgtcccagacctggaatcagccatttctccaaggaacctgattcctttcagtgggaagtggtttttagagaccatatactggcatgtaatggccttttatgtaaaaaggacgaggacaaataagctatatgacaataaatagaacactggtagaaaaacaaaagaaaccagcctggagacagttaagatgtcatgcgtggtgagtgtaattagcccccaaagaagtctggatttgtttttttgtaacaaggctatatgcacatattaacatctccacgttttcactgatatgaagtaaagtttgtatatttaaaaacctgggcgcagcatccgtgcctgcagacattcctgggctcctctgtcttgaacagctgcaagttgaagtctgtgatactctgacaccttgtggtggttatagtttttgtgtgcaaaaacttttttgaaaaccccacaaaacccaaacagcctgtgttcatttcttatggctgacagtcttcattcctggcagttgcattcctgagaggttgcccataggcgagagttcagcatattaaatcttgtttcttgtctattttaacattaaaattgtgattaattttgaatggtaaaaaaaggttttcagatggaatttagtcactaagaagtatgtattgaacatgtatctactcaatacctgtcacagggccgggcgcggcggctcacgtctgtaatcccagcactttgggaggctgaggcgggcggatcacaaggtcaggagatcgagaccatcctggctaacatggtgaaaccccgtctctactaaaaatacaaaaaaattagccgggcgtggtggtgggcacctttagtcccagctactcgggaggctgaggcaggagaatggtgtgaacttgggaggtggagcttgcagtgagccaagatcgaaccactgcactccagcctgggcaacagagcgagacgccatctcaaaaaaaaaaaaaaaaaaaaaacctgttacaggtctctttcatttcatttcatttcattggtgtggtaagtctcacccctgtagagtaaggtagctactgatattcccatttcacctaggagaaaacgaagcctaagaaaactaagaatttaagtaatttgagccagcacacaagctgataagtgggtgagatttatttattttaattaattaattaattaattaatttttgagacggagtttcgctcttgttgcccaggctagagtgcaatggcgtgatgtcaactcactgcaacctccacctcctcccggattcaagtgattctcctgtctcagtctcctgagtagctgggattacaggcacgtgctaccacatctggctaattttttgtgtttttagtagagacggggtttctccatgttggtcaggctggtcttgaactgccgacctcaggtgatccgcccaccttggcctcccaaagtgctgggattacaggagtgagccaccacgcctggccgagatatttattctatttattttatgtaactccaatatcttgtaatcttcccaaatgccatattgccgtgccttaaataatataaatatttaaaaacacttaatgagaaaatgatggtttttaaaaactttgtggaaaaattaattgcagagtattgtttgctcagtttggtttggaggaataaaatatgtcagccaatctgtctttcatagcctgtcaggaagtagctatctaggtgtttcaaacttctgttgacatcacagaaaagatgaattataacgggggttcctgtttgttgctcacccattatatgtctagtatggaagaaaataaaattatctggtttgtgtaattttgtgtgtcatcaatacttctcgaaatgtgtttttgcttgtttgcttgtttgttttttgagacagagtctctgtcacccagagtagagtgcagtggtgcgatctctgctcctgcaacctccgcctcccgggttgaagcgattctcgtgtctgagcctttgggagtagctgggactacaggcatgtgccaccannnnnnnnnnnnnnnnnnnntatgattaatgctcagtcatgtgaaaaattggtttaatcagttataaagtcagaacttagcttaacgacttcaggatttcattttcttcgtagttggagaagttgtagaatattgcagtttatcacaaaaactccaaattaaaaatcaaaccacgccaggcatcgtggctcatgtctataatcccagtattttgggagactgaggcaggaggatcacttgagctcaggaattcaaaaccagtctgggaaacatggtgagacctcatctctactaaaaataaaaaaaattagctgggcatggtgacacacacctgtagtcctagctccttgggaggctgaggctggaggatcgcttgaactcttaaaattgaggctgcagttagccatgattgtgccactcactccagcctgggcaacacagcaagaccctggctcaaaaacaaatcaatctaatgctgcccaccaaaagaaatattaagaatatttggctgcttagaaactgttataggcatttcttctggggcctttgggtctgattagacatgtatctccagttgcactttgttacaaccgcaccctgccctcctggtccggagcacgcttcctttgatacaccttcccccaaatctgcatagagaaggctttccgtaaatgctgcagaaaatggtcatcattcactaacttcacttcccttctatctctccccacatctttaaattatacatttctggtgcttttaagttttcccaaacaatgttgtatagtattgtgtaacattttcagttgagaaccttattcctctttatactttaaaatatcaaatccatgttttgctctttccttgatatttgttgtttcttggcccatacaccgattttgttcttcattcgctatgcctgacaaccttgttctgttctatggcatatccatggttagccaagttcatatcattgaagagtgctgatgtttgagatctttcttcatctgaattaacgagatgatgattcttatattctgagaaactaacatttaaatgttcttagactttacaacgtccacctctgtagtcaaggtccttgtaaccctgtgtccagcctctcactaaatataatcattgctaccactatttcccagatgcagaagtccagtctcagggtgaatgggatttggccaacataaatatcataagcacctaagttagtgacagagccggggctggaacctgcaactctgaatgcttgttggaaccctcagatttcaaaacacagagccttctttttccttcaggttaaaatcctgcaagctactgggttgccacagcatctgtcccactttgtgttctgcaaatacagcttctgggatcaacaggagccggtgattgtcgctcctgaagtggacacctcctcctcttccgtcagcaaggagccgcactgcatggttgtctttgatcattgcaatgtgagtttgttttccagagtaggtcagcatttagattactcatgtgaaaacaaaacagaaaatgaaccttgtttctttgactaaatgtgccgttatatgtcttggagcagtttctgtagagtgtggggattgagtaaaaagtgtcaatgcacctatactcctccacaacccaaaggtaacttttgcatgagaaacaaaacacatatgtatgtatatatgcatattcttctccaaagaaaatctatgtcctatattaggttactgaagaaattatctaaaacagttaagaaacttgtgttttagagaaagtgaacacaggtaacagagaagaactaactttattgagcaccgaatgctctgtaaagctctttgttattccttcatttggatcctccaccgtagttatctttgttgatagtgcatttttttgtgtttgtttgttttgttttgagacagagtctcgctcagtcacccaggctggagtgcagtggcacgatcttggctcactgcaacccctgcctcctgggttcaagcgattctcctgcctcagcctcccaagtagctgggattacaggtgcttgccaccatgcgcagctaatttttttgtatttttagtagagacaaggtttcaccgtgttggccaagctggtttcaaactcctgacctcaaatgatcagcccacctcagcctcccaaagtgctgggattacaggcatgagccaccacacccagccaacagtgcgttttttgttgttgttgtttgttttttcccagctgaaaacacaaacaaatcagagaggtcattttgcccaaagtagttcttcactggtttgtccatggctggtgagcagcagaatgtggactattgggtccccaagtctttcttgctcctgtaccacacttgatccatttcatctctttcaagagagaggcctctttctaatccgtttaaagccaaaatacttcactacattaaagatagatagagagggggagacaacaacagagataggagattctgtgatttctttaataaactgttttagagctaaatcctaattgcaatatgctatcttataaagatggacaggctggcagaattttcacaaattagatctttttttggtgctaatgattttatttccttattctcctaatagagatagttaactttctaaaaagtgggaaaaaatgtttttgcaacacactaccttattgcatataacttttatatcaacacattatagatcagtgttgtaacactttatacaattatgctcttaaaaatagctcccaaaatattgctaacaaaatagaatgcaatggtggtcttacatactagactttcaatctgaaaagtttaaaaaaaattccgatttatacttatgtttaaagtcaagaaccttttgccatctgagcattcattatgggttttagatgatagttctgtataactaaaacattccattttctattttttttccctgatataattaagtatgtgatgtctggtataaacaatcataagattaccagaaagagtttgctcttctgtaattagctgttgtgtttcaggagttttctgttaacatcaccgaagactttatcgagcatctttccgaaggagcattggcaattgaagtatatggacataaaataaacgatccccggaaaaaccccgccctgtgggatttgggaatcatccaagcaaagacacgtagtcttcgggacaggtgaatattagatgttcatctgattccatttatatatatgtaattttttttttgttttttgagacagtctcattcactctgtcacccaggctggagtgcagtggcacgatcttggctcactgcagcctctgcctcctgggagtaagcaattctcttgcctcagcctcctgaatagctgggattataggcatgcacaccacgcctggctaatttttgtatttttggtaaagacaaggtttcaccatattggccaggctggtcttgaactcctgacctcaagtgatctgcccacctcaccctcccaaagtgctgagattacaggcgtgagccaccatgcctggctagattccatttataatttttaaaaattgctagagattagtactgccatttatagaggttactattttctgagcatgaccagtgttccctgaagggatggcagtgtctccagggtattaatcacacaattaaacttccttagggaagtggactgcagagaataatggaagaaagttcaatttgtagctgattaagaagaaacagtgaaatgaattttggagaatagtgacttaccgttatgaattacttttaattaatcagctgtggagagtatggatcaagattcactctagtgttgtctttagctcatagctctgagtggcatcagtgttggaaagaggtaggcttctttgtggacttaaaaggaagcattaaaagggattgactgaaattgcatatgtttgtgcttttcacctaattatagatgaaaacagattttctttttcttttttgcatttggatagtttagcaaatactaaattagaaagtgacatttgagattttttccttgattctcttactgacctgagaaaaatacttggcacatcactgaagcatatggcactacctttgtctatctacgaaaagacaacccctgtatttgctttttttttccttttttttttttaatagtttcaaattattttagatttgggggtacatgtgcaggttgtttacctgggtatattgtgtgatgctgagctttggggtgtgattgatcctgtcactcaggtagtaagcatagtactcaggaggtagtttttcaacccttgctcacttccctgctccccaactcctgggagtctccagtgtctgttgttgctatctttttgtctgtgaatacccagtgtttagctcccacttataagcgagaacatggggtttttgcttttctatttctgcattaatttgcttaggataatagcctcgagctgtatccaagttgctgcaagggatatgattttgtttggttgtatttttttatggctgtgtacttgctgcttctgtacatctgattagaatttccaatttttgagtaacgactttgaaatagatttgtcattacatctttttgaacaaagtaaaggagccatttctagttctgatattgtgagtttaactttgctttccattattcttgccagtatgtacatgcatggtattcactgaactacagatcattctgaattactctgtttggaggtcattttcattgttaattcttatgtgtgtaggaccctaagctgcctgtaatgaaatagaaatgtatgattttccaagaacttcgcttatttcctagatggagtgaagtgaccaggaaattggaattctgggttcaaatcttggaacagaatgagaatggtgaatactgccctgtagaagtgatttctgcaaaggatgtcccaacaggaggaatcttccagctccggcaggtaacaagattgtgaatgtttacattagattctttggtgccagaaagcttaatattggcttctttttagtggaaatgttggcaataatgaaatctagactggccaagtccatttcttacattaaaattctcctatctcatgtcacaagtattgctattaaatttttttttcttttaatgaagtagagacacagggatctcgctttgttgcccaggctggtcttgaactcctaggctcaagcaatcctcccaccttggccttccaaagtgttggaattatgggtgtgagccactgctgtcagccaaatattgatatttataatattttaaaaaccagttctgttagtgttaggtaagaaaaagataaactttaaaggaaaacttagaattgatttgtaggacataaaccaaacatatcaaacagctttagaaagaattgatttgtaggacataaaccaaacatatcaaacagctttagaacatttaggaagacaaggagaagctatgtgacatgccagaaataataagcattcagattgtaaaatgcttgggctcaattctggctctctagtgtcctggctgtctatccctgagcaagttcaataacctcttgccttcgcctgttatgtagacatgatgataacaccaccttcatgagattagtgtgaggattaagagagatgcatgtttaaagcacagggcctgacatgccaggtgttaagtacacacagctgggtagatacacatgccagaatccacagagcagagaagaatatgggagtggccacttaaccccacatgcatccgcagagtctgtgctgccaactaacagtgagagggaaatttttaatttaatttgtatacaggatttggaatttttttttttgctatactttaatgcattgtttaggagactgccatattctatgagtttccatactttaaaacagcagtaaaatactagaatcgctctagaaaacgagcgtagaaagcattcaaagcaaaatagagaaaattaaaggaaagagaacatttgcttacatgtttaagtttctgaatgttttaagaggaggatgatgataaacacttgttctctgaccccagcaaataaattttagcaaagtgaaagattagtttaaattaaagcatgtgttgtacacataaaatagaattcttaagggtgtgaagaacatctttttctgggcgtctgttaaaaaatatatgtatcttcttcgaagtcttagaaattcatctactggaaggcaagactggataattttctatgatttagtgtaaattggatatttaagtatttgtcatacttctgacaccctttactaaaagtgttcaaagaaatgttggtttatcaggaaagggctttttgaaggatatgcctctttaccttcatattgaaaaaatcatgcaagttctgaaaggatttttcttatatgatggcaaaaaccgcaattttcaccaacttaatggcaagaataaagacacagaggccataaattaggtccatttggatagaaagtcatgtggagaaagagctggaaaacaggaagagaacaggttgcagaagcttctggaggctggtttcggagggccttgaatgctaggctcatttgagtctaatatgtttgaaaattggcttgtattgttcttgaacgggaacgtggcagaggacaactggttagctttaaccatgtgaaaagtgctgtttttgtagaaataaatggtcaaatatcagtagtgacaggaagttctgtctaatagtttaagtgtacttttaaacgtttttctgtggaacagtaaaccattgccagatcctttctctccttttcttccctctccttaggaatcttcccttcaagtgcgcacttcacccttcacacttaggcacagattcacaatagatcacttcggaaagtgcttaggcaaactaagcaaataaaaggtagctaattgaaatgacaaaactgtttaggctattaaaatattttctttaggacttttcccacaaaatatctgaggcttagtccttggtgatattaaatcagaaaacatctgtatcccagccactcaaatggagtttgataggatcagtggttgcctgagctgattttcctgatcatgcagagctcttgggaactaaaatctgatggaagagggcaagagtaattgacttgcaattgaacatttaaattctgtttttcaaatgctattttacatttctaaaatttataaaccaagtttgaagtcagtaatttgggaatactgtgaattctcttttaaaatattacttcattgtaaatatataccaagtctcacataataaacagtctaaacaatcatatttactgattattttttataattatatatttatatttatattaatgatatatactgctatatcagtaaattatattttatgtattatatacaagttatttacataatatatttactgatatatttactgatactgattttttatatttactgattttatatttatatttatatttactggtactttaacatgtcatatgtttttctacagtaatactttaacaactgtatagtgtttcattatatgtttcacagtttaaggttattgttttgtataaaacaaataataaagttattgaacgtataaaatattcattcaatttgtgtctaattttttgttcttaaaggtgcttaagattttttgtgtatatgtatgattatttacttagctctctggaaagttgaattgctgggttaaaggaacttatatttttaagtcaaattgccttgcagaaaacttgcaccaatttaaattcccacttacagtgtatgaaattgtttcgtaaatgtagggcattggaaattcctcttttaaaatataattgccaatttaggaagtgaaaatacaggtgtgtcatgctttaatttaatttgtatttatttaattatcagtaagttgaacttttttattggccaactgtttgcatttcctttcttagaattttttaatgttacttcttattgaaagaatatgtaaacatatatttattctgttttttagctcacttaaaagggaaatgatttttcccgattagtttttaaatttgtattttaatgcttaacaataaggtatagtgacagtgtctgaattaaacatttttctcaacatcagcctgtaggggtctctctaaatcaaatttttggaaatcaagacactgattttaagactctaaattgtctgtgacccaggggcagtcccggagagttcaagtcgaagtgaagtcagtgcaggaatctgggactttaccactgatggaagaatgtatactgtctgttggcattggatgtgtcaaagttagaccgctcagagcccccagaacacatgagaccttccatgtaagtttctatacctgttatgttcttcttgaaagacaaaatcagaccagagtgccttttggaacctgtacgaaactactttttatgaacatttctttccgtgaatctctttgtttacctttgctgtctttttttgtgtcttgcattttcatggaatcactgcatcggactgtattactggttttgccctggtgtaggtggcaagctgagggttaaaacgtctcagccttcatagattccacagtgcctgctagtgattaactcctcaacatcaccccacccctctggagaaaccccctactggcttgtaaagactatttgccagcaggtgtttgatttcccctggcgagtgggactataaacccagcagggagagcattgcactggttcccgaaaaggtcaaatgagtgtgcttcactcttctgtgagcggctccaacttcctgacaactgtaaaacccagagtgagggtgtgggtaggtgggagatgaaatagtatattaattcaattggaaaatataaattatgggtaaagagtcagattgtttagcgtagcctgattcttggataaatcaataattcagttctttgtaatgtgtattttcttttaggaggaagaggaagacatggacagctaccaggtaatttagcacctgttaatctcatctcaaataagcatgattaaagtatataattacacattcctggatctggctatactgttatttaaggattaaacaattcatactgatttttttgttgttttaaagtaaaacagagtagggaacattgagtgttgtttcataggctgtaaagtgtgttaggagtgggaaatcattcgtgactgagatccttttccaaacctggagctccccagccaggctccctgaagatccgtttctctggatcctcttccctggacattttctctcctgagtgagtccccactcgttgcccctattatagttgtctcattctgagctttagtcaacactaggtgttttgcatttttttgtttgtttttgtttttttttttgtgacagagtctcaccctgttgcccaggctggagtgcaatagcgccatctcggctcactgcaacttccctcctgccccagcctaccaagtagctgggattacaggtgcacgccaccatgcccagctaattttttgtatctttactagagacggggtttcacaatgttggcccggctggtcccgaattcctgaccttgtgatccacccgcctaggcttcccaaagtgttgggattacaggcatgagccaccgcgcccgactgaattttgcattttttaagctagatctttcttccctacttcctggaatcatacagcatttggaatcttttttttttttttcctttgttttcttttcctaacctcctgcaagactttgtttctttctgtgcagtttcatctgttagtcatcgttcaggactgtcagggctctttggagcctgattatgtcatccgtgtagtcactttcctggttttgcatcattctaatttgatagaaatgtctgctttcctataagtcactgataaaaacactgtatcagataggattaaatacagagtcctatggcacaacaatagagacttttttcaagctgacattaatcactgttcttcggatgtgatatttgagtcctctgtgatttcacttaagtagatgcatcgcacgtttctccatcttgtccacaacaatgtcataggctatttggttaagtgccctagtaaagcccagacacactatatctgcagcattccactgacctacccagtcttgtaaccttattagaaaaggaaatgaggtaagattgatattcatgtaggtgttgactggtaggttgttattctgttgatgacaacccctatcccctctttcccctacctgttgccccacaaaatgcataaaaacaagtgagagaagcatttacatgttgtcttcaagagcctgttttgacatatagaaagcagaagttacaaaagttgattcttctgattattctaaggtacataaattgaaagtggttttttgtttgttttgttttttggagacagagtcttgctctaccacccagaccatagtgcagtggagtgatcttggctcattgcaacctctgcctctcaggtttaagtaattctcttgcctcagcctcccaagtagttggcatgaaaggtgaacaccaccatgcccagctaatttttttttttttttttgggatggagttttgttcttgttgcccaggctggagtgccatggcacagtctcggctcattgcaacctctgcctcccgggttcaagcgattctcctgcctcagctcccaagtagctgggattacaggtacccgccaccacgcctggctaatttttgtatttttagtagggatggggtttcaccatgttggggaggctggtctcaaactcctgacctcaggttatctgcctgccttgacctcccaaagtgctggcattacagatgtgagccactgcgcctggccaattttttatattttgagtagagacagggtttcgctgtgttagccaggctggcctcaaactcccgtcctcaagtgattcacctgcctcagcctcccaaagtgctgggattacaagtgtgagccaccacgcccagccatattggaagattattgagtcctgtttatcggttttatccagcaaagagaccttttagaagatttttgttgcaggtgcttaaagctctacccccaagccattagaaataaaactggttctggatacctgagaatgccctttctgttctagaaaataatgctttaaattctgaaaatagctgttttgaaagatgggcgcagtcaactggtggtagcaataaagaaattattgtatactaccttacctttccaaggcatagtagagcaaggtaagatagagcatcagtttcagatagattatcttgacattacattgaatatgattttccttgcttgcttccaggatcgagatttagagagacttcgtagaaaatggctaaatgcattaacaaaacgtcaggagtacttggatcaacaattgcaaaagcttgtcagtaaacgtggtaggaaaaacaaatagaatatttttctcccctgcaaatcaatgcataattaattattctccctttgtagccacatcagttaagaaccagatgaacacatcagtaatggggatggcaggagcagatgagtgttactctttgtttatgtcatatcctttatccagctgtcgtatcttggtggaggtcttcctcccaccccctacaaagaaagagcaaatacagtgcacaaagcatacatggtttgtcaaagataacataaaggaaggtggtaacttttcttatccaaagggctcgagtcctctgactctggaccagtcactcctgtgcggtccctctgtaggcctcccaggaactgaagatggcctctctgcaggagcccatctgacctctctagctgtgggttagtttttatcactggggagcacttgtgagctaataattgaaatataggcaaatccagtctttactcaggacaaaaagataaatggcaagtgaagttttgtcattgaatcctcattctcgatgttctagataaaacagaggatgatgctgaccgtgaagcgcagcttctggagatgcggttgaccctaactgaggagaggaacgcggtgatggtcccctctgctggcagtggtattccaggggccccagcagaatggtatgaaccctgtggtgcgtcttgtgaggtctgaacgctcaccaagccacttgcttttagcttgaattttgcgtgtgctacggttaatggaagagtcaatagcatggggggaaatgttgtttaaattaaaggaactgttaaattattttcatgagttgaataactatggcctaaaactgttttattaaataatgttgttattggccaaagtcattaagatttctgagaacttaaatcaatatttaataccactgcacttagcattaagaaaatagttaatatgttaattacttgggtcattcccttagaagactgttcggtcataagaaaattgcatctccacgcgattttggttttggtgctggcttaaactgtactgtcagcaaatgttctgtgctacgttatagaaattaaaaatagtaaatttagccagaggaagcccttaagtatatcattttataagaaagtaggtttaaacaagagaacttcactacaaacaggtagtgtcttataaggctaagttcaaatgtcagggtatgaagcagcagctacagtggaggctttgtggcctctctgattctggattagagtaaaatcagggccagggttattactgctttgccctgtaacagccctgaatgccattaaggctgtgttcctacgtgcatgccactgagaaagtaacctgaggcagatgccatttgttcttcccgttttaggaccccagtacctgggatggagacacacattcctgttatattcctggacttaaatggtaagttaggaggtgttttctgaaggcttacctctgaaaatttagtgcctacataacatgtagattccaaccaagtgcatcgtgaggcaattctgtccccctaaggctagagccagtttgacgtgtgtccatgtctcctggttgcagacggactgatttgtgtgtcatagtctcatgtttatgacaataataggcgtgcttcaccatactcctcacctctcatccctgcagctcacggtgccatgtggatgctctgttctcctggtgttaggatggtagcagtgtttttctgcactaaaaatattttctaatttatttatttatttatttattttttgagacagagtcttgatctgtcacccaggctggagtgcagtggtgtgatctcggctcactgcaacctccacctccccggttcaagcggttctcctgcctcagcttcctgagtagctgggattacaggcttgtgccaccacgcccggctaattttttgtatttttagtagagacggggtttcaccatgttagccaggatggtctcgatctcctgacctcgtgatccgccctccttggcctcccaaagtgctgggattacaggcgtgagccactgcgcccggcttcttctttaactcttggggaaagacttctctctggaaaggacaaataactagcgatacttatgaagcatgtttccttcttgtggtgttttcttagcattatctaataaatatctcactttttctatgagttcttgtgccattcatccctgtattacctgtttaaaaaaaaaaaactgcgaaaattttctcccatgttgtaggttgcctgttcactctgatggtagtttcttttgctgtgcagaagctctttagtttaattagatcccatttgtcaattttgtcttttgttgccattgcttttggtgttttggacatgaagtccttgcccacgcctatgtcctgaatggtaatgcctaggttttcttctagggtttttatggttttaggtttaacgtttaaatctttaatccatcttgaattgatttttgtataaggtgtaaggaagggatccagtttcagctttctacatatggctagccagttttcccagcaccatttattaaatagggaatcctttccccattgcttgtttttctcaggtttgtcaaagatcagatagttgtagatatgcggcattatttctgagggctctgttctgttccattgatctatatctctgttttggtaccagtaccatgctgttttggttactgtagccttgtagtatagtttgaagtcaggtagtgtgatgcctccagctttgttcttttggcttaggattgacttggcaatgcgggctcttttttggttccatatgaactttaaagtagttttttccaattctgtgaagaaagtcattggtagcttgatggggatggcattgaatctgtaaattaccttgggcagtatggccattttcacgatttcgcaacctactcatctgacaaagggctaatatccagaatctacaatgaactcaaacaaatttacaagaaaaaaacaaacaaccccatcaaaaagtgggcgaaggacatgaacagacacttctcaaaagaagacatttatgcagccaaaaaacacatgaagaaatgctcatcatcactggccatcagagaaatgcaaatcaaaaccactatgagatatcatctcacaccagttagaatggcaatcattaaaaagtcaggaaacaacaggtgctggagaggatgcggagaaataggaacacttttacactgttggtgggactgtaaactagttcaaccattgtggaagtcagtgtggcgattcctcagggatctagaactagaaataccatttgacccagccatcccattactgggtatatacccaaatgagtataaatcatgctgctctaaagacacatgcacacgtatgtttattgcggcactattcacaatagcaaagacttggaaccaacccaaatgtccaacaatgatagactggattaagaaaatgtggcacatatacaccatggaatactatgcagccataaaaaatgatgagttcatgtcctttgtagggacatggatgaaattggaaaccatcattctcagtaaactatcgcaagaacaaaaaaccaaacaccgcatattctcactcataggtgggaattgaacaatgagatcacatggacacaggaaggggaatatcacactctggggactgtggtggggtcgggggaggggggagggatagcattgggagatatacctaatgctagatgacacgttagtgggtgcagcgcaccagcatggcacatgtatacatatgtaactaacctgcacaatgtgcacatgtaccctaaaacttagagtataataaaaaaaaaaaaaaaaaaaaaactgtcatttttctgtttcccactcaccaccatgtaaaatattttgggcctggatacgttttacatatactctgccgctaggagttctgcctgtaggagggaaaatagaaaatggaagagtagattaaggatctaaaaataagttagaagtcagcagttaaattcctaacacatctgcagaactatgtattaacgttaactctccttaatagatgagtgtggatgtcctccgtggttttcttccacctagctgacagcgagatgcagtctctgaggcatttaggatctcctgccacttagcttatttaaatggaagatttttctatgcatagagttagagaataataccgaataatacagccactgtctgtttgcttgatggggtggaaggtgtttgtttttaaatgtttgccacaagtccttatcctgctgtggtgttctgaacttggcgcctgagggtgattctggcctgttcttctgttaggcttcctacgtaggtgaggtgcttgtatttgggtgcaggcaggcatatgcataagaaagtgaaagacaataagcttaaggaagacgtggtagtctgggcatttgaggggatcatcaggactttggtcagcatggtacatgttctcggtccccccatgcccacctcctagaaaaggaactttggatgtctgcccacgagctccaggtgaaggggagtggggagggccaggctcgggcctgaggaaccagggggccatggtgcagtccttccatttccagcccatgcagccagtggaaccttctggtgaatgttgctgtcaggtgcctggaatcacccttgctcgtttctgacccttcagtgcactaaatggtacggaatttgtgttataacccggtcactgacattgatgagatgaccttgggtaacctcttaggtatcttggtttcatttgccttccctataaaataaggcataagtgtagcagattggatgagatcattttttgaggcactttcttatcttgaagatctgtgaacttttaagtggtcatcttcagtgtcatgtaagatttcagagcaaaaagcaaatgaaatttgaagcagaagaattgtaataatcacattgaaatttagctggtaggggttatccttgaaaatgatctcagtatttaatggaacttctttgcttttagctgatgatttcagctctcaggataatcttgatgacccagaagctggtggatgggatgcgaccttgactggggaagaagaagaggagttctttgaattgcagattgtgaagcagcatgatggggaggtaaggaaagcctaacttgggatggtcagatgaaaagtggtttccttaacctctcctcgagctttttgaaacaataaggcaatcatgccagtactttacatttctcaaaatacataaagcaaaacctttcatcatgacttccagaagaatggagcttgaacatcatattacatccattcaccttttccttcctttcctggtaacttgtactgagcttgtgtgagcagttcagatcagcagcggtcaggagcttgaggctctctctgttcctcaaccagtgagagatggaagcaggggctgcggaagtgcgtggaggtaaaatggcaccaggtttgggatttgctttgggatttttttgttttgtttttgtttttagatggagtcttgctctgtcacccaggctggagtacagtggcaggatcttggctcactgcagcctctgcctcccgggttcaagtgattctcctgcctcagcctcccgagcagctgggattataagtgtgcgccaccatgcctggctaattttttttttttttttttagtagagatggggtttcaccatgttggccaagctggtcttcaactcctgaccggaagtgatcgcctgccttggcctcccaaagtgctgggattacaggtgtgagccactgcgcctggctgggatttgctttgaaatcattttgtaaggactttttaattttttttttattgagatggagtcttgctctgttgcccaggctggagcgcaatggtgcgatctcagctcactgcaatctctgcctcctgggttcaagtgatcctcttgcctcaatctcccaagtagctgtgagtacaggcacatgccatcacacctggctaatttttgtatttttagtagagatggggtttcaccatgttggtcaggctggtctcaaactcctgacctcaagtgatctacttgccttggcttcgcaaagtgctgggatgacagacatgagccaccgcgcctggccaggatttattaaaaaggaaaagaataggtgaaagcagtgtggtgacatcttgattttcatggttgaatctgagtgatgggtatctcacgggagtttattttctaattttgagtatgtttgaaaaattatgaaatatattcaggaaggaaagctgatatgtgatatttgaggacacattattacttaatagtgtccctaagaagcgaaacttgagtcttgacagtgaggagtcagtccgacacacacagcggctatgcattctgtagaatagtgggccggcacccttccagttcagcagggtcaagcgtgacaaggaagggccaaggagctattgcagattagagtagactagagaaacgtgacaactaaaggcagtgtgtggttccgggatggggaaattgaaaaatttgaataagggattttatattaaataatagtgtattcctgttaaatttcctagatattactttcaacttacttgaaagtggtttagcaaaagtaataatgtgtgtgtgtgagttgtgagaaagagaagcaaaagtggccaaatggtagcagttggtgcgtcgggatgaaaggggtacaaatcactcgactgaatttttgcaacttttcttgacatttgagcattttttaatacaaattttaaaagtaagccagccaggatcatcatgctctatacttttcaggctaaggtgattgtggccacactgtcacactccattgtcttttcagggcagctgtcatagtagaactttgctggtgactggcatgtgccctttcagcctgagccaaggtggtttccttgaaagagttttcatgtttctggagaagagagaaacctgtttcctctctgtcttctctccaggtgaaagcagaagcctcctgggactccgcggtgcatggctgccctcagctcagcaggggcacgcccgtggacgagcggttgttcctgatcgtgcgcgtgacggtccagctcagccaccctgctgacatgcaactggtgttacgcaagagaatctgtgtcaatgttcacggccgccaggttagtcttcagtggaagaaacgactctaaccacagttgcgacctgagggtagggccgtgcagtgcttgctgttaaccttctgtccaaacaggctcccggaagcactgagcttttcttttccaggtgactgctgctgtcctgtacccatgcttgcttcaagcctcagatgtgtcacttgctcctggacagtatttttacactgaatctttcttagggcagattcacaaattatggttattcttttgggtaccacacaaccctgtcaagggcaaggtctgtggtttggttgttgccttttcatctgggccctgtcaaatgaggagtttccctcttactctgctctttccagacttttttttttaagatagagtcttgctctgttgctcaggctggagtacagtgatgcgatcatagctcactgcagccatcgtctcctgggctcaggtgatccttccatctcagcctccccggtagctgggaccacagacgtgtgccaccacatccggctaattttttgtattccttatggagacggggtctcgccatgctgccagggtgcgttccagaccttttacctcttgcagtctttgatttgtatatttggctttgggataaaaaggtgaataagaaatgagcccagtgcagtggcgcacgcctgctctcccagtaactcaggaggctgaggcagcaggattacttgagcctaggagtttgagtccagtctgggcgatgcatctcaaaaaagaaacaaaaagaagtctgtgtccttaaagagccaagttgatttgtgtaggtagatacgtaacaggcaactgctctcggcctgagctgagcacgtggtgcaggtcctcatcacttgtggtgagaatgcaggtaagagaaggaagaattcagccccagggagtcggggtggtgggggcgcttcagagaggagggcagcgtttgaactgggacttagagaggaggggcattggccaggcatagtaggaggagatgcagttccgtggacaggaggaaatacacatgcagagagagtggggagggcagggcaggacggggcaggatcggggaccgcgaggagctccatgtgctgggggtcctgcctgtgccaaggagcatggctctcacatagttgcagctggattatgaaggtccatgtgccatatgaaggggtttagtacaaaacttctaggtaagaatttaaggccaggtgtggtggcttatgcctgtaatcccaacactttgggaggccgaggcaggtggctcacctgaggtcgggagtttgagaccagcctgaccaacatggagaaaccctgtctctactaaaactacaaaattagctgggtgtggtggtgggtgcctgcaatctcagctactcaggaggctgaggcaagagaattgcttaaacccgggaggcggaggttgcggtgagccaagattgcaccgttgcactccagcctgggcaacaagagtgaaactctgtctcaaaaaaaaaaaaaaaaattctttttttttactggttttgcaaatataaagatttgggagattgcgtctggggatccttttaactgtcttatctcccttttttgaggcattctcaatacactgactaaaaccagtacagatgaaaatcttttcatttaaaagagcacagtcatggttgacagactcctagatgtaatctccacccctaaaaattaatctttagttctaaatgtcacactgatatcaatctttgaaatgaagactggcggtaatgccattaaaattgcagctctttagcttggcaatccaacatcaataaaatccaggtcacggggttagctatagatgtatacggtatgcacccattcactctctctgtcttccttttctcatgagtctgtgagggtttgaaaaagacacactgctcatgaggagcattttgaagagcgattttccatttcggaattagacatcctggttgccaggccctgggactgacctggcacaaccaccggccctacagggtccttgacagaaaaggtacattgtatagtcgccgcatgttgcttggtttttgtttctattgtagggacaataggttgccatatttttctttttcctggttgaaatgatgtggaagtatttttaaggcatgccattttctctctcaatttcagatatttcattcctaagaatcgtcatgtggaaggctctcttctttataacaagaataggaccttccacatgaccctaatacacacacgtcagcttcactaattccatacaaatggaaaaccaaaaggtaggataatagtagcatctacatctcccttcaccacccctaaggacagtgatctctataccttgacttgtgtaattagccttggctcagcactgcaaggctaaagttaagggagagaattaatgacataaatggtctctctgcattctgagatgctatattcttttaaaaatgtaaagatcattgaatatgaaataaattatcattaggtaggtttgtgaaatgatgtatgtctaagaccaaatagcttggctttgctcttttcttgggggcttcacatgtttctgccattcctgttgcatggggtgaaagctcggtgcccatttcatgtgctctcccctttacctttgttccctgatggtattctgctctcatccctgctctcttcaacctctgcagggtgttcagtcttaacagcatcttgaaatgagtcatctatgcattaattcaacagttcaattcctaactgtgcaaagagcgcagtcagcataaacaatgaccgtgcactcttaaatcattcctcataacgatcttgctttggtcaagaatttaatgcctggacttgtcaatattcatggtacgagatgtccatcgtgctggggagaaaaaaagtgtaagcatcaccagtcgttgcttccatcttagttagaaggtcattttattgtatggaagtcaacaagcttatatttctgtagcattgaagcaccgttcatccagatgcctactgccagtttacagacttggtggtgtatacttttcctatgttgggtgtaggacctgtcatacatggtgggcatctaataagttggtttcgtaccataggacaacgatgaagaaaccgtacttggtgatttcacttgcttatgttggaaacctgctctgttttcttttggttagaatgaaccagtattttccatgctgtcttttgttaatgtaaactcagtttttcaggtgggaaaccatatcttctattttgtttttctctagggttttgcacagagtctcctaaaaaagatgtctcatcgaagttctattcctggctgtggagtgacttttgaaattgtctccaatattccagaggtgaaggatatacaatttaaatttactaaaaataaacacttaaaaagagccaactccctgaaaagtgacctacccatgacatacatatgaagtgaaagtgtatgtttagggaagctatagatttttagaggaattttctaatatcaattcatagtaaaatgtacttgtggctttaaaagttctagttttagtattttgttgaagaactttcttttgaaaagcaaatcaacaccttcttacgcagaaggtgacagaagagaaacatattgtacccaggaagggaggcagcgtagcatagagattccagttggatcctgaagtcaaacagaaatcttgtttctgtcacttattagcagagtgaacttgcgtaaattactctgagcccatattttttttttcttgtcaaatggggttagtaatatctttgcacaaagtgtttttaaggatcaaatgagacaatgtgtaccaattgttgtgcgtgtgctagagaacatgttattgctactatcgttgttactatgattattattttattagtactattattatttctctttctgaactaattgagatattcagaggattcagagaagcagagcttaaatttatccctggtacaagcttgatggaagatgtggcttatctgtacttcctgataggtgattcgtgaattagacatgtattcattcacccaggtgccagcacagctgggaaatggggcatcccttgcagggccaggagaagtgagggtcctaagggaaggactctgtgaaaagagaaaattccttctcccaccctcaccctcaaagaggggatgtgggcaagggggtggagatttcacttcctcggggttggagaagtgggggtgtgagacatcagaagacgcccctcataccatgccatcaacaccagcaccagttcccgtcatttcagggcttaggatttgcccactgacactgttgagtatttgaacaataggtgaacagtgtatattttaatacagaaatcagcttttttttttttttttttttgagactgagtctcgctctgtcaccaggttggagtgcagtggtgtgatcttggctcactgcaacctccgactcccgggttcaagtgattctcctgcctcagcctccctagtagctgggattacaggcacgtgccaccacgcccagctaatttttgtattttaagtagagacgggatttcaccacgttggccaggatgctctcagtctcctgacctcgtgatccgcccgtgctgggattacaggcgtgagccactatgcctggccggagatcagcttttggaaaagaaaaatattacatggtacttaggctttcttttagatatcttgtgttgcaaaatgcttttgcctctcaagtcatgttggatagtaactagttctttcctggatctttgaagtgttagacttgcatagtaaatattaaccatctaattatttaatttggagtttgcagaacatttaaaaattaagcctgtttgcagagttagtcgttgcacggtcttgggcctgtaatagattgctctgtgtgcttcattcactcttgtttgtaagatttaaaacaagtatacatctatgtctagctagagacttactgtttactctgtgtatctaaacattttctatattttccagttgtttcagatcttgtctctgtaaatcgcttgaatgcagttgagaaacggtgatggctgtaggaaactgctttcatttcttccttttctctctccatttcccctcccttttccttctctcccacttagtttcttatgccttttaaaaaaagtgcttttattctccaggcgatagggttttaaaaggaaagaaatataggggggatcagcttgaagataaacataacctcatgtgaatttgctgttagttagctaaacatccaagctggcaaacattgtttccacattatcaaatcctgatgataaaggcaaaatgaaacataaagctgattgtgtaaagactagatctaaaaacaaaataaaaagatcccttaataggcaagtttcatcatgaaaaagccccaaaagttgcttgggttctgtatcacagaagccattagggcatcatggccaaaagaagtggcccaggccagagacaatttctttctccttataaaattaggataatatctgttccctccagaccctgaaagtattctgtgttggggtgaaaagaataccctaccaggagacgggagacctaagttctagttttgactcttgctaattgtgtggtcttcctcttgtcatctaggaaatgaggatgattccttcttttcatggttattacgaggctcagatgaattactgtacaagacaaaagtttttgtgaacttaagccgtcttacaaatcctcccacattttatctgttctaagactcatttaaatttttaaaagtatctttgaagtagaatgtgtcttataattgatggtatcttaaaattaacagagtttgttttcccctcaatcttgtttaaaatattttgtcttacagttgatggcatttaagatgcagtggcatatggttatacattttgtagttttggcattattataagaaatttacaagtgaataaagtatctgatttttcctgagaacagtaatttgttaagagcccactttgcttgaaataactaaatacattaataaagcctctttctgactgtgcacctcccatttgtatgcacagccagctcacatcccaggattggggatgggctataccagaaagctcagtgtaggagaacttacctagataacctctccttggtcggctccaggcctttggccactgccactcgagcagaagattgaaccaattctagaagctgccatgttctgaatatgtcagctaccctgggctgcttggtggcaggcgctgaaaccctatgtccactatcttctcccttccgggcctcctccctgggaggcagtttgattcctacgctgtgtagcagtcaccccagcccctcttccctttctctgtccctcaggagttccagggcgggggtaatgttcctgaattgtttttacggtggttacatttctggctagtcgacaaaatcctttctaaccagtcatgggttttttgtagtgggaatgtagtagagaacagttttgttgagaatgcgctgtgtttcagctgtgctgtgtttaaattaaccagcctttcaagtggacctagtcacctaatcaccttttcattatttccttggaaaaatgctttggcgttccaaagctgactttaaaatggaattttagaatacgttctgtgtgtctgtgtgtgcacgcgtgtacgtgtgtgtgtgtacatcaagaagcttttataatgtataactttccactgctcaggatgcccagggagtggaagaacgggaagcattagcaagaatggcagccaatgttgaaaacccagcttctgctgactcggaggcttatattgaaaagtacctcaggagcgtgctggctgtagaaaacctcctgactttagatcgtctgcgccaggttagccaaccgcatggatagggcgggcagcagaggccctgatgcaggctgagtctgtgtttgactctgtaattcacagtgttgttgcacctaacatttgaagagttcactctaatgaactttgaataatccagagtgattgtaattgggtcattctgtcttacaaagtaacagcctttatttaattttaaaagtctgtttatgggtacatagtagatgtatgtatttatggagctcatgtgctgttttgatacaggcatgcagtacgtaataatcacgtaacagcattgtttaaatagctaggaatgtctgtatagatgggggttgcaagtctgctgtacatggtgttgcttttgcagtgtgtctcttacatgtctttttcctctgtatgttttctgattcacaggaagttgcagtgaaggaacagttaacaggaaaaggaaagttgagcaggaggagtatcagttctccaaatgtgaacagagtgagtgtgtggaaccaagctctgtgctgtgcctgggacttctctcctctcctcttttcttgggtaactcttctccacccgtcaaaccccatctccgaaacccttcccttgccaggactgatgtcagggcccctggtctccaccccactgggtctgtgcacctctgcccctgttcctactaatattataggggaagtagcagttaagtacctttcaggtgtttcttatcttccgatcaccactgcctagcatagactgaggtgttcagtgaatgtttgtggaactaaacccaaactagccacgggcctatggcaagccaatgccattttctgggcttagattatttttaagttgaggaggagtctggaccaggttcacaaaccagttgttcacaagacagccagggtggtgtccatgcgtcagatacatggggttgtttcataacagtggcttcagtttattgttgtttttaaaaacctatatataatttatgtgcatattgaacatgggaataatccttcacaaagaaataggctcttggccgcttgattactcttttcctcatttttgatgaagatgtggatatgaaaaatgatactttcctcctaacttcacaccaagagaagttacagcacaagcattgtgagaaagggcagctgaccttggccttagtgtctgagagagaagagagagtgataggaggagtttcacgctggatgccaccaaccatctcagacatttaggaagatcactttaactcaaggcggataacgtctcatttattcagaaaatgatatattaaaatacactgacatatgcagagattcagtgtttgggatctgatagtttaaatagtttgtgagtttatttacagttgctacagataccaagagaaaggaatcataagctcaggccatggttagataacaagtaacctggtatctttcacacagaagggctcacccaacgcgacatctcttgttcaggtccagccggttgtgacctcagtgtgaactgaatatccagatcttatagaaatctctcatctgaaaattgttcataaccaattcaatgtttgtaatgtcccaaagaccactagtgtgcagccttcgtcatgacaacctctctgctgccacccaactttgacgttcggttgactgggttggcaaagactggcgttgcctagaccacgtgtatgctctgatgcataaataactaacccccctttctttcttcttcagttgtctggaagccgacaagatctcattccatcatacagtctaggcagcaacaaggtaggtgttttaactatttctatcagtgttttaagtcccatttcccattcagctttcatcttctcaaatctcaggttatttttgcaagccagaatttcctctactcatctgtattatgtgaaacttacttgaaagtgttttagagttcatttcttttaatttgccaattaaaataaggtttattagactctgactactggggttgaaaaacaatttttctgctaaagctcgtacttctgtctaaatttccttcctatttctgtcagaaaagaaacttcaggctgggcgcagtggctcacgtatgtaatcccagcactttgggaggccaaggagggcggatcacgaggtcaggagatcgagaccatcctggctaacatggtgaaacccgtctctactaaaaatacaaaaaattagccgggcgtaggtggcacaagcctgtaatcccagctactcaggaagctgaggcaggagaaccgcttgaaccggggaggtggaggttgcagtgagccgagatcacaccactgcactccagcctgggtgacagatcaagactctgtctcaaaaaataaataaataaataaataaattagaaaatatttttagtgcagaaaaacactgctaccatcctaacaccaggagaacagagcatccacatggcaccgtgagctgcagggatgagaggtgaggagtatggtgaagcacgcctattattgtcataaacatgagactatgacacacaaatcagtccgtctgcaaccaggnnnnnnnnnnnnnnnnnnnnnnnnnnnnnnnnnnnnnnnnnnnnnnnnnnnnnnnnnnnnnnnnnnnnnnnnnnnnnnnnnnnnnnnnnnnnnnnnnnnnnnnnnnnnnnnnnnnnnnnnnnnnnnnnnnnnnnnnnnnnnnnnnnnnnnnnnnnnnnnnnnnnnnnnnnnnnnnnnnnnnnnnnnnnnnnnnnnnnnnnnnnnnnnnnnnnnnnnnnnnnnnnnnnnnnnnnnnnnnnnnnnnnnnnnnnnnnnnnnnnnnnnnnnnnnnnnnnnnnnnnnnnnnnnnnnnnnnnnnnnnnnnnnnnnnnnnnnnnnnnnnnnnnnnnnnnnnnnnnnnnnnnnnnnnnnnnnnnnnnnnnnnnnnnnnnnnnnnnnnnnnnnnnnnnnnnnnnnnnnnnnnnnnnnnnnnnnnnnnnnnnnnnnnnnnnnnnnnnnnnnnnnnnnnnnnnnnnnnnnnnnnnnnnnnnnnnnnnnnnnnnnnnnnnnnnnnnnnnnnnnnnnnnnnnnnnnnnnnnnnnnnnnnnnnnnnnnnnnnnnnnnnnnnnnnnnnnnnnnnnnnnnnnnnnnnnnnnnnnnnnnnnnnnnnnnnnnnnnnnnnnnnnnnnnnnnnnnnnnnnnnnnnnnnnnnnnnnnnnnnnnnnnnnnnnnnnnnnnnnnnnnnnnnnnnnnnnnnnnnnnnnnnnnnnnnnnnnnnnnnnnnnnnnnnnnnnnnnnnnnnnnnnnnnnnnnnnnnnnnnnnnnnnnnnnnnnnnnnnnnnnnnnnnnnnnnnnnnnnnnnnnnnnnnnnnnnnnnnnnnnnnnnnnnnnnnnnnnnnnnnnnnnnnnnnnnnnnnnnnnnnnnnnnnnnnnnnnnnnnnnnnnnnnnnnnnnnnnnnnnnnnnnnnnnnnnnnnnnnnnnnnnnnnnnnnnnnnnnnnnnnnnnnnnnnnnnnnnnnnnnnnnnnnnnnnnnnnnnnnnnnnnnnnnnnnnnnnnnnnnnnnnnnnnnnnnnnnnnnnnnnnnnnnnnnnnnnnnnnnnnnnnnnnnnnnnnnnnnnnnnnnnnnnnnnnnnnnnnnnnnnnnnnnnnnnnnnnnnnnnnnnnnnnnnnnnnnnnnnnnnnnnnnnnnnnnnnnnnnnnnnnnnnnnnnnnnnnnnnnnnnnnnnnnnnnnnnnnnnnnnnnnnnnnnnnnnnnnnnnnnnnnnnnnnnnnnnnnnnnnnnnnnnnnnnnnnnnnnnnnnnnnnnnnnnnnnnnnnnnnnnnnnnnnnnnnnnnnnnnnnnnnnnnnnnnnnnnnnnnnnnnnnnnnnnnnnnnnnnnnnnnnnnnnnnnnnnnnnnnnnnnnnnnnnnnnnnnnnnnnnnnnnnnnnnnnnnnnnnnnnnnnnnnnnnnnnnnnnnnnnnnnnnnnnnnnnnnnnnnnnnnnnnnnnnnnnnnnnnnnnnnnnnnnnnnnnnnnnnnnnnnnnnnnnnnnnnnnnnnnnnnnnnnnnnnnnnnnnnnnnnnnnnnnnnnnnnnnnnnnnnnnnnnnnnnnnnnnnnnnnnnnnnnnnnnnnnnnnnnnnnnnnnnnnnnnnnnnnnnnnnnnnnnnnnnnnnnnnnnnnnnnnnnnnnnnnnnnnnnnnnnnnnnnnnnnnnnnnnnnnnnnnnnnnnnnnnnnnnnnnnnnnnnnnnnnnnnnnnnnnnnnnnnnnnnnnnnnnnnnnnnnnnnnnnnnnnnnnnnnnnnnnnnnnnnnnnnnnnnnnnnnnnnnnnnnnnnnnnnnnnnnnnnnnnnnnnnnnnnnnnnnnnnnnnnnnnnnnnnnnnnnnnnnnnnnnnnnnnnnnnnnnnnnnnnnnnnnnnnnnnnnnnnnnnnnnnnnnnnnnnnnnnnnnnnnnnnnnnnnnnnnnnnnnnnnnnnnnnnnnnnnnnnnnnnnnnnnnnnnnnnnnnnnnnnnnnnnnnnnnnnnnnnnnnnnnnnnnnnnnnnnnnnnnnnnnnnnnnnnnnnnnnnnnnnnnnnnnnnnnnnnnnnnnnnnnnnnnnnnnnnnnnnnnnnnnnnnnnnnnnnnnnnnnnnnnnnnnnnnnnnnnnnnnnnnnnnnnnnnnnnnnnnnnnnnnnnnnnnnnnnnnnnnnnnnnnnnnnnnnnnnnnnnnnnnnnnnnnnnnnnnnnnnnnnnnnnnnnnnnnnnnnnnnnnnnnnnnnnnnnnnnnnnnnnnnnnnnnnnnnnnnnnnnnnnnnnnnnnnnnnnnnnnnnnnnnnnnnnnnngctgggtgtggtgccaggcgcctgtaatcccagctactcggaaggctgaggcaggagaatttcttgaacccgggaggcggaagttgcagtgagccaagatcgtgccactgcactccagcctgggcgacagagcgagactctgtctcaaaaaaaaaaaaaaaaaaaaaaaaaaaaccaaacaaactctgcccagtttccttattttaaatggatacaataacagaaaataatagaatctacttcaaagaaaagtactgtccctcacgtgcaccagaaaaataggacaaaggagcagagatgctattagaacccagccagggcatggcagagggcatggaccccccactggcttcacacaggactcacaggaggctgcagggcagaggccattcttaagcctccccctgaaggatgacactgaggtccacacaggcaggaaaggagctgaaggaacactgtgagcagaaggatctgtgtgaacgaaggcttggggatgaaccaggttgctgtgttcttgacagtacatgcagtgggagtcaagctcagagtgtacaggccgggcgcggtggctcatgcttgtaatctcagtagtttgggaggtccaggtgggaggatggcttgagcccagcagtttgagaccagcctgggcaacatagggagtccctttctctgcaaaaaaaaatttaaaaaattagcgaggcaatatggcttatgcttgtaatcccagctattcgaggctgaggcaggggaggatcacttgagcccgggagtttgaggccacagtgaactatgattgcaccattgcactccagcctgggtgacagagagagaccctgtcttccaaaaaaaaaaaggaaaaaaaaccatcctggctaacacagtgaaaccccatctctactaaaaatacagaaaattagccgggcgaggtggtgggcacctgtagtcccagctactcgggaggctgaggcaagagaatggcgtgaaccacggggggcggagcctgcagtgagccgagatcgcgccactgcactccagcctgggcgacagcgagactctgtctcaaaaaaaataaaaaataaaaaaaagaaaaagtagagggagtctgtgggcagaacccagagaggcggggccttatttttggcatcttgacgtcatgtcccaaggaatggcaggggagttggacaccatggaaggacttgaaaacagagcagtaatatgaccacatgtgaattaaaaagtttgttttaatggtccagctgagccccaccccgtccctagctgtggtgtgtaattttgcattaggaaactatatggtacaaatgtatgcagttatcaatgcaaacgtggggaaaaatggttttgagttggagagtggagggaccggttaggggagaaatagccagagagatgacgagagacacagatgggttggagaggggtactctagaatcctgcagaggccaagtatgtgacgggctggagtgaggggacttgggtgacatcgggttttggacagcagtgtataggtccgagagatgaactatagggcaggcttggggaggaaatgattcagttccattttcgagggtctcaggtgtccgagttgaagccaggtttgggagcccgaggggatagtggggacagtgtggggcggggttggctggggagcgccgaggcagtggtgacacttagggccactgaggtgcactgaggtggcggcgccagggaggaatgaagacagggccaagggagtctcagaagtccaggggaggagtgttttaggaaggactccatccacatgcttcggagacagcatggggtgaggatggggggagaccatttcaggtgcaacgctgcagggctcattgtgtgcctgtgcaaggtgccttccgtgcagggctggggattagcaagacaaatcgtattaggcaagtaactgtgatgtctcacagttgtgttaacgcttctggaccttcctacttttcgttcttggttccttggggtccccgagtaacttagtgaggacgtgggaggcgagaggaaagtggttcggttctaaagaggaactcatagtttggtctaataatacttggaatgaggccagcctgctttccattcctctatttgtcgatgcccctacatatgaaaagtggaattgtttttgctgaactccaccaagattgaattgatgaactaattaatcttaaaaaatagttttgttaactattccaaatgcgaaattcaccatagggcctaaaataaatcactcttgggataagtctttcaattaaaaatataaaatatgatccctgatggaagtagtgtttctatttattgctatcgtgtgtttcatcattattgtacagatattttctctaggtataatgaaaccttagcaggctttttatgactgtctgccaagaccggctgaagttgaggtgcaggatgaatttcggcgtgtcgttggtctttccaccctggagtcagctgtgcattgaggtcttttgcaatgtgacaaatgctgtcaagacaaaatcattttttttgttattgttgttttacttgtttttttttttttttttgagacagagtctcactctttcgcccaggccggactgcagtggcgctatctcggctcactgcaagctccgcctcctgggttcaagccgttctcctgcctcagcctcccgagtagctgggactacaggcgcccgccaccgtgcctggctaattttttgtatttttagtagagacggggtttcatcatgttagccaggatggtctcgatctcctgacctcgtgatctgcctgccttggcttcccaaagtgctgggattacgggcgtgagccaccgcacctggccgacaaaatcatttttatttccaaagttattttaggagaaattttatttttaagaagtcaataaggttgtatgtttgtcatcttttgattggagtttttgaggaaattaagattagtcaatagcatgaacaaatacccagttagcagaattgaattttgtgttggctccatcgccttcctgaaagccgtgatggtttcacgcagccctgggaggagatgccaagcatgagtcactcctcttccagctgcagtgaaagctaccattggacccgaaatgtcactggcacttctcgttatttacctttttgtcactttcctgatcaaaaccagactcattcccagaaaacccaaagaatccgtatctggcagaggagcaggagtgggaaaaactgcatgggtccctggggaccaagtcaggccctccccggagcctccggcgttcttactttgtccactttgcccctgagcatggtgctgcctaccagtgacttcagtatcgactaggattttatctctttgagtctgccggtgaggacaaatgtgccctaatggcagtaaagctgggtaaggatccaaaacaaagccagcttccctctgtgtaactgtatcatggctgattctgaagtgtggtagacatgcaggatgttggagacagatcagagatttatctttttcgatttcaggtggaggggtgtagattactggaggagaagtaaaacagggatatcatactctttcacgtttagacctgagctattgagagagccagaggtttcctgcgaagtcctttttagtccatggtcctgagttcatctccctgtgaagtacattgaactgggttgcttcatttttctttttttttttttcttttttaatctaccccaacattttagtaaagggaggataactctaggacagctaagcatatacaacatattgggaagatagtcattgcgttgtccctggggaacagtgtgtgtagccggaccctgaaccacacttttcacctctgtcaagaggatggaggttgtagtgcaggagaaaaatcgagtgagtaattccagtggagtgtttccgcagagattcgtaggcgtcagctggaggagggaagcgcgtggtacccagtttagcatctgcattggttgctccctctgaagcagagcctgttccatcccagcgcgatttgaggtccctgtctcaggacagtgggatcagaataggtggggttgcggggggagcatgtgaggttcctcaaggttaagatgactgttcaggtagagggcagagtgagccgtgtctctgtttgtcacgctctgcagggctggcaggatctacgcattgtgtatctttcagtgttctcactttcagtatttgagtaaatgagatggagttactgctctgttctgattgggtagtgcctgctgggaagaactgcccctgaagccatcggggcctgggtgtgccttggggaagaggtggcacctccataatttgtcgttggcccaattctacgtcaagcagcccaggtgccgactccagatcagcggcttagttttcctgagggacagaccgcagccatatcagctaccaaacaaagaaaatctaaaatatgaaacaatactctcaaattaagtaagttgtcttcagaacagccatgtgtgagctcgccactgtacacaaagcaggtggcttttcttcctctgagaaactccatggagggctgatcttagtgttcagtcacctgatggtgatatccccgggtatacaaggccgcagcttcccagacagatcatgaaatttgaatgcaaaaattaacaaaacattcaagtatgtaaatcagcgtatgattcatggggatgccagcgctcctccgctgaagtatttcagagcttacgttctcgatgatcacgtgttgctctctcccttgttctccttgcttcctaatcaatcctgaccatcacaccatttttaaaaaggataccaagtgctgagagagttcctagggaaaagtggcattctctgaggtgcgcaggacccagatcacttagggcttattgatttttatgattagtacttaggtcgctgctaaaagcagatgggtttccaatacatttctgaaacctaagaggcccttcctccacaatccatcttcaagagcagtggagaactcactgtccccatttcgctgatcaggcaattagtaaagaaaacttgccaggcgcgttggctcacgcctgtaatctcagcactttgggaggccgaggcgggcggatcacctgaggtcaggagttcgagaccagtctgaccaacatggaggaaacaccccctccatctctactaaaaatacaaaattagccgggcatggtggcgcatgcctgtaatccgaactactcaggagtctaaggcaggagaatcgcttgaacccaggaggtggaggttgcggtgagccgagattgcgccaatgaaactcagtctcaaaaaaaaaaaacctcgagttaatcattaggattattcatctgtgcagcactagctcaaactcatattgcacacgattattaaactccagtggtaaagaagtcagtgattatcaggggatcaaagggaacttaaagcatttaaaagatttacatctcatctcttatcagttttagtacaagcaacatttggggtttatttcttccctagatagggctgaagttaaaagtgctttgatggtatcactatttttatggctcaccatgaattttggaatggtcttttaatctatcaactgatgaaatgtctttaatgggaatttacaaataagttgagaatacaataaaatttgataattcagagacttccatcattgagaatttgtaattatttgacttgggtttgactgtaatttatctttaatatctatttaaaatgagagatttggtaatatttactgttatgcactatatgtgagtcagtggaaacacagtctgggagtagagagaagagacaccctctgactatagagttgttcgtgggtttctgtggagaactgagtgaaaaagggtatcttgaggcaaaagagcagaagtggtctcaaagcagaaccgaagggagaattgcagaaggaatacgtctgtattctgtgggaggcaacaggatgcagagtagaaaacatgttaggacagagcttaatgggagactgtaaactgcagtatggaggggctgtccaaatgtgtgtgggggggtatgattattattgttggagaaattaataaaataagcaggatgacaagtagaagaaaagtgctgatcgggcatggtggctcacacctgtaatgccagtactttgggagaccaaggaaggaggattgcttgatgctgggagtttgagtatgggcaacatagtgacatcccgtctctacaaaagtagtaaaaagattagcctcatgtggtggcatgtagctgcagtccccactgctatggaggctgaggcgggagaattgcttgagtctaagagttagaggttacatgcgctatgatggcgcacccctgcactccagcctgggtgacagaaactctgtctcttaaaatagaaaaaaaaagtgctgatgtaatcaagcttatattcaaaggagctttagtaatatataacagttttttttcttgagtatctgtaatttttttttgtttggttaattgaataacttgaaacaaaattgccaattttgtctttactagggccggtgggaaagtcagcaggatgtatcccaaaccacagtttccagaggaatagctcctgcccccgccctctctgtttctccccaaaataaccattctccagatccaggtaagttatcttttcacttgtcaattactgtcagaaatctgagcatctttcagaaagtttaaattagaatttcctgccaggcagccactgttctgctagataatgtccatcgagttgtttcatttctcctcttaacaggttgagttccattggctctggaatgttggattgatcttgcattgctctgatatataccgcctgatcatgatgtgttagccgtacattgctggaatctctttgcacctcttttttaaggacttttgtgtatgtgctctatagtaaatatctgtaatgttttatcttctcatcttcatgtctttgttaggttttgttatgattgcattggcttcataaaacgacttgggaaatgtttctcctcattttttttttctgggagagtttatgtaagattagtattacctcttccttaaatgtttcatgaaattccgtagttacatgatccgggcctggaatcctctttgtggggagattttaaattatgacttgagtttctttttttttttttttttgagacagagtcttgctctgtcacccaggctggagtccagtagtgcaatctcggctcactgcaacctgcccctcccaggttcaagtgattctcctgcctcagccccccaagtagctgggattacaggcgcccaccaccacgcctggctaatttttgcatttttagtagagatggggtttcaccacgttggccaggctggtctcaaactcctgatcttaggtgatctgtctgcctcagcctcccaaagtgctgggattacaggcgtgagctactgcacccggcaagtttatttagtatgggaatatttagatctttgtgtctccttttgagtcacctatcataggttatatttttttcaaggagtttcttagtttatctagattattaagtttattttcataaacatcacttacttttttttttttttttttttgagatggagtctgactctgtcgcccaggctggagtgcagtggtgcgatctcggctcactgcaacctttgcctcctgggttcaagtgattctcctgcttcagcctcctaagtagctgggactgcaggcacgtgccaccatgccaagctaattttttgtatttttagtagagacggagtttcaccatgttagccaggttggtctctatctcctgaccttgtgatctgccggccttggcctcccaaagtgctgggattacaggcatgagccatcgcacctggccactttaccttattttttaaatacttataggatctcttgtgatgttccttctttttattctgatactgataatttgtattatctgttttgaatacttttctgacaggtttatcatatatattaatctcagaaccagtttttggctttttctattgcaattgattttttaaatttttctgcatttcacatattttggtatgttgtgctttcattttcattctattcagagtattttaaaatttccctctgattgcttctttgatccatgacttatcaactagcattaattcttttttatttttgggggtaatctggtatccagattgtgttctatcttggttaatattctatgtgcactattgtgtatggggacatgatgttctatgtatatctaattaggtcactgtggtttattgccttgttcaaatcctctggatctttgctgatttggtggaggcctattccatcagttcttgagagggcattagatatccaaatataattgtgaaaattatctgtgtttccctttataccagtttttacttcattcatttagaagctctgataattagcttctaattatttaagattgttatatcttcctgatataacacatttaagattgttatatcttcctgatagagtggcctatcatgaaatgtcccttttgtctctgggaatactcttaccttgaaatctctcttacctatcatttatatataactgcatcaaatttatttactgtttgcacgatgtatctttttcttggcttttaaaattttagcctgtgtttgtctttaaattaaaagcgattgccttgtagacaacatttggttgggtccagttatttccccctgaatctcatctcgtagttcctacccttcaatcggcatgcttcacgaacccttccattgcctcccattctggtccgccatatttttattggttttctgcttggccattctgttttttgtttcactgtaactccttatttaccttcttttgggttaataaacaaaaattagtatctcattttatttcctctttttgcttttttggacacctgtatttgtttgctaaagtctttgctcagaaaccctacttggcatccttaacttatcaaatcgcttagagttcatatgacgtcacccctcacctcacaaatacaggaaccatgcaacagtgtaagtcattgacctgttcctctgggcccctcattttgtactgttgtttcatcttctacatatataggtattcacacctcactttatgacgttattctttttgctttaaaatagccacctgtaggccgggtgcggtagctcccacctgtagccctagcactttgggaggcctaggtgtgggttagttgagaccagcctgggcaacatggcaaaaccccatctccacaaaaaaatacaaaaatcagctgagcgtggtggtacacacttgtagtccctctactcaggaggctgaagtgggagaattacctgaacctgggaggttgaggctgcagtgaggcacaattgcatcactgtactcaggtctaggcgacagagtgagatcctttctcaaaaaaaaaaaaaaaaaaaaaaagaaaagcttgggctgggtgcagtcgttacgcctgtaatcccagcactttgggaggccaaggcaggggggatcacctgaggtcaggagttcaagaccagcctggccaacatggggaaacccctgtctctactaaaaacacaaaaattagccaggtgtggtggcaggtacctgtagtcccagctcctccggaggctgaggcaggagaatcacttgaacctgggaggcagaggctgcagtgagccaagatcacgccatcgcactccagtctgggtgacagagtgagactctgtcttaaaaaaaaaaaaacaaaaaacaaaaaaaaacactacttgtcttttgagagaatacagaaaaaatggataatcttttatgttttgttttttgtttcgttttgttttgtttttttcagattatttctggcagtatccagtctttcctgaaggtcttattttaatctgattttatttctttttagcctgaagaatattctgtagttttgttttgttttgttttgtttttttgagatgaagttttgctcttgtcgcccaggctggagtgcagtggcctgatgttggctcaccacaacctctgcctcccgggtttaagtgattctcctgcctcagcctcccaagtagctgggattacaggcatgtgccaccacgcctggccaatttttgtatttttagtagagatggggtttctccatgttggtcaggctggtctcgaactccaggcctcaggtgatccacccgcctcggcctcccaaagtgctgggattacaggcgtgagccaccgcacccagcctagtatttcttaagagtacagtcctcctggagaaaaatgctctccttttttgaaagtatctttatttcactgttttgttttgttgttgttttaagaatattttcactggatagagaactctgagttggaggttttttcttttagcacttcaaagatgtttcctcatctccagctccttcttttctgctgagaattcagccatcatttgtcacctcccactcagtgtggtatctttgtttggttcacctactttcagaagtttctctttatctttgtggtaactgtactatgatttgcttagttatcattttcttagtatttaacttgcttatcaagttattggatccgtaaattgatgtttttcagcaatcgtgagaaatgtttagacattattcattaaaacttttcccccatccttttctctctgctctttctgagaatctaattactcataggttagattgtttaatattgtcctacaggtcacagaggctctgttcttttttttttttttaatctttttattttttctagttggataatttttttctgtgatttccagggctctgttaagcacatccagggaattttttcatttcagtcattgtttttttttcagttctagaatttccatttgctgctgcttttctagttttaatttctccgctgatgttcctggtctgtgcacttgtcaagactgtattctcctttgcatctttggacttggttaagaaagctgccttaaagtcgttgtctgttaaatccagtatctagacatctcatggtctatttttattgattcctttgttgaccgtgggtcatatttaatgttttaccaaatgtatttgtatatatccatgtgattcataccccagtcaaaatataggacattgacatgactccagttaattcccattccctgtggtcagccagtgttctgacgactacttctctagattacttctgcagtttcataaatggggccatatgatgtatgtcctttttgtgtctgtctcttttgcttaccatacgtgttaaattttcccagattgttgattgcattagtcatttattttttattggtgagaaatacttcacgaccatgcattgtgtttgttgaagaaactaggttcttgtagagtagactggcacagtaggccaggttcttgcacagcagattctgttcattcttacttttcctgttgtgttcccgtgagactgttgaaacgcaattctgtcccctgtattgcctgtgaactggtaggtagagctagatccttgattcgattcagctgatttgagaaggatgcatgtggtagggtgggtgggtgtggatgtgtggtcgggaggttggagacacataatgtctgatggtctcatttagtgatatgtgcggcctttgattcattactggctagatttttacttaatgagggattgtccttactctagaatgttagtttaatttgatacagaactctagattgtaatttttttcctcatctttgaaataattgtatatttttggatctttattcatcttaaccctattttattttctgtctcctctcttatttttctcatccttgtttttgccttgctgtaaataattggacttttctaaactgaggtatgatgtatctctcggctcggtatagccatctctttgcttttttatttttcagtggtcgccctcatgattacaatgtacatctttaactttttgccgtatacttacacttaatattctactgctttatgtaaaatgtagaaaccttacagctgtatccatccatttaccaactgaattgccagtaagtttggaatcctttcagggttagtgtggagaagagatctggggggagttgtgtgcatctgttgaggcaaatgtattccttaaggtgacttgcttgttcatttctaaatgttgtgtgaatacggctttttatcacttatgacttgggattagattttactataaattaatagggggaagaagtcttagtatatcataagtatacctgtctgtacctctgatcccagtctttggaaattaacagcaggtaagaacgtaagttgttcagggcgtctctccctgacttttaacaaacaactcaaacactaccctttacccttttcccaaaaggtcagtttcatcatcttccttcagtagttatgaaaaattagattgaataagacatagtccctgacttcaaagagcttaaagtctagacaaagagctatacatctgtgtcattggcagtgtgacttaaaaaccaatcccattttattctagggcagaagtgaatgcttgtgccaattagtgacaggatagaggtgaattactgttctgatgctgataggaacactgcatactagagcattttggcagcaccccagttactgctatttaattgaaaaagagacattactatgtttgagggaaattatgtaaactacaataatactgtgtttctctaatattttttaaggatacctttggtttttgttagatttgctgacaagtgatgtctgtcaaatgtacaggaaagaagatgtctatgtaattgtatttgttttatctttttcccctgtaatatgggcaggactcagtaaccttgcagcatcctacttgaatcctgtcaaatccttcgtgccgcaaatgccaaagctcctcaagtctctctttcccgtccgcgatgagaagaggggcaagcggccgtctcccctcgcacaccaggtaaaaagcaccgagaaaacagctgtgaacgtttttctaataaagcggtgctctgtgttgcgccaaagctggaggtggaggtgcggcctctgggttggggctaaactgggtttttaaacccagaaacagctgtcggtcttttctccgccactctcttcagagataacagagctgtttaaacttacggacacactccttcctttctgcttttaagaagtgccaaggacactgctaatgtgatgtatggtaataacacttagagcagcggtagtaaaatttatgaagtgcacttagcattgtttgtgtattgccaagtagaaaatgtaattctatttttattttttgatttcatttgttttttcaaacaattttatatcatgagtgcccttccctctcaacctctgttttctctgctgtggataacctgttctttcactgaaaagtgatcacctgtcttatatccttttctcttaaaactctttacccagctctagggtaagtgttagagcaaatgcgaaaaggttttccaaacaatcaggaagctgctcttatgcaatagtgaatgggaaccccattggaaatgcaatttccagcgttatataggtgttaactcagcagaaaatgataaatgaggatttatttatactcattcaaaaacacatacagggcaagttctgttgtccaaataggtcttttgacatcagcttcttcacgttcttctaaacattcaagttgcagtaatccaggtgaatcgtctgagacttaactaaagaattttctaagtgtatgaatgcatattcaggggagaaggaattagttttatcaggctgccatgcagatatgtaatttttaaaaatctagctttatataagcatataaataagcatacacatacagtagatgaaacaattaaaaccaagattttgcagctgtttaaattgtatttagacacatggtggggcttgagagttactgaaatgaatctatgactgcaggagccaagtcctgtggggaccgaggtaggcagtgattatttttcccagtgctttttttccccagagatccaccagaactgaaccagtgggtcattattttgtacgttattcagttctaaacttctgcatcattgtttcacaaagtgtgattcatgaactgtcagatttaggagctgttttaaaaaatagtttctcagcctgcgctgggaacccatagctaacttggagagaccttgtaatctgcatttataagtgcctgtctgtggtgattcttatttttattcagtgaagtctgctatccagtgttttcagttgctgtttggtgaaggcggagtcatgtaggttgaaggaaattggaatcacgttggaagtcacggagtcagcctgccatcattactattctcctttaaagctattttcagttttccatgtagcaagtcacatcacctgctacctgtagaacttacttatgctcttactgttttggcaacgagtgattagctctctctggaagtgagaggaacaacagtgtgttagaaacaaatgtagtgattggagaataactataatgcccaggttagaggttaccttgaaatatatagaagatttcataagcaatttttattcatttactccagtctgttcatttattgtttgagcacatatgagcaaaggtttgggaaaactggcctcatacaaatattttgtatttcataaaaatataaaatatatggccgagtgcagtggctcacacctataaccccagccctcagggaggccaaggcaggtggctcacctgaggtcaggaatttgagaccagcctggccaacatggcgaaaccctgtctttactacaaaaattagccaggcgtgctcctgtagtcatagctacacaggaggctatgagaattagaatgaggctatgaggcatgagaatcgcttgaacgcgggaggcagaggttgcagtgagccaagatcatgccactgcattccagcctgggtgacagagtgagactctgtctcaaagtaaataaataaaaataaaaatacataaagtatataaatctaaaactggtcttgatgaagatacctggtagtaaagccagaacattccagttggtttgtgagaactctgctccttggaaggcatttcccttttctcagggtggccagggagctcccccttgcccacaccgccttgtcctcatcctgcagacttggcgtcaacataatgctggaaacacttacatctccaggcttcagtgcaacttccttcgcctgacttcccttccctcggtccgcgatccactcctgggactgtagattccatcaagtctttacatccagtgcccagagctccaacgggggtgttcttttttgtttttaaacctgtttccttccatgcataaatctcattgagttccgtggctttagctgtttaaacagagtagccagaatgatctttcacagcctcacagtcgtcagtggtgtgacaccttccagtgtctcccactgaaaggagtgaaatgtgaatttctcactgtggctcacagtgccctgcagtgcctgtaccccggccttgaatcttcgttcttctttattcgctcaccagtactaagccagataagctgcctttttagcctataagcatgtgaagcgccttcagtctaagagctctggcgctggccctgccacccacccaggctgctcttcccaaaggcctcccgtagaacattcaggaaaggccactctgaggaaggacgtctgagtctagagtgggctttgttgaacagccacaccagaacagcttccaccatacatgcaggcactacattaccatttctttctttttttttttttttttgagacagagtcttgctctgttgcccaggctggagtgcaatcttggctcactgcaacctccacttcctgggttcaagggattcttctgcctcctcctcctgagtagctgggattacaggcacctgccaccacgcttggctgatttttgtatttttagtagagacggggtttcaccatgttggcaaggctggtctcgaactcctaacctcaaatgatctacccgcctcagcctcccaaagtgctgggattataggcttgagccaccacacctggcccatttctgacctttttatcgggagttattgtttggtttatatgtttatcaattatccctctccacaatattccctgagggcaaggcttgttgtgccagaatggtgcctggtacatagaagatgcaaaatgtcttttgtttgacatgtgaacagattataataatattattttagagacagggtcttggtatgtcgcccagtctggagtgcagtggtgcgatgatagctcactgcagcgttgaactcctgggctcagggaatcctccaccctcagtctcccaaggagctaggactacaagtgcgctccatcacgcccagctaactttttaaatatttttatttttagagacagagtctcgttgtgttgcccaggttggtcttgaactcctgggctcaagtcctcccgtctggtatcccaagtggctgggattataggcgtgagccaccatgcccagactgtaatattagattgtgggtcccaagtgctactcagtggtagacaggactgtgtttacagcttagaggtgaaagaagcatggctgagtggggattagagggatgaagacatatttaagaactttcttttcctaggttggtggaagtgctaaagaacatttccaaaggagagagaaatcttagcttttcattttggatttagttgatcagagacgctcttggttgtctcattttcactgaccatctctactaaagctctgtgagaaataaattagaattatagatgataatgtcaagaaaactttttcttacttgggtcacacttcagggtacaacaagtgaagcatactttaaatatgctttgaatatgctttatgctttcacttgttgtactctgaagtgtgtttcttctctgaaaaagggcatttttagtgcctgtggaattgcaaataacaggaagaagaaaaatgctgtattggctagactcctttagtgttcctcatttttttaaaatagtaatctttgttataatggagttccatgcacttgaaagtcagatttgtgattttcacaattttcacaaacttcactacaatgtgaagtttggacttctaaaacaatctctactccccctcctgggggttctacaggaacaagataatcaaccagtctttgcctcagagtttgttcttaccaggaagtaaagggagtggggaggattgtatatgtgagccaccctgcccagcaagaccctatttttaaggtgtttagattagcagatattctttaagtaagcatctttaatccttcatgggcacttgaaaaaagaataaccatcattttggatgaagtgagtattacagcctttaaaatatataatttttttttttaagatggagtctccctctgtcgcccaggctggagtacagtggtgcgatctcagctcactgcaacctctgcttctcaggttcaagtgattctcctgcctcagcttcccgagtagctgggattacaggcgcccgccaccatgccccgcaaatttttgtatttttagtacagacagagtttcaccatgttggccaggatggtctcgatctcttgatgtcgtgatccgcctgcgtcagcctcccaaagtgctgggattacaggcgtgaaccactgcgcccagccaaaatatatatgtataatcttcttatatacatatttgaataagtttactattatgtagaagtttttttttttaatttattttttgtgacaaggtctcgctctgttgcccaggctggagtgcagtggcgtgatgatagctctcttagaatttttgttctctcagacctcccccatcttaacagctctagatgagtctcccacatctcatctgggaaacgcttcgtcattctacagttgtctcgccagggtgcttcctaaagtgaggagtccagaaatgagaagagttccccctgggcttgcaaatgctggcagtgtttcctttctcgtctaaatggtggcctctaccgacgcagcgtggaactgcgcttgggtgggcttgcttttgaaaggtgttagctcattgtgctgttggtcaggtaacatcaccaggttttttgtctgttgatactcttgtcactgtactacttctcttttattatgtggtctaattgatgtgtgaaaataatgaggaacttcagattcattcctagaattttttatctttgatgttgttttaacattcccaggatatcaagatctttctgagtaattttttaaataatgcatacattctggctgtccacacacttctaaagctgtaatctctctgcgtttgagactattgaaatattgaacataataaggcctaaggcagggctctgtacctggaagtagacatcacttgtcaagccgcagagtgacagaccaacacatttcatttccaggtagcaggtaactaccttctccactccacacttctccctctttctaccaaagagtttgtgggagactgtgttatatacattatggaaataaagtcgccctgcagccagggccatcctctgtgtcaccaatcaagtaagcctgaagcagagtggatgttgatgacggtggctggactgccctgcgcacacactggcgtggctacggctctgcgtgaggcatccagtgctggacttagcagcaccttaaagaaatacacaagtacccggaaccttcctctctgttttgagtcttgtgctttatttttatttactagtgcctgttagtgcaccaatttcaatagtctttgaccattaaatgattgtaaaataagcagtatcagatatttaaatgtttagataacatcaagataaagtccagaaaaatacaggcccattcatatgcctaaaaggaatctggatcaatagtacaatataggaagggggaaatagtgatactaatatggcttaaagacttagatagtcaacatcgcttaagggttataatgtgaaacagcacaaaaacaaaacaccccgaatggtttggggatcgacatggaaaccaagcaagtcatgtttaataacacacttcctgaaaccgtttgtctcccatttcccacctgtcatgaaagagacaaactgcttttttattttattttattatttgagaccaggtcttgcttatcactcaggctggagtgcagtggtgcaatgatcgcttactgccgccttgaactccttggctcaggtgatcctctaacctcagcctcccaagtagctgggactaaaggtatgtgagatgatgcctggttgagacaggtctcaaactcctggcctcaagtaatcctccggcttagtcacccacatatgtttttattccagtttagcttggagacttaaaacttctctgaacagttgtaataatgcagaaactcacactatcctatctaaacaaaaccccagcccccaccctgggctctctttgatattattagatgacacttagattactgtacttggttctggatttattactactagaaatgcagtgaccagttggaattgtttcagagaataacatcaaaaatgatttatgaggaaggattaaaggagttatttatggcttcaccaaacaatgactaagagagctgactatataagcattcaagggataccagcaccaaggaggggaaggattgttagggatggttttgctaagcagtggagggtctagggcatagaaatgaatttacagagagaatggtgacagctgacagtggggaaatggtttataggtagcaaggtactcttttttttttttttttttttttttttgttacgggcccttggtctgtcaccaaggctggagtcaattgggggtatcacggaacctgggccaaaacccttgggcccaagggtcccccatcccagccgggtccctttaaaaaaaaaagaaaaaaaaaagggggggttttccgtaactaaaaagggggtttttaacgggggcgggggcccaaccctttatcccgcacttttgggaggccagggggggaaattnnnnnnnnnnnnnnnnnnnncccccccagggggggaaggattttttgggatggttttctaaagccgtggagggtcctagggccctagaaatggaatttaccgggggaatggtgaccgctgacagtgggaaaatggtttttagatagcaagggaccccttttttttttttttttttttttttgttacgggctcttgttctgtcacccaggctggagtgcaatggtgctatcacagcacactgtggcctcaacctcttgggctcaaggatcctcccatcccagcctggctccctttaaaaaaaaaaaaaaaaaaaaaaaaaagaagagtatttctgttacttaaaaacaggaagttagactgggtgctgtggctcacacctttatctcagcactttgggaggccaaggcaggcagatcacttgagctcaggagttcgagaccagcctgggcaacataacaagacccctgtctctactaaaaattaaaaaaaaaaatatgtgggtgtggtgacacacacctgtctcaaaaataaaataaaaacagaaagtttatgaggatataaaataatccaggtaaggactgaggaatagaatgggtcctgtttttaccagtcattccttatattttgttatgttaagtggaaaagaggtacacaagttgtgtagtgaaggaatgattattatcaaaaaatacttttcattagagtgtccttcacattttcagacaagaatgttcagttccctccctcatgcaaagatacacagacccataactgcagagaagctttaatgaaaacctggatgcttattaacctgttctttggaatcagcaggttctcaggtgaagatgttattattttcttgttactttttcttaatattgtttatcaaatggaaacggaaaggttcctggatctttttttgtaagacaaaagtcaatagtttattcagaaagtttaaaaacaaagatattcgtataatttacaagatcttttggtttgaacatattcataaggacttatgtttctcatttttatggagatttgtttttgtttgtaatcaatttctgtctgagttccagaaatgcaaaaatactgcactgaaagaggtggcagctgacaaaattgctgtctttgaccttctgatgcaagtttagtaactaatctggaaaataatgaactgcaattaatgaaatctgtactcatattcaagtgtgtttctcagacagcacataaaataattgaaggaacttcctgctctctaattagttagattgaattaatttggcataatagctttttttcatgtatctagaagtttgtgttcagatgaagctatttatgtacttcaaagttaggaactgtaaatggcgtctttgatgaatctggagaattaaagggttaatggtcagatttaatttccactatcaaaagcacagtcacaatgccggcctgtcttgatttatgtgtctgtcccttttggttagggctgccttatcaacagcagggatatttttctcctatttcaacatagcctcacgtgtggtaggtagataaaggcttgtgtagaaagagcacccctctgcccatctctgatgctaattgaaaaggtgtctgtataattatccatcttccattactgtgattcttccttatataaaacagggagaaacaagcacaaatactaattcttgccttgtacacaaggatgatgttttgagctaacatacttctttgattaaatgaattatataaacacgtatccttgtgtctcaagtaaaggttcaacatcctaactaaaagaagaaaacacggtcgggtgcggtggctcacgcttgtaatcccagcactttgggaggccgaggtgggcggatcatgacgtcaggagtttgagaccagcctggccatcgcagtgaaaccccatctctactgaaagaaatacaaaaattagctgggcgtggtggtgggcgcctgtaatcccagccactggggagggtgaggcaggggaatcgcttgaaccctggaggcggaggttgcagtgagccgagattgaaccaccacactccagcctgggtgacagagcgcaactccgtcttaaaaaacaaacaaacaaaaaacacatctaggccttgttcccagccttcatttttcttaaactttcaggttatttaaaaaataacatatatgagcattttctctgtagtttaataccacccatcttaaacagctatagatatagtatgctgtatttcacttgttctggagttaacaaagagtttttaaaaaaaaattcagggcaactgatttctgttcagtttagggaggagtttttaggcactcctgtcattgttaaaagactcttatcactcttttagttttccagaatcacagcattttgctgtctagccttgccccataaatttgtaggtaatatagtggacatacttagagatgtcagagttgtcttcacaatcaggtttagtagctgatctgaaaaataatgaaatgtaactaaaattcccttcagcaagtaagaggatttctgaggcagtaaagaagtcgattgaagaggtgcatctgctagcaattttttaggaatggggttcattttattctctagaccgagtgttgccatactttattttataaaggaacagattgtaaatattttaggatttgcatgccatgtggtctctgtcaaaactagctatagacagtattaaacaaatgagtctggctgtgttccagtaaaacttgataacctgaaatttgaattttacataatttttatgttatgaaatattcttttgatttgtttcagtcattaagaatgtaaaagccatttcttatttcttagcgcatattaagctggcgacaagctggatgaaggcttttttttttagacagggtcttgctctgttgcccaggctggagtgcagtggtgtgatcatggctcattgcagctttgacctcctgggctcaagtgattctcccatctcagcctcccaagtagctgagactacaggtgtacaccgccatggctggctaatttttaaattttgatcttgtagagacggggtctccctatgtcacaccggctggtcttgaattgctgtgctcaagcaatcctcctgcctcagcctccggaagtgctgggattatgtgtgtgaaccactctgcccaacaagaccctatttttaaagttttcagattagcaaacattctttaagcatccttaatccttcatggacacttgaaaaactagtaactctttttggatgaagtgagcattctatcttttaaaatatatgtgtagaattttcttatatgaacgcttaaatcagttttaagtattatgtagaagttttatttttttttaatttattttttctgacaaggtcttgctctgttgcccaggctggagtgcagtgatgtgatcatagctcactgcagcttcgaactcctgggcgcaagtcctcctgtctcagcctctcgagtagctgggaccacaggagtgtgctaccatgcctggctaattaaaaactttttttttgtaaaaatgaggccttggtatgttgcccaggctgttatgtagaagtttgtaaagtaaactggctagatactaaaaatcagaagcgatatcttttccagtaactctggaaatactagtatttaagattttatttatatagtacttagaataagttagactataatacatatctaatgtcttatagaccatgtgaatggtgtcattcacttataggcagtgataaaataatttacttgttgataggaaaaataggccttttaattgttttgtgtaactgaaattaaataggaatataaatgttagaccttgagtgcctagttttgaggagcacagggactagttttgctcacactgcacccccagtgcctaccacagtctttagaatgtagtaggtacctggtacatatttgcgaatgagtaaataaatgaaatcttaggttctttgtttgaaagaaagtggaattcatcttggaatgactttgggactgattcagttaatttgaaacttgtgatttctagatcagatgaaattattgactgtttaaacatgtacttttagtaagccaacttagaaatatccaggaagaccagacacaaaattccaatgaagtactttacaaatgtgtcgagagcttccagcatacctggcaccacaccaggaattttaatgtgccatctcaacaacacgactgagttagacaagcaccatgcaatagatacataatgcgagccatgtatgcaagttacaatttcctagtagccacgtttaaggaagtaaaaagaatacaggtcagattaattttaataacatttgtttaacctagtgtattgaaaatactgtcatatcaactgtagtataaaaaaaggttgagatattcccatccttctttctgtacaaagtccttgaaatcaggtgtgtattttacatttctagcacattgcaattcagacactaaagttccgtcggaaatacttgatctgcgtttagaattcataaaatttatggttgaaaaagcagacccacatgccgaggctgttctaaacatacttaaaagcatttcagtgtttaaggttatgctttattaattaaaataaaaaatggactttctgagtcacattagcctcattctcagtgctgggtcaccaccagtggctggtggctgccatgtcagggctgctgccctgttggggaaatggggagggtgcacacctgtctcaggttacagagcctcaggagtggcagaactgagctttccgttgagaaagcacggttaaatgctcacgtgtgactgtaagagatttcactgacagtgattaagagtaaccaagtcattgtatttgtggaatgaatcaatcagtagagcgtttgcaggagggacggatcgagccgcagaaatacaccatgcaggacctgccagcgtttccctgtctgctgcagtgggaaaccctggcagctgcaaggtggcgagcgacatgggacatggtcacttttgtttttcggaaagctccctccagctgtagtttggaaagtggatttgaagagaatggagttagaagacgctattcgagtgcgggtagaatcctcagcagggattatcatgtgggtcagaaacccatggttgccttctggtgttgagtccttcgaggcactgcttggaggggcatgtggcaggcaggggcacagtggctcgggcgggggtcggcagccaccagtccgcttccctggtgacaccgcttagagaactcatgtagatgggatcatccccttgcagataggtgtggaagcccagaggtgatcaggtttttacacaaaagttagaatgccaagccatgcatttaaaataactatacctgccagatggacaaaagtgctggtgccgttatggctcacatattctatccacatcaccctgtcagggtctggagcctccaggcgcacagggtggtcactgaaggcctcacatgccggaggctggttcacaggcttcaggccagggctggacacgttctccccgcccgcctcccggaactcttcgttttcctctcttccaggcccctggtcaggacaaccttagaaaagtgtttctgttgattagattattgctgaggcttaatgtttgggttggttttttttttttttttttttttttgagactgggtctcactctgtcacccagggtgagtgagtggcatgatcatggcttactgcagcctcgaccttctgggctcaagcaattctcagctcccaagtagttcggactataggtgtgcaccaccacgcccagctaatttaatctttgtagagatggagtttttccatgttttccaggctggtctcgaactcctaggctcaagtgatcttcctgcctcagcctcccaaagtggtgggattgcaggtgcgagagccactgcacaatgtgtctgatttgtatccattgtatgttacttttatcagaacatttttggaggttagcaggtgtttccttatatgccttagctctgcttccttttgtttctcaggtttttcacgcttcagcagcaggaaaatgaaagattggctactaactatttgtaacaaaaataaatcttacatatcttgtatattccactaaaaagtaattttctatacttggatttaaatcattggttagtgtttaaaacaagacttagaggattgtattagtttaagcaccattaaaaaatgacatttaagaatttctgaaattcagggtaaggggtgattgttagccatgaaagatttattttcaaacaataaaaaatatgcatcagaaaattcaatgttagggaagttctgaagtgattatttttttgtttcaactgggacctcttttcccctttacctccccgatgcccacatttcagagtctgttctttcccacattcctatgtaactgtacaatttagtcttctttatgtcacttgctaagtaatgtatgcatttgttcattcaacaaacactgagctactgttttatgtaaggaaatacagggatgaatgagctgtagtctgtctccttccaagagcctgaagtttagagaagcctgtttagagccacaaaagcagatgaagagacagtgcagggtgatgtagataccgtcatgtgtgagtgtctgcggatgacacagcgaagccggtgggcgctgctccctgcagttgcaggagaattcgatcatgcatgagcagagacttagaaatgaatcggtattcactagatggaacacgattccacgggggcggagtggcgtgaggaaggttctggaaaagccatccattgagggaattctgaatggaaaagccgtccattgagggaattctgagtggcctagtagagcaagcaaagcaaggtgtgtccccttggagattgtatatgtcatgtcaaggggttaattttattcttcttggcagaggggtctccaaaacagcttttattccaagttttaaaattctgacctcatctcccatgtgttcatgtagaatgtgaaagccagagttaaaacacagggcaatatgatgagagcagtgactggcaccttttccctggaatatttctaagccgttctgttgcctgtaagctactcatctgttcagtttcagcaacgctcagtagacagggtgattgcaggttcagccagcacttgagaacttagtccttttccatctctgtcactcacttacagggcaatgtgaatacatttaaccattaggtaaacgctctctgagcctcggtttctgtagtgtgaaatgtagataattatactcatattcacttgcctcatgggacttctccttaatatttatagctgcaaaatacttcacagtcatttttattaatagttaccagatgtgttgtaaggattaatgaacttatgatctgaaatgttttgagcccctgaaataggaggtgactgcctgcacaggggagatgtagaagagcataaaggtgcaaacagacacacttgaaaacttcagctattacgtgtgaaggatgagcacacggttatgatttcagtattcttggtggatgtatttggcatccttaaaaaggttgctgaactcatacccaaggcctgtgccaaaagcccccttcatgtggcgttcacacccgttctatttatgaccctttcctcctctgaatcctctctctttttttttttttttgagatggagttttgctattgttggccaggctggagtgatgcaatggcactatcttggctcactgcaacctccacctcccaggttcaagcaattctcctgcctcagcctcccgagtagctgggattacaggcatctgccaccatgccctgctaattttttttttttttttttttttttttggattttagtagagacacggtttcaccatgttggccaggctggtcccaaactcctgacctcaggtgatcctcctgctgcggcctcccaaactgctgggattataggcgtgaaccaccgtgcctggcctcctctctgcttttgaagcttccactccactgtcaccttccttgattttagtgatttgctcatgtgttccccaccaatcaggttgcccatctgttgagagcaaagcccatgcctctgatgctgatgttgcctgaggcacctggtgccacgccccccgcatggtaggacctggtgcagtctctgttgagctgaacttttttacatggagagtgagaaccaaagtggcagtcagtcgagtccctgaatccatttcagcaaatatttaataagcatctatctactgggtttttctaatcacactgggtcctgaaggaaagtgtaacttgtttgcatgttctatttcagagggcaggaatcatgtgattttagaaaaggtttcatgttaggcgcttaacatcccatccttggggtatttgcatttttaggctttaaggggaataaacttcacctttgtggaaacagttgttccccaatcttgtccactttaggtaagatgtagtgaagaatgcaagtattttggagtttgagaaatgttttttctgcttttgtcatgaaatatacccttgaacaccttcccatttgtggggacgttaaatactataggcagaaaaatgaagatacgagccctggcatgcgaggactgcgtggcagtgtgggacgcgtgcttgagcctcactttcttctctgggagatggcggtaggcggggccgtggagagcagtagtgggacagaaggagctgagtgctgggaggggcgcagaggggagactgttctggtcaaggaattgaggtgtaggctgaaggtcttgttcttcaggccttgtcatgtgcaatggcctaactgccaccaggggaccctccctcattctgtcccattggctgctcacataatctttaatgcaccctggtcctagctgtcctgggcctcagaccaccccaggaactccctagtggttgcagtgtaaagtacacattccttttgttcatttccttggtccttccaccttattttctttttttcttctttgacacagggtcttgctttgttgcccagggtggagtgtggtggtgtgatcatagctcactgcagcctccaactcctgggcttaagtgattctcctgcctcagcctcctgaggagctgggactgcaggtgtgcaccaccacatctggctccagtccttccaggtctttaagcctgatcgctgcgtttcctctcgagtcctctccactgcaccttttctcaaatcctgccagtgcccccttaccttctgtggaatcaattccctcttatacttttcttccaaaagcagccccaaggcacgagtggtcatagtggtgccctcaggtgaagcgaggctattccatgcttgtaaacatggtgagcaccctgctgagcgggctggcttcttcgggactcttctccctacagctggagtccaggctccccagtaggaaggaaggcctgggcggtgtggctcgcgcctgcaggctctgtctagaaggcctgactccatcgaggcctcaagtgcccagacgcacaagagccaaagcaccaggactgccgagggctgggagaagggaggtgggagacgtggagtccacatctctgggcagttaaagttcagtaaccgagcagccaccagctgtgccctgtggacccaacaagaaagaagccctacccgcggctgtcctggcagaatggagccctcatgagagcccagcatgggaggccaggcctggttcctgcagtcgggtagggggagggggaggggcagaagtggcatgttcccagcttcttctgggatgagcacatctgctcggctgcttctgtgtcccacagccactccgcagcaacagaatgatgctctggttccttctctccccgaggcttcccttttcctggctctgatgattcttaactctgtctctttaatgttccctggcccatgtgtccacaagtaaccaggccctttcctgtggctcttacctcctccccctgctctgtcactggagttgcattactgatctgcctctttggactttaaatattcttccggtcatgttgtgtccccacccggacagtgtctctggccttcagctgtcttcttgctttgctcaggactcagtggggacccccttcctctcctgagtagggttagtttccgatgcccagggccttctgcagacctgtgcctgccatcttgggctctgggtttgtgctccagccagcctggcctccttcctcctcccctcctgtgactacactccttcctctccccagccatcagagcctggcatggctttcacctcctgccggaagtctttctgtatctttcctgtctcataatgcttgtctgtacaggcccagtcctcggttcacatgtgcatatgtgattggagggagggagagagcgtcgtgtgtgtaagtgcaccatgtgtgttggtgatcttggcatgtggcctgtttccctggctgggggaggagccccttgctgggtcccttgttccttggagggtgtggagcccctcacactcgcacacctgatgggccgattcccctcgggcaggtcctggccctccagcctgtgcagcggaaacctttctgctacccctgttctgtcctctcgacccctgacctgcacacttgcctcctcagcccgtgccccgcatcatggtgcagtcagccagcccggacatcagggtgaccaggatggaggaggtgagtctgttgggtcacgggtggccaccccacctacagcgagcaggtggccctgatgccgaaactgttgagtccacacccacagtttttgatgttagcattcctgttttggtaattagttataatataggtcactgccttctccctctctattttccttgttatacttttctattttcaacttgttaatcatatgattgctaaacttttaggtgcttgactgctaatgtagtctgctgccttaatagcccacagctaggcagaggagatttctataaacagaacaatctccttcttctaaatgtttgcttaattctcagttttacatttcattctgattcatgatatcagcgtgaaaagacgaatgctaagctgtggagaaaatagtctcttataatctcccacagatcaacagcacttctaatcttatgaatagcaaatctattttctcccactgcgctttcattctcttaggaaatgctgtatcttcttaggaaaattttctttattaaaacaacagcaacagaggcacaatcattagaaagaatattcagatctccgtgaatttacttctatctgaatgacctttttaccccagtgcacactgggcattcacgaatttgctgtggccgggatcggggtgccccctcccctgggaatggtgccggtctcttctctgaggcaggtttgagtgtccctggtcagcaggatggtcagagcaagccccttgccagtgaaggcagcagcttctgtagctcatcatggtggttttccaagcttgggcttttgcagaagtctccagaaatgtcttcttcagtggcaagggtataatccatagatggcatctgggtttcaactcacaaatcaactccagtcaagtggggatggggcctggagtgcagtctgtgctttccaccatcctgctccctgctttgttgactctgcagctctgccccagtgcctgccttttcacttagtgcagccttggatgagggctttcccctctggaggcctgctgtagaataatgccatgatccttccagcccagcccaagccagtgtcttacatggaagccaatgggatgatgatacttgcaaatctgaggcatgcagctggcctcatcctgggagagcctggcctggggaagtgacagtggctggccttacccggggtgggggcggggaacagaagccatttcaggaccctggttaccgttcagattcccggctctcatagttttgcgtattctcccctgttgggtcagtgatattaaaactaaaatagaagagaataaataaaacatggacaatgtgcaaaggaagaatgattgaaggattgcctaatcttttagagtatttatgctggtgacagttattgatctattggattgagtaaattttgcagcctagagattcatcacaaaaatgggctgttaatctcaagaggtgccattaatttcctaccctgaaagtgtggttggtggggaaaagagggcccctggaaacgggaatataaaggacagttcctgggaaaacgcatgatttatcaagctgctgaggtaagccaagtaactgtaagagacgtatagatctcagccgcttccccattcaaataaatcccgtatttcaaatggaaaatgaccattcctgtaatataaataatttttccataaatatcggaaaacatatttcttctggatagcagtgctctccaccccaccaatctcattccctgttcctgccttctccttttcttcggtcactgtgaataggaatagaaagatgatctggcagcctcttcacatggcttcagttatagatgaaagaatgccccagaaacaataggatttgggcaagcggtggctgctctcccccatgagatgtgggctttgagtgtgtgtgtgtcctctgcctgggtgactcagacagagtgaccgacatgaggagagctgctggcctcacttggtggcttctccctgggggctgcttcctggcctctctccagggtccgaggcccccccagcccctgacatggcacctgctttccatagcagccagagcagcagccttggagagaaagggccacggcccacagnnnnnnnnnnnnnnnnnnnnnnnnnnnnnnnnnnnnnnnnnnnnnnnnnnnnnnnnnnnnnnnnnnnnnnnnnnnnnnnnnnnnnnnnnnnnnnnnnnnnnnnnnnnnnnnnnnnnnnnnnnnnnnnnnnnnnnnnnnnnnnnnnnnnnnnnnnnnnnnnnnnnnnnnnnnnnnnnnnnnnnnnnnnnnnnnnnnnnnnnnnnnnnnnnnnnnnnnnnnnnnnnnnnnnnnnnnnnnnnnnnnnnnnnnnnnnnnnnnnnnnnnnnnnnnnnnnnnnnnnnnnnnnnnnnnnnnnnnnnnnnnnnnnnnnnnnnnnnnnnnnnnnnnnnnnnnnnnnnnnnnnnnnnnnnnnnnnnnnnnnnnnnnnnnnnnnnnnnnnnnnnnnnnnnnnnnnnnnnnnnnnnnnnnnnnnnnnnnnnnnnnnnnnnnnnnnnnnnnnnnnnnnnnnnnnnnnnnnnnnnnnnnnnnnnnnnnnnnnnnnnnnnnnnnnnnnnnnnnnnnnnnnnnnnnnnnnnnnnnnnnnnnnnnnnnnnnnnnnnnnnnnnnnnnnnnnnnnnnnnnnnnnnnnnnnnnnnnnnnnnnnnnnnnnnnnnnnnnnnnnnnnnnnnnnnnnnnnnnnnnnnnnnnnnnnnnnnnnnnnnnnnnnnnnnnnnnnnnnnnnnnnnnnnnnnnnnnnnnnnnnnnnnnnnnnnnnnnnnnnnnnnnnnnnnnnnnnnnnnnnnnnnnnnnnnnnnnnnnnnnnnnnnnnnnnnnnnnnnnnnnnnnnnnnnnnnnnnnnnnnnnnnnnnnnnnnnnnnnnnnnnnnnnnnnnnnnnnnnnnnnnnnnnnnnnnnnnnnnnnnnnnnnnnnnnnnnnnnnnnnnnnnnnnnnnnnnnnnnnnnnnnnnnnnnnnnnnnnnnnnnnnnnnnnnnnnnnnnnnnnnnnnnnnnnnnnnnnnnnnnnnnnnnnnnnnnnnnnnnnnnnnnnnnnnnnnnnnnnnnnnnnnnnnnnnnnnnnnnnnnnnnnnnnnnnnnnnnnnnnnnnnnnnnnnnnnnnnnnnnnnnnnnnnnnnnnnnnnnnnnnnnnnnnnnnnnnnnnnnnnnnnnnnnnnnnnnnnnnnnnnnnnnnnnnnnnnnnnnnnnnnnnnnnnnnnnnnnnnnnnnnnnnnnnnnnnnnnnnnnnnnnnnnnnnnnnnnnnnnnnnnnnnnnnnnnnnnnnnnnnnnnnnnnnnnnnnnnnnnnnnnnnnnnnnnnnnnnnnnnnnnnnnnnnnnnnnnnnnnnnnnnnnnnnnnnnnnnnnnnnnnnnnnnnnnnnnnnnnnnnnnnnnnnnnnnnnnnnnnnnnnnnnnnnnnnnnnnnnnnnnnnnnnnnnnnnnnnnnnnnnnnnnnnnnnnnnnnnnnnnnnnnnnnnnnnnnnnnnnnnnnnnnnnnnnnnnnnnnnnnnnnnnnnnnnnnnnnnnnnnnnnnnnnnnnnnnnnnnnnnnnnnnnnnnnnnnnnnnnnnnnnnnnnnnnnnnnnnnnnnnnnnnnnnnnnnnnnnnnnnnnnnnnnnnnnnnnnnnnnnnnnnnnnnnnnnnnnnnnnnnnnnnnnnnnnnnnnnnnnnnnnnnnnnnnnnnnnnnnnnnnnnnnnnnnnnnnnnnnnnnnnnnnnnnnnnnnnnnnnnnnnnnnnnnnnnnnnnnnnnnnnnnnnnnnnnnnnnnnnnnnnnnnnnnnnnnnnnnnnnnnnnnnnnnnnnnnnnnnnnnnnnnnnnnnnnnnnnnnnnnnnnnnnnnnnnnnnnnnnnnnnnnnnnnnnnnnnnnnnnnnnnnnnnnnnnnnnnnnnnnnnnnnnnnnnnnnnnnnnnnnnnnnnnnnnnnnnnnnnnnnnnnnnnnnnnnnnnnnnnnnnnnnnnnnnnnnnnnnnnnnnnnnnnnnnnnnnnnacctggcctcgctgacagctgccctggccaaggccgacaggagccacaagaaccctgagaaccggaaaatcctgggccagctgagccgctgccttagggcgaacttttctgggggtgcccggccccttttgagccctgccagtgacagccctgaggagccaggagcccggtggccccttccccaggggcagggcgatgaatgctttttgcacgacacagggctggtgacctccctgggcctctggaagctttgtttcttctgtacccgggtaaagtgggggcctcaactgtgcctcctccggtggatggaaggttctgggtgcccgcaggggctgggggatgctaggactgagaccctgggtggtgcagcgcctggtgatcttgctgtgtgcctgtgcctggggccttatgttgctctttctatcatttccattctggtggccccactaatgtcttaacctaaaccataattgtaaccagtgcctttcctccccactggagggcaagcccccccacccacccaggatgtcctggctcactccgcaagccccccagcctcccaccctggtcccagtttcccgcaaagtgcctctgggggaccccccagcctcccaccctggtcccaggttccacaagtgcctctggagggccctgggctctggcagatggtcctggtgccccagacgggggccgagggcctgagcccccccatccctcctctgccagggtttcttagcggtttctctgtggatgttttggcatctttagacacctggaaagtctcttatgtttgccgtttattcccttcacagaaggcttggaatgtatttatttatatttattttttcaaaatccgaaatcatttgcgagccgcaatcgtcgtctgcctgtgtgggggggcccagggcctgccttgcacgttgcagcctctctggccattgcagagctgctggcctcctgcccaggtggagggtcctggggacggcagaggataaagccccctcctcacatccctctattgcggatccacagtggccttactcttaacttggatgagagcaaaaacctgggagaatgatgtgcttctgtagtcggtgacaaaggaagaggcattgctactttatttggtgcacttttggtttctaggaaggtctttgggtcattttaacttctcggcaactcccagactctcagagtgtggggctggggcctggcggctgggctggtgcagggagtgtgctggttagtctccagaccctcacagcagccacgcccccaggcccaccgtgcatggtgtgggcgggacagccggaagcttccggggtggcctccacctcctggctggggcacttatgctcccagagcctttggtgccaggtttgtgggatgggggttagcgtctatgtgtggaaggccaccaatctagggacaggagtcctgggtcaagattcacacagccacccttggagctggtttctagttctcacatttagtcaacatctagaaagcgctgcggaaggctctggttctctagggacttgaaggcgccaacagagtagtctccatggtgggcctgtcccagccctggctgcgaggacaggttgtctttctctccccagttggcgagggacacgaaggctgcggccgggctggcagagggcccggcccctggggggaggcactcctccagggctctccctgtccttagccgattttgagggaaccctgtggcacctgtccctggatgaagagctgtcacctctgccttgccctttaactcaacccgcttcccagcacagcggctttctttttaaaacctgtttcactgagaagtttgtttttgggtccgctggtgtcactatggcctgggtgagaggccagcactgctgctgccctgaggggaaacgcctgggccgtgtagtggggacgctctgggaatggtggcggacgggcagcgtgggtgggacctggcacttcgtggtggctgagccatccacccagcagcggcctcctgtagcaccatcttgggaaagtcctgggggacgtgtgtgtcgtgctttttaccatcggtttgacttacagtggagtagaacgagccagagttcctgacttgagcaggtggatttgggcccaggccctgttcactcttgcttctcggtgcggactaatgtcagcttgtggctgggaaagagggatgtgcagtgacgtggtcaccaaggcagtgagccccgctgaccccgggccagcacttggcaggcaggaggtgcggtctccagagtggtgggccagggcgggctggcctccgtcttctatcttcttttcttgcctccctgaccagcagactcacctcccaagaacgcctgcccgcccacccgccttaggactcccgatgcgctcctggaaggccccaggagtggcaccttagtgtgggtcggcccgcagatggcacccaaggccgggaagggcagtaactgcacacgcggcgctgtcagagatgggggtgggggatgcttctgggggccctgcctccccattgtgtgcccagaacatccctggccccaccccgccacttccctcgggcccttatgaaggactgaggctccagggtgagaaggctcacttctgccccgggcactgcgtccagcagcagaggggacagggggcaggtgtgtgactgggttcctgggtacccaggcctgaccagagggagcgggagggcagaggtgaggagggggaagatgtttctgggcctaccaaggttcaacaagagaacggagctgggaatgtgactgctggagcctgagaggtggaggagttctgatcccccgttacttcctagcattttctcctcttgccttaaaagttccctgtatgtgaaacgggaagtcctgagagtgtgtgttggtggctgtgcgcacgcacacaagacgggagtcaccctgtgcttcctgcccaagatactgacccattgaacccccaaagcatctttctctccacaaagtccgtggtgccttcctggtgggctgcagacactaatggtgttggggggtcttggaacagcttctctatgtgtggattcgtgtaaatgcgaagagttcacatataaagaagtgactttgattctgtgattatattgatttggtacacagtaaatgggagtttaaaaaatccaaagactctaatgacttgtaaagactctaatgatttgtatcatgtaatgaactaaaccacctgtaattttgtaccgtatgtgtctttccatcaaatgaccaacagcttctcaataaaaccagaccatttctcacctgcatcatgtctgaggccagtcttgttgcttctccttcccctcaccccaacatagggttttggggctcctggcaggccatcctgtcatggtgtggccttgttctcagcaaaggtggtgcggggcttttccagactgagactgggaggaggaggatcagggaacagcagcaggccgtgctcgcctccccagcccatggacttcagaggctgaactcttcatgatttggacttaagagcccaggaggccccccggttctgagtcatctttccttgtttggacttcagccccttactgaagccaggaaccatggaaactttctggggcccttcgaccccaggtaagtggtgctactgggagacaggtgacctggtagggactctccttggctctcaggcatgactccactgtctgctgtgaccttcgtgttggtccccacactggacctcccctctcccctcaaactggggtgagaggacttctttcccctgctgcagaggtgggcagcctctggcggggggaggggttctgtaacgaggtgttttgggaagctggggatcatggttgtggggctgacattggtgttgcctggccctgctctctgatgaggcctgcattctgcagccaccccgcccagctgtgcccagcgtgggcctagaatggtaccgaggatgctgggtccagccttcgagcccgggaagatgacttggcttccttccattcgccagtagattcccactcagccacaaggccccagtccagtaccagtgagggatgccggcagccagtgcacattcccacaaggacgcagaggtgcttgtggccccatgtaaagcttttcttgctatgccagcgaatcagttggcccttggatatgaaatacacttgcaagtggagggctcggccactctgagggctgaccagagctgtccatcagccagcacagccgggcagggctggtttacattcctcagtgcagaagaatgcttggagacaagcgctgccgaataatgacaggaatttggcagcaggagatgccctgctctgaatgaggcaggactctgaacatagtattgatatagcacctcgagtggatcttatttttcaagctactactatcttgcaactcaatgagatgtcttttgcttgcccaaggctgtgtggttttttcagcgttgcccagaccctgaaatgggctctaatggatgtcacacccagttcattccttccactcactgtcagtcacttaactaacattcacataccctgtgcctatcctcatggagtgtacagaagcaagctgtcatgatgggtgccatggtagggtggcactgatgcacccaggagggcctggggggttgagggtgttggccctagagtgctctgaggacacagggcagtcgggagatgtctgggctatgtggtacacatggagaagggttgggtgggctgtgggaaggttggttcaccagcgcttctgcttaagcagaaatagcaatctggggccaagaaaggggaacatgggtggggatgtcctcagggctggcccctaccctcacaccccaaccccgaacccctccccgcctctacttggcaacttcaacagcgtttgcggcagctgaaaattttgcataatcttttctcgtgatgcatgtgaagacacaccctttgtgtcttaggtttcctgagaagggagagggaggccggggcaccttgtcctcgagtcctgcttaagaatttgatgccaacaaatggaagcctttagagaaaaccagtaatgaaagcttggctttatttactgtgttgtgttttttatttactgctgaaggtgcggccccaagagagacagagctcttttaagaaaatgaggctcagggcgtggcctggaatggaagagaaaagctgcatgggcttcagctgctcggcgtaagtcagaggctgcactcccagtgcggggagagctcctaggatcctgatggttttaggggcggccagatctttgtgatcgtgtagcttgaagatggtggggagaaggcaggccgggtgggcatgtgccatattgagggtgcagtctggggactcccggaaggcacagcctctcctggtgtcatctagacatgtgccaaacacaggctggagggtcagggagtgggacgtatagaggggctttcctggctcggtgttgccctcttactcaggtggcatgcagcagtccgcaggagacttctccagtcattgtaaacgcacaaagggaccagtgttcaaaatggaacacttctctttgtttgggtcggtcacttcccaaatgatcactttgatccaaagaaatcccagtcagtctgtattcagttatacattttattctctaataggtacaatactaaaataaacacaaattaaaaaaaagttttattaaaacaaaactgtacaaaaaagcagtatactacattttaattacagaacagtctactgtccaaaaggcactaatccagaataggagatacaatgatacaggactcatttgaactattttattcaaaacaatagagcgcttgtttctttgaccatttacatctagaaacaagggctttttgctacagccattacacattgttataaatatgagtcctacgggtgaaggtgcagtatcactctccctagaggaggttcccattagtgggaccactgtggagctcagaggcggatggcgcagtgggtggggcctgggacctgccacatggttggcccgtcagcccctggacacccggagcttgtctttcagcctggcctctggtggttggtttctggccattactggcagccactttcaccccctcttgtgttttagcaccggcaaagtgggttctgagaagctccaggtaactggggctggaggtgtgggggatgaagcgtcagcagcggggaggcattgtggtaacctgatctgaagaaaggcagcaactactcggaagagggagacgaagcccagggacagccaatgagctgggctctacagccaggcagagccacctgctgctttctgggcaaacttctggccccagaatatgagggtctgttccaaagttcagagagatcctgtgtcccttcctggtgacccagaagtgacatcggatcatcttttgtcttggaagctgatttttacaagtggaattttgcttcccagagggaagtcaacatacagtgaccagcctgaagtgggggagccctttccctccctcagtcccaccccaggagtacaagtggctccaggccccaggtcccaccacaccacgtacgggagccgaactctgttggcttacctgtgtttggtggccaagacacctctaagccccatgtttattctttaatggcctctggacctcaggaagagagatactgcagctttccaaacagtgtcatacacatataagacaaagacaggcatctgatgttaacaaaaataagtaacaaagaaataggattaaaccaaatctcttctcacagcatcctatactacatcctccttctgcttagcagaaaattgtacgtacacaaaaatacaaatacacaattttgtagaacagtctgattttaatatatttatatatatttatatttatacgagtggcaggttagttcattatatagagctttttgcacttttggctcatatgcaacaaggcttataaattcagcttcagctttcattcaggttttatagcttttgaacaattgttttcacatttaaagcagcatccaatttgcactaggagtttgtggtgattataggaaagacaaggtcaggaggttatcgaaggggcagggcgggggggatacattccagtgtgtgtggtgatggacggaggatgccgtgggatagagcttaccatgatgaccccttgaggtagactgaacaccttacagcagactcaagacacaggtgtgactcgccctcagggacacatggtgcacaagatggacagggaccagaggagacgccaaggggaaacatgaagactaagacacacagcagccgaggcagggaggagcgcgctgcccccacacccgtgtggcagggatcccgcatggcccatcttagaaactcaactatttggtggatgctaaacacttcacttcaggcaatcccaaggcatttgctccagggtatccgatgagattacagctgttaagcttgctttccatttcataacttgctgtgcagctagttaccacccccatgctgaagagtaaagcaaagctgccgtggttcggcagtggaatccacccccagcactctgctcgcactggagcgttcaagtccggttatgtgagaacagactaggactctcttgctgcctctaattgcatttcactgtcaccctccccagtgctctgcactctcacttacattcatctcttccctagataattacaactagggtaatcaacaagcacttggtagaacctgcaaaaaatagcatctggagaactgagggacgacgaactgccaagggtccggtttggtttacatgctacagaaaagcctcattctcatgatcaccacagcactgttctcccattcgatcaccttcgtcagcctgccttcccttctctgtcaggtcacaattccattccactggcaagtttgcccatgtgtcaaatatgaatacccagtgtttgggttattacattgtctgaacaaaaatgctggattattaatgaaaataaagtgcctgggtatggattgttccatgatgcaaaaccttttaatgcaccaacaaatcatctcagcgctgcttagtgatgtgatttgaacagactgcagtcacaaaataatctgtcgtacacccatcacagaataaaggccccgtatttaggtcagacttaaattattttttaaaaaagaaacaaatactctcacactcatttccaaagacacacttgggatctgaacgcctgattgctggctttcccaagccctcccgagcagacaccctgatccctctagtctaggcagagagggctcggaaaggcagctggggctccggtggctcacgctggcaggtgagtcagcaggctcatgagctaggatgattcgacgcttcgccctcttggatgtggacacatttccaactcctaccaaagccagagctggaatgctgctctgaggctgtcttgctctcctgtcttcttagtggctactgagatttccctaagcagactcttaaattctctatgaaccaagaccaaaccacataaacagaaacggccctaaagaaagaaacgctggaaaacagtgacgaagccagcctgatatggctgtgaagcgatctctcccgctagcttgtccttgccttgttctgcctgcagaacgccagggacactggagaggggcagccgccctgtgcccaccctcaagggccagtgcagggtggggagggatggggacagggcataggccgactctctggcaggttccagaggtctgtatcttgcttaggcacttaaaaaacataaacaaaaatttatccttgaaaagtactgcatacccaacgtgaccatggccgtggaaggcagggcgagcccgggggggagatcatagaaggctgtgggctcttccaggggaggcaatgatgacgcacatggtgtctctcggcagggggagtgtcctgccttgcagccagggtgtgtctgaagacgccagtgctgtgatggctcagggaccgcagactcggcccagcagaggccttcctgtgaccgtgctctacagccccccgggaagtggctagaagaggcagggatggggaggctcctagggcctgatctagacgcccgccatgggtcggggaggcacaggctgcacacacttgctttctagagtcaccatgaggcaactactaggaaaagaggaggcccttccgagtgctccggcaaaactgaggggcagtcgggacgccctgcccaagctcccagtgcttcgaaagaaaagctccactcccccacatccagaactttggttttggtttcatggtgcccattttcagagatgcagtattaaggggatcaccgattctaacataatgaaatgtggttttcaaggcaaaaaacaatgctgcttgaaagcagccaccgctgagcacgtgtcttcctgcagcccactcttctaactctgtgcctgcccgccgtgaatctggtttaagaacaaaagagttcaatgcaacatcaccagagtggctgctgcttacattagtataacactaatgtcattctgtgttcgggcttaatagctccaacgaatgatgacgtggaaaaatgactctcacgagtttacgctgggatcttagttccagtaacggaagaaaaggagaggtttctgtgctcaaaggaagccacaaaacatgactgaaattgagactcagcccgaagtgacaggaagttgaaaaagtcttaaagggaagaaggaataagccttgaaacacaaattctgtgacttgtcactgccacagacactggtttgtgagagccatgagttccttccgagggaggaatcaaactgctcccattccaaaatcccaatggcaccccagccaccaccagatgcaaaatctggaccgataacaaaatgcaaggcacatataccttttctctttcaaattaaggaggctttttggggattggaggttggataataacgtaactgtgtacctattacaggtacagaggatccagggagactctcacgaggaccagtccacagctgtggccttgcttctgaggtggttccaagatgcccacgacggggcagagcagatcagaagagaaagaccatgagagagccaacccctagaggaccacttacgtttgacggaaaagaggtagacaagggaaggagggaagaaatgtggaactttagttagctgagtcctcaggtcagcttggtacccatgtcccttgttcaatgtccctgacaagttaccacagttccacgtgaaatgtggcaggacaggaaccagacctctacctcaaaggagctcatgcctttgctggattctgggttctagaaagttcttacgctgaccccaaatcaagatatgtctccagcaactgttatttcttggcagtcagggcccatgaggaggcagggaggcctgaggcagagcagacactgatctaattccagaaccccagacccccggtttctagagaggaggaggggccagctgagcaagatgctcctgaacacagcaggagccccgaaggaacggccagggtagcgctacaagagctggagagagaagatgggaagtgcaagagggtttcctggtctctgccttggctaactgcaggcaaggggtgccggagttcaagttcccctcggccacacaggcttcccaccctgtcaaccactgcggcacctccctgcactcctgtcctcatcactgaccagggaggaagactctggaggggccctcacgtccagaccctcacggagggagttcagctcacagaggcgggggcgatgccacagtgcgcctgggaggctacctggcactgctgcgtgagaaagcaaaccaggttagtgttcagagagggcagaccatcctatgtggtctgttctttgaagatgaacgtcctactgaaatgaaagaaatgaggggagacttgccttgccaagggcaaggtgacttgcttggtgtcgggtcatgaggcagcacacatgtccagcacggtgcccagcacacagtacgtgctcagaaaacatgggctgtattgactttgaggtggttgggagacctgtgcatttgtctctgtagtattatgatttacaatggtggcatctttagtttcctataagaataactaacttctggggtttttgttcaaaaaccacatatttcatgggtaagcactgtctcaattttcactgattttggtaagctgagttacggaaaagggtgggcgctgctggtaaaggaatatatggttggggttttctgaatcaccagagtggcctgcagaagcatttgggaagggaggtgtctctccaacttcagttcttttgaagtagcaccatccctgaagcagcacctctaataccttgatccctaagacaggggctccattagaaggttttaactgtggtgttaattgtgttttctttgagtgtaggtggatcatcagaatgttctgctgacggttttaatgcatgtctcacaaatcatagaattagactcatccagtcagctcttaccatctctaagcttaagacggattctaaattctaatggagacagtcatattttagcagctgggaaaataggaaaaggaatgctctactctttgaggtcataaatctacaatcattccagttgtcataaagataggatcccaaagaaaacagtttcaacaactgcatgcatggatcttgaatgccggtgtgcaagggctgggtgggaatgaggttgctttcagagcctatacgaggaggaatactgagggaatactagacatttctttgtaggtattttgtggggaatgaaaagataagattcccaagccctaagagcctttccctaaattctctaggtgtgtgtattttcagggaagaggaaaattttaaatcagcagcctacttcagcattctcatgaaactgaattgcaactagcatttcaactaggttaggattccttttggtatgtggagggggaaagatctgtacaaagagaagcagcaaaatatgaaaaaaggccagagctgtattctccccagtggctagcctaaccaaccccggagtgtccagacctagaaaagaaaaggctaacggtcctgggctcacccagcacaagtgcgagcctcaagggcacgaaacagcttacaaaaggccatttggcactatgtctggtgctggtattcttgtagactcattcttgatcatataattgaaaaaagacctctgcaagtgatgggggagaaaaaacaaacccacattctagggaaaggtgagttggtgactcagcagctcctgtctagtgtgacacttctggagaagagtagggggccatggtcagggactgtgtacggcatcaagcccacatgatgtcccgtgcaacagggagcatggaagagacaggaggaagagcgggagggagagaacatggacttgagtgccggggagatgctcacactggcacagcagaacagtggggaagactcagggcaacggcaacggcgggagtggggcagctgccgagtaaggggtgtgagaggagcgtacagacacgtgtcccgtgctccagtagctttagaatgtcgtgaatagtactccattcacgcctccacctgtttaaagcctgtgttagttatatgtgtcctgtcatgttgtctgctttgagtcttaggattcaatgaggaaacctcgattcaattttctgtaaacttctgtttgggaaatgctttctgatagtgacggcaatggaaatatcaagcaaccaagggaaatctgaagatcccagagagcccagcaagcagcaacatcctcgagttaggcaagcaagggcccggagctggccagaccatgggctggaatgcagtgggggccggtcagaggggcttcttctggggtcctgactgtggtttctgccagaggtggagcaagttggaactggatgttgagtgaagtttcaaagaacttagaagtcaaatggggaacaataatcaaaggcttccattttgaagctgaaacaactccaaattctgctgtttcacttaggggagaacacgagcaccatgtcattattttagtttatggagctgctgttccaaatgttcttgggagcattagtgctaagagggaacaggggatgggagcgctgccatttccaatcacataaaagacagaaattcttttaattatgaccatgccaatctacatcctgctaaaacagctaattacatgtcaggaggacactcagtcattcagaacaattgccattatatttttatat

SEQ ID NO: 501 - DNA, 7855 bp, Homo sapiens
cagacggaagccgaacgagttcctcggcggctgcaggatgggggactccaaagtgaaagtggcggtgcggatacgacccatgaaccggcgagagactgacttgcataccaaatgtgtggtggatgtggatgcaaacaaggttattcttaatcctgtaaatacgaatctttccaaaggagatgcccgggtgtttgcttatgatcattgtttctggtctatggatgaatctgtcaaagaaaagtatgcaggtcaagatattgttttcaagtgccttggagagaatatcctgcagaatgcttttgatggctacaatgcatgtatctttgcctatggacagactggctctggaaaatcttataccatgatgggcacagctgaccaacctggattaatcccaagactttgcagtggactctttgaacgaactcagaaagaggaaaatgaagaacagagttttaaagtagaagtgtcctacatggaaatttataatgaaaaagttcgagaccttcttgatcccaaaggaagccgtcagacgttgaaagtcagagagcatagtgtgttgggaccttatgtcgacggactttctaaactggctgtcacaagctacaaggatattgagtcgttgatgtctgagggtaacaaatctcgcacagttgctgcaaccaacatgaacgaggagagtagccgatcccatgcagttttcaaaatcaccctcacacatactctctacgatgtgaagtctgggacatctggagagaaagtgggcaaactcagcctggtggatttagctggcagtgaacgagcaacgaagacaggcgctgcaggggacaggctgaaggaagggagcaacattaacaagtccctcacaaccctcggtctggttatctcagctcttgcagatcagagtgctggcaaaaacaagaataaatttgttccatatcgtgactcagttctcacttggctgctcaaagacagcctcgggggtaacagcaagaccgccatggtggctactgtgagtcctgcagctgataactatgatgaaaccctctcaactctgcggtatgcagatcgagccaagcacattgtaaaccacgctgtggtgaatgaggaccctaatgcccgaattatccgggatctccgggaagaagttgagaaactccgggagcagctgaccaaagcagaggcaatgaaatctccagagctaaaggaccggctggaagaatctgagaagctaatccaggaaatgactgtgacctgggaggagaaattaaggaaaacggaggagattgcacaggaacgacagaaacagcttgagagtcttggaatatctcttcagtcttcgggaatcaaagttggggatgataaatgcttccttgtgaatctgaatgctgacccagctctgaatgagcttctggtgtactatttaaaggaacatacattgatagggtcagcaaattcccaagatatccaactgtgcggcatgggaattcttcctgaacactgtattatagacatcacgtcagaaggccaggttatgctgactcctcagaagaacaccagaacatttgtaaatgggtcatctgtctccagtccaatacagctacaccatggggacaggatattatggggaaacaatcatttcttcagactcaatttgcctaaaaagaaaaagaaagcagaacgagaggatgaggaccaggatccctccatgaagaacgagaatagttctgagcagctggatgtagacggagactcctccagcgaggtgtccagtgaagttaactttaattacgaatacgcacagatggaggtcaccatgaaggccctgggcagcaatgatccgatgcagtccatattaaacagcctagaacaacagcatgaagaagaaaaacgatctgcactggagcgccagaggcttatgtatgagcacgaattggagcagctccggagaaggctgtctcctgagaagcagaactgccggagcatggacaggttttctttccactcgcccagcgctcagcaacgcttaagacagtgggctgaggagagagaagcaacgttgaataacagcctgatgaggctgagggaacaaattgttaaggccaatctattggtgagagaagctaattacattgctgaggagctggataaaagaacagaatacaaagttaccctacagattccagcctccagcctggatgccaacaggaagcgaggctctcttcttagtgagcctgcaatccaggtgagaagaaaaggaaaaggaaagcagatttggtctttggaaaaactggacaacaggctgttggatatgagagacctttatcaggagtggaaagagtgtgaagaagataacccagtaatacgatcatacttcaaacgtgctgatccattctatgatgagcaggaaaatcacagtctcattggggtggccaatgtcttcctcgagtcacttttctatgatgtgaagttacaatacgctgttcccatcatcaaccagaaaggagaggtggcaggtcggctgcacgtggaggtgatgcgactcagtggtgatgttggggagaggatcgcaggaggcgatgaggtggcagaggtctcctttgagaaggagacccaggagaacaaactggtgtgcatggttaaaatcctgcaagctactgggttgccacagcatctgtcccactttgtgttctgcaaatacagcttctgggatcaacaggagccggtgattgtcgctcctgaagtggacacctcctcctcttccgtcagcaaggagccgcactgcatggttgtctttgatcattgcaatgagttttctgttaacatcaccgaagactttatcgagcatctttccgaaggagcattggcaattgaagtatatggacataaaataaacgatccccggaaaaaccccgccctgtgggatttgggaatcatccaagcaaagacacgtagtcttcgggacagatggagtgaagtgaccaggaaattggaattctgggttcaaatcttggaacagaatgagaatggtgaatactgccctgtagaagtgatttctgcaaaggatgtcccaacaggaggaatcttccagctccggcaggggcagtcccggagagttcaagtcgaagtgaagtcagtgcaggaatctgggactttaccactgatggaagaatgtatactgtctgttggcattggatgtgtcaaagttagaccgctcagagcccccagaacacatgagaccttccatgaggaagaggaagacatggacagctaccaggatcgagatttagagagacttcgtagaaaatggctaaatgcattaacaaaacgtcaggagtacttggatcaacaattgcaaaagcttgtcagtaaacgtgataaaacagaggatgatgctgaccgtgaagcgcagcttctggagatgcggttgaccctaactgaggagaggaacgcggtgatggtcccctctgctggcagtggtattccaggggccccagcagaatggaccccagtacctgggatggagacacacattcctgttatattcctggacttaaatgctgatgatttcagctctcaggataatcttgatgacccagaagctggtggatgggatgcgaccttgactggggaagaagaagaggagttctttgaattgcagattgtgaagcagcatgatggggaggtgaaagcagaagcctcctgggactccgcggtgcatggctgccctcagctcagcaggggcacgcccgtggacgagcggttgttcctgatcgtgcgcgtgacggtccagctcagccaccctgctgacatgcaactggtgttacgcaagagaatctgtgtcaatgttcacggccgccagggttttgcacagagtctcctaaaaaagatgtctcatcgaagttctattcctggctgtggagtgacttttgaaattgtctccaatattccagaggatgcccagggagtggaagaacgggaagcattagcaagaatggcagccaatgttgaaaacccagcttctgctgactcggaggcttatattgaaaagtacctcaggagcgtgctggctgtagaaaacctcctgactttagatcgtctgcgccaggaagttgcagtgaaggaacagttaacaggaaaaggaaagttgagcaggaggagtatcagttctccaaatgtgaacagattgtctggaagccgacaagatctcattccatcatacagtctaggcagcaacaagggccggtgggaaagtcagcaggatgtatcccaaaccacagtttccagaggaatagctcctgcccccgccctctctgtttctccccaaaataaccattctccagatccaggactcagtaaccttgcagcatcctacttgaatcctgtcaaatccttcgtgccgcaaatgccaaagctcctcaagtctctctttcccgtccgcgatgagaagaggggcaagcggccgtctcccctcgcacaccagcccgtgccccgcatcatggtgcagtcagccagcccggacatcagggtgaccaggatggaggagacctggcctcgctgacagctgccctggccaaggccgacaggagccacaagaaccctgagaaccggaaaatcctgggccagctgagccgctgccttagggcgaacttttctgggggtgcccggccccttttgagccctgccagtgacagccctgaggagccaggagcccggtggccccttccccaggggcagggcgatgaatgctttttgcacgacacagggctggtgacctccctgggcctctggaagctttgtttcttctgtacccgggtaaagtgggggcctcaactgtgcctcctccggtggatggaaggttctgggtgcccgcaggggctgggggatgctaggactgagaccctgggtggtgcagcgcctggtgatcttgctgtgtgcctgtgcctggggccttatgttgctctttctatcatttccattctggtggccccactaatgtcttaacctaaaccataattgtaaccagtgcctttcctccccactggagggcaagcccccccacccacccaggatgtcctggctcactccgcaagccccccagcctcccaccctggtcccagtttcccgcaaagtgcctctgggggaccccccagcctcccaccctggtcccaggttccacaagtgcctctggagggccctgggctctggcagatggtcctggtgccccagacgggggccgagggcctgagcccccccatccctcctctgccagggtttcttagcggtttctctgtggatgttttggcatctttagacacctggaaagtctcttatgtttgccgtttattcccttcacagaaggcttggaatgtatttatttatatttattttttcaaaatccgaaatcatttgcgagccgcaatcgtcgtctgcctgtgtgggggggcccagggcctgccttgcacgttgcagcctctctggccattgcagagctgctggcctcctgcccaggtggagggtcctggggacggcagaggataaagccccctcctcacatccctctattgcggatccacagtggccttactcttaacttggatgagagcaaaaacctgggagaatgatgtgcttctgtagtcggtgacaaaggaagaggcattgctactttatttggtgcacttttggtttctaggaaggtctttgggtcattttaacttctcggcaactcccagactctcagagtgtggggctggggcctggcggctgggctggtgcagggagtgtgctggttagtctccagaccctcacagcagccacgcccccaggcccaccgtgcatggtgtgggcgggacagccggaagcttccggggtggcctccacctcctggctggggcacttatgctcccagagcctttggtgccaggtttgtgggatgggggttagcgtctatgtgtggaaggccaccaatctagggacaggagtcctgggtcaagattcacacagccacccttggagctggtttctagttctcacatttagtcaacatctagaaagcgctgcggaaggctctggttctctagggacttgaaggcgccaacagagtagtctccatggtgggcctgtcccagccctggctgcgaggacaggttgtctttctctccccagttggcgagggacacgaaggctgcggccgggctggcagagggcccggcccctggggggaggcactcctccagggctctccctgtccttagccgattttgagggaaccctgtggcacctgtccctggatgaagagctgtcacctctgccttgccctttaactcaacccgcttcccagcacagcggctttctttttaaaacctgtttcactgagaagtttgtttttgggtccgctggtgtcactatggcctgggtgagaggccagcactgctgctgccctgaggggaaacgcctgggccgtgtagtggggacgctctgggaatggtggcggacgggcagcgtgggtgggacctggcacttcgtggtggctgagccatccacccagcagcggcctcctgtagcaccatcttgggaaagtcctgggggacgtgtgtgtcgtgctttttaccatcggtttgacttacagtggagtagaacgagccagagttcctgacttgagcaggtggatttgggcccaggccctgttcactcttgcttctcggtgcggactaatgtcagcttgtggctgggaaagagggatgtgcagtgacgtggtcaccaaggcagtgagccccgctgaccccgggccagcacttggcaggcaggaggtgcggtctccagagtggtgggccagggcgggctggcctccgtcttctatcttcttttcttgcctccctgaccagcagactcacctcccaagaacgcctgcccgcccacccgccttaggactcccgatgcgctcctggaaggccccaggagtggcaccttagtgtgggtcggcccgcagatggcacccaaggccgggaagggcagtaactgcacacgcggcgctgtcagagatgggggtgggggatgcttctgggggccctgcctccccattgtgtgcccagaacatccctggccccaccccgccacttccctcgggcccttatgaaggactgaggctccagggtgagaaggctcacttctgccccgggcactgcgtccagcagcagaggggacagggggcaggtgtgtgactgggttcctgggtacccaggcctgaccagagggagcgggagggcagaggtgaggagggggaagatgtttctgggcctaccaaggttcaacaagagaacggagctgggaatgtgactgctggagcctgagaggtggaggagttctgatcccccgttacttcctagcattttctcctcttgccttaaaagttccctgtatgtgaaacgggaagtcctgagagtgtgtgttggtggctgtgcgcacgcacacaagacgggagtcaccctgtgcttcctgcccaagatactgacccattgaacccccaaagcatctttctctccacaaagtccgtggtgccttcctggtgggctgcagacactaatggtgttggggggtcttggaacagcttctctatgtgtggattcgtgtaaatgcgaagagttcacatataaagaagtgactttgattctgtgattatattgatttggtacacagtaaatgggagtttaaaaaatccaaagactctaatgacttgtaaagactctaatgatttgtatcatgtaatgaactaaaccacctgtaattttgtaccgtatgtgtctttccatcaaatgaccaacagcttctcaataaaaccagaccatttctcacctgc

SEQ ID NO: 502 - protein, 1493 aa, Homo sapiens
MGDSKVKVAVRIRPMNRRETDLHTKCVVDVDANKVILNPVNTNLSKGDARVFAYDHCFWSMDESVKEKYAGQDIVFKCLGENILQNAFDGYNACIFAYGQTGSGKSYTMMGTADQPGLIPRLCSGLFERTQKEENEEQSFKVEVSYMEIYNEKVRDLLDPKGSRQTLKVREHSVLGPYVDGLSKLAVTSYKDIESLMSEGNKSRTVAATNMNEESSRSHAVFKITLTHTLYDVKSGTSGEKVGKLSLVDLAGSATKTGAAGDRLKEGSNINKSLTTLGLVISADQSAGKNKNKFVPYRDSVLTWLLKDSLGGNSKTAMVATVSPAADNYDETLSTLRYADRAKHIVNHAVVNEDPNARIIRDLREEVEKLREQLTKAEAMKSPELKDRLEESEKLIQEMTVTWEEKLRKTEEIAQERQKQLESLGISLQSSGIKVGDDKCFLVNLNADPALNELLVYYLKEHTLIGSANSQDIQLCGMGILPEHCIIDITSEGQVMLTPQKNTRTFVNGSSVSSPIQLHHGDRILWGNNHFFRLNLPKKKKKAEREDEDQDPSMKNENSSEQLDVDGDSSSEVSSEVNFNYEYAQMEVTMKALGSNDPMQSILNSLEQQHEEEKRSALERQRLMYEHELEQLRRRLSPEKQNCRSMDRFSFHSPSAQQRLRQWAEEREATLNNSLMRLREQIVKANLLVREANYIAEELDKRTEYKVTLQIPASSLDANRKRGSLLSEPAIQVRRKGKGKQIWSLEKLDNRLLDMRDLYQEWKECEEDNPVIRSYFKRADPFYDEQENHSLIGVANVFLESLFYDVKLQYAVPIINQKGEVAGRLHVEVMRLSGDVGERIAGGDEVAEVSFEKETQENKLVCMVKILQATGLPQHLSHFVFCKYSFWDQQEPVIVAPEVDTSSSSVSKEPHCMVVFDHCNEFSVNITEDFIEHLSEGAIEVYGHKINDPRKNPALWDLGIIQAKTRSLRDRWSEVTRKLEFWVQIQNENGEYCPVEVISAKDVPTGGIFQLRQGQSRRVQVEVKSVQESGTLPLMEECILSVGIGCVKVRPLRAPRTHETFHEEEEDMDSYQDRDLERLRRKWLNALTKRQEYLDQQLQKLVSKRDKTEDDADREAQLLEMRLTLTEERNAVMVPSAGSGIPGAPAEWTPVPGMHIPVIFLDLNADDFSSQDNLDDPEAGGWDATLTGEEEEEFFELQIVKQHDGEVKAEASWDSAVHGCPQLSRGTPVDERLFLIVRVTVQLSHPADMQLVLRKRICVNVHGRQGFAQSLLKKMSHRSSIPGCGVTFEIVSNIPEDAQGVEEREARMAANVENPASADSEAYIEKYLRSVLAVENLLTLDRLRQEVAVKEQLTGKGKLSRRSISSPNVNRLSGSRQDLIPSYSLGSNKGRWESQQDVSQTTVSRGIAPAPALSVSPQNNHSPDPGLSNLAASYLNPVKSFVPQMPKLLKSLFPVRDEKRGKRPSPLAHQPVPRIMVQSDDIRVTRMEETWPR

SEQ ID NO: 503 - DNA, 151052 bp, Mus musculus
  misc_feature (1)...(151052): n = A,T,C or G
aacctcaaacatttagtcaatatatcgtatctccaaaagagaagaaagccatgtagagtaaagagctaccgtttatgacttacaataatcttaaaatcaagctgaggtgctgtaagtgcagtcaacatgcacagtgcaaagcacacgtgttgtgtattcagaatcaaggttgtaatgaagtcatgtgacataacacagatgagcactgctagaaacatacctgactccttacatgtttaatctgaggttttagtcactaattattacggcaattttttttttgtgtcccctgcccatgcccttgtggggtctgtcatttaagccaaagaagtttgggtacaggtgagggctaaagggagaatgtaggggggtgtctcataagaacaagcactgcctgcttcaggctagggatggttagatggccacagctactggagatggtaaagactgcttagaagacagagggtaaggaatgggcatgggggggggggcggctagagataacgcaagatacattgtaataagtcctgcaacattccaactcttccccggtcactgaagtacaaatcagtcagtcagccctgtaggaaggaagttcattgtaaagcatggttccctctaggaacttttcttcatgaatgcccagaaaggaagctcttaatgtgaaggaacaggcagccccttcacaagaggcctctgtccaagccaggctcagcatcgccttgactagcaaaaagacaagagactccaatttacctgcccatcccctctgcctcacagatgccgatatcaaaggaatcaaaaggaagatacctaaactctgtctctgaattttttttcttttcctcattttttctctttactgagtagaattttagtatcttttcttagcctatgtttttagcttccttcttgtgctgacctaatttattttgcataatttcagcaccatgaatctgctcatctctcatgcttttcccttcctcttgctaacaacttgctgcttcttccttctgcccttttctgtgctcttcctttcattatccttgttgtacttatactattagcgtaagttttaacttcatctcttactaagttattatgctgttttattttctaaggctttggtgatgtagtcgttggcttcaaccaatccattacaatcctatgtctaaacctgttgttgtgttgacattgttgctttcacagaactgttttctcctctttaagtgtctgtgtggtcttgaggattgagccctcagtgaagaactgtttactaagaagacctaaataaaacaaagcctaactataccccaaatgggaagagagccttcccaactgatgcacaaaccccaacacagaaactcaacaagcatataaaatcaatgcaataaactccaaaagatcatagttccttaataactgtgcctaaagagaattggatgattaaaacaatgtacaaaggattctaaagtctaattataagagacaagaaagaagtctcagtgtttataagtgatactattcttgcagaggacctaagttcagtttccagcacccacaattgatggttcatccctacctagaactctagttccagggaacctgatgcccctccacagtcaatacactcgcttgtatatacctacacaaagacatatacagaaacatataattttaaaaattaacgcttttttaaagtctaaatttaaatcaatgctttcaaagacgatacaaacaaaaagagaatgagttaaaattgtcagttcaggccttggataagaaagtcaatgatgcagatgaaaacaaacactttaaaacatgttggaaagtttttaaaaatgcaataagtcacatttaaaacaagctggaaatcaaccatatatgagatcaagtaaaaacatcagggactgaagacacagtcaagggcttattataatcaaatctcagtaaagaaaagatgacaagcatgacatgcaagaactcagggacatgatcagatgtaccatctcataagaattgaagaaggagttataaactgaaagcataaaatatttatttcatggggctggtaagatagctaagctgttaagagcactgactgctcttccagaggtcctgagttcaattcccagcaaccacatagtggcttaaaaccctctgtaatgggatcagatgacctcttctggtgtgtctgaagagagtgacagtgtactcacatatatacaataaaggaatctttaaaaagaaaaataatgtttatttcatgaaagatgccaaagtttagggaaacagatggacatccaagcaaaggaggcatttaggacccccagaagacatgactagaaaggaacccctccctgatccactatagataatatgctagggctaaagatcaaagaaacaacatcacaaactgctagagaaaattaaaaaggcaagttcatcagaatatcgaacatcttagcagaaaccctaaaagccaggaaagtaaaattaactgtcaacaaagatcattatatccagagaagcaatccttaaatattgatggagaaataaagatttcccaagctaagcatctactgagccaacatttcagaagacacttgaagggtttctatacaccagaggaagaaaaaagaattgtaaacacaagagctcacaaaggagtatgctttgtaagaggagagatcagcaaatgagaactaggaaaaaatcgaccatgtccaattcagcaaaccaacaaatccctaaaatgaatagtgaagaaagaaaagaacaaacaatctttgattcaactaggaaaactgccaataaattataagaacaagaaaattcttcttaacaataaccttaatatgaatggtcttaactcttcaaccaaagagcacagagaaagtgagtgaactaaaaatatgaaccaactgtttgctgtctgcaagaaacatacctgactgtcaaagcaaaaaacagaaatgacaataatatactaagagattagaaggcaaaaccaagcagaagtgggtatatccgtatctcacatagttcatttcaaactaaaattagatatatgaagaaggttactgcatattaataaggggaatagtccagaagacacaagtgttgacatgcttaattttataaaatagacactactcaacataaaataacagatctatctgcaataagagtgtatgacttcaatctctcactcttgtcagttgatgggtcttccaaacaaaagataacaaagaaacctcagagttaatctgctttatagacaaagtggacttcacaaacatctccagaatattccatgtaacacgttctcagtattccatggagttttccttcaaatagatcacattttatggcataaaacctgttaacagaaaaaataatctggcatcttatcagatcataatggaatataaaaaacaaaatcaggaaaactgcagggtctatgtaaaggcgtgaagcatgaacagtgcaaccttggtgtggctcactgaaggaaacagtggaagggagacaattcctagaatccaacaaagccaaaacacagtttgacagaacttttgagatgtactaaaggtagctccaaagtgggggtttatagctctgagtgtgtaaatatagaagaaaacctgaaagaagcgtctagagaaatggctcagcagctaagggcacacactactcttgcagagtattggagttcagttcccaccgcctacatcaggtgatttgcaatcacctgtaactctggccccagcggaactctattattctgactttctgggacatctgcacacacacacacacacacacaccgaccacatacacataactaaaaataataaaactaaatcttaaaaactgttaagaatacaaataaacaacgctacacttccaggtcttagaaaaatgaagcaaacaaactaaactccaaaatagtagatggaaagaatgataaagatagggcagaaattaatgaacttatcattaaaagaatgaatcaagcaaagagttgtttccttgaagagataatatcaacaaaaccttagcccaaccaacacaaattaacaagattagagatgatgggaagggggcacattagagcagataataatgaaatttagagggtcgttatagcacactttgaaaaactatttcagaaaattagaaaacagaagagaaataggtaaattcatagacacatgtctaccaaagttaaatgaagagcctataaactatcagatctataacaattagtgacattgaggccctagaaaagtctgttgcatttgttacttttattgtcactgtgatcaaatacctgcaaagaggcaacttggggagcatttagtttgggttataattagccagaatatactgcataatgtcagagaagccatgttggtaggggtgtgagggggctagtgaaattacatccctttggaatcagggagagaaggatgctgcttccgtttctctctgtattcagtccaggccctgtaggatggtgctacttacatttagggtgggtttttcctactcagtgtcgtagttactgttctattgctgtgaggagacaccatgactaaggaagtgtatagaaaaaaaaaacatttaattgtagccttgcttatagatttagagggtgagtccctaatcatcatggcagcaggagacaggtatgtcagagggtgctggatgtcagagggcatttaggaggggcaagaactaacaaatgacgctctggagatgggtcgttttgcatggctgccatgggtaaactctgaatttctgggccttcagagaccccatctaaggattgatttttgttgttgttatgtctttcctatcattgttaaatagtctaatgattcctgggacttagccccaccctattgggtagatttcctgcaaatcaatgaagatgtcctctcttgttgtaatgctatgtagacaaactgatggtttcataattcctaataatgattctatagaactcctaaatttatacacgtagttttgagccctctatagtatgaaagctgcaattagagttctgtaaatcttcatgtgtcatgaactaattgcactaggatatagaaagctggcttggaacaaatttacgatcaggaaaacattccttctaggctagctgtgaagccattatctgataacacaaggtcataagcaattcattgtaggtgtaaggacagaaaataacatattggctggaactatcaatacaaaacttcaaaactaatgagacacaaggtagatgatttgccttttgacaaaaccatgctgacttttatttaacatcaaattattgcttttaaactttcaatgaacttatagagctagaatatggataatgaatgtttagttaggaacatggaaatacatggaaacatttcttctgtatctccttattgatttatgatgaacttttcaacatgaagatacttggcataccatgtggtcatttgtcctgagaaagtataagaactaagaacgacaatgggaaaggattctcctttttccttcctctcaggaataaagatttgagcctcttttcaaagtgagtgatttttctctgcaagcatgactttctctggctggcagagttaatacctgatctcaaatggtattacagagcagtagtcataaaaaccacagtactagccccaaactgacacataggccaatgggatagataggatggaggacttagaaataagcacgggtacagccagctaaattctgatagaactgtcaaaaacacatcagagaaccagcaaggccctgaaggggagctgggaaaccagaatttccacaggtacaatgaaaccagatccttatctctacacaaaagcaattcaaactgaccaaaggccttaacttaagacctgaaactttgaaagtgctagagaaaagcacaggcaaagcacttcaggacacagtcccagcaaggactgtagaagcaggacctgctgaggtttggtctgttggctgtgtattgtaatgctaaattccttacctgaatgaaggtctagctgccagccacagttaccaactttttctgtgcaaaacttgctccttaacttaaaactattggttaaataaaaatgtctacaacccattgctggaggattagaggtaggtaggttttaagttagctggttgggtgagagaggaagagggacaagggaatgggaaggaggccaccacgaaagaagatggaccgtgagcacctggccatgagtaataacaagaatctggggcaaacctctgggaagaagccaggccagccattagaaaagtagataagtggtgacccccagtaattgtcaaagccaaataaaataaccacagtctgagtctcattcattcgtaagctagatgtggataagtttaaattatattaaattaaattagaccctaagaacacaagctcccacgttcttatgacatctgtcaatctcaagaattgacaaatgggaatacatgaccttaagaagcatctgcactatgtatcaaaagatggcctagtcggccatcactggaaagagaggcccattggacacgcaaactttatatgccccagtacaggggaacgccagggccaaaaagggggagtgggtgggtaggggagtgggggtgggtgggtatgggggacttttggtatagcattggaaatgtaaatgagctaaatacctaataaaaaattttaaaaaaaagaagcatctgcacaacaaaggaaacaatcactgaagtgaagagacatcctacagaatgggagtgggatggggtggggcagggaggggtgaggtgggggagggctctgccagctacatacctgacagagaggattagtatccaagctacataaagaactacaaaaacatcacaaaactaaattgtctgatcaatagatggacaaataaacagttctcaaaagaagaagtacaaaaccatcaataagtacttgaaaaggtgttcaacatccttacccatcagggagatgccaattaaaactactttcagagccgggcgtggtggcgaatgcttttaatcccagcactcgggaggcagaggcaggcagatttctgagttcgaggccagcctggtctacagagtgagttctaggacagccagggctatacagagaaaccctgtctcgaaaaacaaacacaaaacaaaaaaccaaaaaaccaaaacaaaacaaacaaaactactttcagattccatctcaccagctaaggctagctggttaacagaaaacgtctgtgtcattcagccataaatcctgaggaaagagttgaaagaatacaagttagacaccacagagactcttgatgtccatgtttgctggatctatatgcacagaagccaaggtatagagtccacatggatgtccaccaacagatgagtgagagaagacaatgtggtacacagacacacacgagttttattcagacacagagaagaacaaacaattatgtcattttttttctgaaaaataaatgaaactggacatcactgtgataagcaaaataagccagactcagaaaaatatcaaacgctttcttttatatgcagaatatagattttaataattatataaattgaccttggtggtgctggctgcttattcttcctatttagccagaggaaatagtgagactgtctagggcagcagttctcaacctgtgggttgtgaccccctttgagactcaaatggccctttcacaagggtcacctaagatcaacagaaaacacagatatgtgcattgtgattcttaacagtagcaaaattacagctatgaaatagcaacaaaggttattttatggtgggggggggggtcaccacaacacgaggaactgtactaaagggtggcagcgtaggaggggtgagaaccctggaggagagtgaacaccagcccaacaggcaagacactgggtagtgagttagcagcagagtacctgttataatgaaatatgctcgtttttttaagaagtgaccaaaaaaagtgctcagagaagtttgaaggaaataatatgccaggtaaagaatacaacgtgtgtgcacacagaacagaagaccttactagagcagagatatgggtgtagttcatatgtgtgcccacatgagggcagcacacacaaacccagctagtcttcaacagtcagccagctgccattccctcaggtagatctcgctttacaccacaagacgctttacccactctttcccaagtgcaaggattcagaaagccaccccctgccaacaccttacgccaccccactgctcacaccctctggtagttttttttgccctgtggtcatgtaccccatactctgttcacagtcttcactgctcccccaactctacccctccacttgtctttgagtgcggatagttgataaatggggcccttcaggatggtagagagggtcctgctggcccggcagatggaaggtatattgtggtgttgaggcatttgagggtggatgacgctagctttagattagggtttttagtagacatggaggatacagctaaaatctacattttgttacatcttaagacatatgaactttatagctttaattgattttatgattattgctattggtttttcgggacagggttgttctccgtagcctggctgtcccgtaactcactcggtagatcatgctggccttgaactcagaattccacttgcctctgcctcctgagttcttaattaattaagtctgctttctcttgagaagccatcaccaccactcggaaagatgagtgttggtagcttctgatggtctcctggggcagcaggtctgttgaacttggaggtgaagtagggtgaagaagtgtcatgaaaactgtggctttcacagggagttgggcagcttgatgttgcagtctcaggactgctactatcagagacagaactgtgactaaaccccaaaccccaaagggcacaggataaagatgtctggggcagggtctcctgctaagtccagctcactgacctccacttaggagaaagtcagaatctttctcgggctagagaagtaaatgatgtcgcaacttagtactttagatctgcctcaagtaccactgccttactgatgcagtaaagagatggccagcctcttcggagggtcacggatacaaactgatgcagggagagggccacaggagaaaatcattgtaaggcttctctagtcttttctggttttgttgttattaatgctgggttggggttgggttttggggtttggggtttttgtttgtttgtttgtttgttttgttttgtttttgagacatgatctctttcagcctagcctcatcttgaactcacctcatagccaaggatagacctccagagcgttggaattacagatatccaccacctacactcagtattatgcctttggttctgggaatggaatccaggctagacacacattctaccgtctgagctacattcccaaccccttccccgactgttttgggactgtgttctggtcctccagggtctgggctcagaaacccagtcctaggtgtttccaatcctgtaccagtcatatcgggcatccctaatatttatctgacctagggtgagggccatttcaaggtgtggagccatgggggccactgctgagaacatgggtcaggtctggtgactaaaggctgcagagaagggtgcctggaagaagccaggtgtggtaggagttggaggtcaaccaactgcaagaggtccggagcacctgaggaccccaattggggccctaaggcaatgggctctggcccccgggtcagccgggcagctccaggaattgcaggcggcatctatttcagagtttatggtaagaggttggagcctgcacacacagacagcacaccccaccctttaaggaagtggagaggagagcagcaggggtgtggttaacgaccgagaggaggagggggaaaaacaacctgtcagcctcttactcagcctctgcaggcagagccgcgcgtcctacctgcggcggctgcgctcacctggcccagcccggagccctggcccgagtccgcgcctcgcccgagggtaagtcctgcgtgttcctacccagcgccggggtcagggacacttcgatcgctcgacttaagtggaaagctggagagggtctacagttccagtccttcgggaagcttgagaattcctggaaaggtagccaaggacccagaaagtcggaggcgcggagcaggtgctttccctgagcttgccgccctgagctagggggttagggagggcgctagagaaggcatctatttttggagttctttttaagactaaagggtgtttctccctttttgtcctgttatcttattcagagaggggcgactaggggcacgattgaaatcggctcagcaacaatgcttgtctctaaaggttggatttgggaactccgaacccaaccgagggcttcagaacccaacttcagctctagctcagacctctgcccaggcacggcgcgctcttctccacagtgcccttcggcacccatgtggcctatcttcccacccctgcaccacccctatccccagcctctgggacgttttgtttttgtttgtttgtttgttgttttttttccctgaagctggagctttaagacaaacggggttctccaagaggaaccataccatagtgtgtgtagtgtgtgtagtgtgtgtgtgtgtgtgtgtgtgtgtgtgtgtgtgtgcgtgtgtgttcgtgctgaagttccaaagttcacaccagccgcactggctcattttgaagctgctttccccatgccccttgagggttaagttctgggctgctgttcctgctgccaggctgtgcgtgggcaaagctttgggtgggtgaacagcgagcatatgggtgacgttctgaggcccaccaagtcctgccacctgccctcaccctcagccagatgacaccaatatctcccatcacccctatactggaagcaagattccgattccgctgtgctccttgaagaaaccaagctgggacctgagggttgggtgtgtgtgggtgggggggggcattagcccgggagaattggaaagcaggagggagaagaaccttagcagatcttgtaccagtctggagcccgctgagacaatgtgcatggtttggaaagggtaggggtaccaggcagccgcagtgtgctcaggtcaacaaactcttgcggttcacagtagctaccgggtgggggcgggggcgcaagaaatgcagagcagggggtgggggaaaagtgactcacgaccctaggaaggaaggaagaagtcacattcataagaaagacctaactttggcaggacagtctgccttctttctttcacttactagcatccttcctgaacccaggtactcctgtcaggtgaggggagacggaggagcctgtagctccagctgcccagctagggcggagctaggatgggcgggactgtcgtgagaagaaatgaagttccaccaattacagtgccagagggtgggcagggctgggcagggacaggtcctgaatctgtggcagaagcaactaagagaactgaagatcaatagggattaactaaccgaggagaagaaagcaggtcagagcctgagaagtacaaatccaagggctaagagcggcaagagataccggggaaaccgaaagtagccaagaagcccatcttgttaggagcctagagttcaggggccaggaggagctgcaaccttaaatagaggatgctccccagcctaggaaggcgtgctcaggctgccatggcaactcctctaggagcaaagcttggaacctcaggctgcttgaaacttcccagggtgcctccactccgggatggaggtgccagatttagcaaatgaaaacatggggcattcagatttgaattttaaatgtacaaatgtgttgaagacttggttctcagcgctaagtatgtctcatgcagtatttgggatatacctaatactccggcgttactcacagtttatctgaagctttactggatgtcctgagtctgtctgggacgcggaggctgatgttcttccgtctagactgcgaactaacccagcacctcaagagcaggctcagggcatatttattttgtgacaaatcctgacaggtccagttggaggctcattctaggactggtcatgatattgctattgagagaagaaaagcagcaccccagacagcttacacatctgcacagccgagggagggtctagggaccgtgaaagcagcttagtccacttggtagtaacttggaaagacactggaccaatggtcctagattcagacctatggggaaactgttggattcgctgagcctcagagcctatttgtcgaggtttagggtaggagccttgataatgtatgaaagccccacttgagtgctatgtatattaacttgaaacgacacattcacagtgacggaaagagcatccacaaagtgcctggggtgccatcttctcctgttcgagtttatagagtgtctggagaccgcagggaacctgcattggcttggttcctgtttctagtgagaaaagtttgtctctcaacagaggcgggagggagagtgagacaaagttatttcctcagggttccttgcccatccaggaccctgcttcaaagacagaagagacaaagggctctcttcctggagggcagcaggtggggagagaggactggctcaaaccttaattaactggagagaaatatggatggatgaaaagaaaatgtgctcaaaacacccaaaaatgcaccataaaattaggttttcattatcgtttgttttataataacttccttattagaaaactcaagctggggcaagaagaaggaagggcacccagtgaaacaggttctggctttaatgagaacattcctaaggagacctcctaaaagaggagagagagagagaaagggagaagagaggggaagggggagggagagggggctctgcaccctacatccagcccctcccaagcttttcacatccccttgctggatgctagcagaaacacaatcagaatcctgggttttacctgtcagacttgagactccagnnnnnnnnnnnnnnnnnnnngaagggagggagggagagagagagagattcccttgtgtactaatgggttgtattaaacggtccttttcttcagtgatgaatctctgcctccccagcccagcccattttgtccccagtcccttaagggtgccatttatccgatagaaatagatatattctgccaatgaaacattcaaatgatatgttgtttatatttacatgcccagggctgtgctagatctcacagaaaaggcaagtgtggctacaaaggcccaccaggttttcaaggaaaagaagcattacacacacacagagagaatgtggatgcatgtgtggggtgcaggccacacaatctatcagaagtcattgctcccccacacttctaactaagatggacaaagttcctcctagcattcctcccagagttatcatgcccagctcagagacgctcaggagcttttgtgtgcaacattccagcctcaccatttttcaggaatagaaatctccctaacccagggctgcttagcccttcctgattggtgcggtccccagtctctcatacacagctggggatttattatctcagactacctggcctgccggggcaatgggaacttcagggagttaactaagaggcggagaccagagaggcacagctgggatggtttgagagtcagagcaaggatgagagaagggaggggtgtgtgtgtgtgtgtgtgtgtgtgtgtgtgtgtgtgtgtgttgtgtgcttctcttatctttcaggctggcctcaagacaagggagggagagcaggaccctggtaacactaaaaaacaggaacttaggattacagtgactaactggaccttctctgtgaccttctggaggtcatttagctgtggcttccttatctataaggcagaggtggtaagatgatgtcatctgcattagccaggacacaaataaaagagaggtgacagctgccatcacccagggcagaacaggagagctccctattgccccctcctgagtcctgtgctgtgctgggtcagcctgtgagtgtcagagcattggaaatctagtggagaagccaggccctgagagcactggggctgtagacatgcaccaagaagtatagactattgttttattaattaatattatccctgagaagggatactcacataccaacttaataacctctgccatacataaaacacaacagacacacagtagatactcagaagtgtgaactctcccatgtcttgaaatttatgggctacatctgagcctataagaaactactggttgttgtggttgttgttgttgttgttgttgttgttttgtttgactgtgtagcacacaagtttgtggtggggcagggatggagtgggtgagggggtcgatcaagtgcctgtgtatgcttggtataggttggaggtcagcctcaggcattattatccagaatgccatccatcttgattttccagatgtgttgtagtttcccttcctgttgctgtgatcaagttctctggcaaaagcagcttaaaggtggggaaaatacagtcagccatggcagggacgtcaaggcagaagtcactggaagcagctggccacattatagcttcaacccatacatggtgtcccccacagtgggcgggtctttgcaccccaattactgcaattaagactctcctacacaggcaaccccagatcttagattctgttgagctgacaccgccgaccaccacaggttcatttaccatgaacttgctcattctgcccggccagggcgtggctagcaagccgcaggagcaagcctagcttagggtgaccagcaagcggtacaagcttagtctctccaccgcatggatcagctgtgccatttctcctgcctgcttctgctttaagttttctgagataaggttatcctgtgtaccccatcttggcctcagacaaccattgccactccacctgctgcacctctccccacaagtcctgagctttcagggatgtactaccatgcccaagaattttttttcccccggtttggggacagaattgaggctctcacaaatgacaggcagacacactctgagttccaatgagttccacctcagcttttttctgtcctattcctgaagccatagactacctctgacatgagaagagcattccccaggcggcaacgcagagaggcatgaggcaaacacccagtagtttttatcttggcttcccaactcccaagccagcatgctctgggtacagctcttggccaggaaagatgatacccaccgatacccatcagtccctggagcttgaagagccatttagtggtgtaggcagcagaacatggtggctattctttctaggccttttcatttggcatgcaaagctctgagctgtgtgaggaggtggcaggggagggggcagccttttgagtcactctgctgtttctcaaggtataattattactcgagatgacaatctgattaagagagcagactccaagctgcacattttgatgcatttctacctagatgccatgagcagattgatacagggtagagtttggttgttttgagagatagatcagacagactcaggtggtcttactggtgggcacctctctggattctggctctctctagcttttccttttccccagtgctaaaggggccaggacaaggcacatgacaatgtgattgactctaagatggaccatagccaagcccgggaagatggagcacctctatagctcacttaatgttttctcccttccaactctcctgacatagtcactaacattcctttaaccacaatttcgtgacacccccacctccaccacctccaccacctcctccccccaccattctctgccacctctccccaatttggtgtctttcctgtacccatgagcctgctgggattttcttcccagtttgaatttggctctcccacagggttcctctctgcagcagaggttctggccacttgaaacaggcacactgtgtcctggtttctaaagtagctttgtcctctttccacttcctccagtgcccaaagctctttgttgctcagcagcagcatgtggtgatagcacagttacagtcgggcttctcagttcacctccacaccttcagactctggggttgcctctccaggtacactcaatgctggctccccaacatctctacgtctgctcttagcaacatccggttcagccccttccactagtgacacggattctgggctctgatgttcagagtcatcaactgaagtagtcttaagggggttgtaagtcctgtgggtcccaagcttcaggcttagtgctatggaacctccacctgaatggtgcttcaaaatacccatcagtccctggagcttgaagagccatttagtggtgagtgaataaagacctgggcttgagagctggggctaaatagctttgaggaaatttctctactttttaatgtgtgtgtgtgtgtgtgtgtgtgtgtgtgtgtgtgtgtgtgtgtgagagagagagagagagagagagagagagagaccattgttattagacgcgttctcacgaccggccaggaagaacaccacagaccagaatcttctgcggcaaagctttattcttacatcttcaggaaaagagagcaagaagcaagagagagagaaaagcaagagagtgaaaaagcaagagagagagaaaagcaagaaaaagagaaaacgaaacccctttcctctttaaagagaacaacaattgcctcggacgcatcactccctgattggctgcagcccatggccgagctgacgttcacgggaaaaacagagtacaagtagtcgtaaatacccttggctcatgcgcagattatttgtttaccaacttagaacacaggatgtcagcgccatcttgtgacggcgaatgtgggggcggcttcccacagttcccccttttctattaataagagcaaataggccacccatattaatgagagtggagatagaggtcaaatccccagtgtgtaggtaaaggagccatgtacaggattagctcttaggctcacaggcttttacccagagcaaccctgacctgctcccgtgtcgttttgcctgggggaagggaactaggacactgaaccttcatgaaagatgacatgtctccctagaataggctcatatatgccgcagagcctttccattgcagtgcttagccttgcaactctctcgggctgctgaagcacactcactctatctcgtgcaatgagtctagcctcgtgagatataagagctgagtggccagcgacctattgcctaagcatagataaccatatatcaggggaagctccatgttctagtcctgcaagcgcctgggcaataaccaccttgtctctcctagtttgggccttaagcttacagaccaatcaaagaagcaacactaatccacagcaaagtgtatctccaaataacattaatcccacccaattttttaaagaaagaaaatgctgaggagatccaattgggtaatcctttggtcagcgacaggtccaagcgcgtggagttgacctgaagtctcaattctcgaaggatctgttcaaattcagccatccaattctgtaacatatactgaaaaagactttttgacaaattagctgccctagtaaatttaacatactgaatggaaataacacacaatcccggaaactattgttcacatccctgctgagttatttgtcataatacatctagttgtatctggacaagatctatgagttgattaaccagcatgagacctctctgtatcttgacattagctgaggcctgtttatctatgactgtagtcactgaggctgacaaagtgttaagnnnnnnnnnnnnnnnnnnnncactacgggctgacgcactacgcagggcgggggactccgcatagggcgggagtgcacctggtagccgattgccctgaggccaattagcaaactggctttcgccagccgcttttggcttttttcttgaccaattagctggctggtaatgggctgcttcttcctcccagtctgtttcctcagaggaggattcttcacttgcttcagagttactaagagctggcttcctgagctcatctagtgacgagtatctcctagagacctccgctaatcgatcttttttcttctccctttttcctctttttcttctaatctctctccaggtattcctacctaaccttaacttttcctcgggttcaagacccttggaaaggcctgtatacttattttgtgaaccatattttctctttgttcctactctttcttcccgctttacttctgatagcttgtcctgaatttcctctagaattttcagccctatcttaatcacttgatagcatgtgaaaaagaacaaaagggctcctaacaccagaaaaaattcaaggccaaacatactcactggtactctcgttccccagctgaaaagttctgaattcatacagttgaatccttcttaacagtctgctttacgggaacctttatcaccgtcgttccccagctgatgagttctgaattcggcagttgaatccttctcaacagtctgtgttacgggaacctttataaacgtgatccgcagttctggttccggaatgagggatcttccctgcgccagtcccgagtttttttctcgtcccggaattcggcaccaattgttattagacgcgttctcacgaccggccaggaagaacaccacagaccagaatcttctgcggcaaagctttattcttacatcttcaggaaaagagagcaagaagcaagagagagagaaaagcaagagagtgaaaaagcaagagagagagaaaagcaagaaaaagagaaaacgaaacccctttcctctttaaagagaacaacaattgcctcggacgcatcactccctgattggctgcagcccatggccgagctgacgttcacgggaaaaacagagtacaagtagtcgtaaatacccttggctcatgcgcagattatttgtttaccaacttagaacacaggatgtcagcgccatcttgtgacggcgaatgtgggggcggcttcccacagaccatctgtctgagtccttgggagagatacttgatgcctgtcaccatgtcctataaaatatcacaggcatcatgcatgacaggaaaacgagatggtttgggatcagaacgatgagaattctagtcttaacttattttctatctgcatgagcttaccaagcctcagcttctcacttgtaatccatttcccacatttgttgaatgtttctcttacctcccattccccatctgaaggctcttatctacctcagcatgatcaaagtcgggggaagggagaggggggaagaagagggggaggggaggataccacatggagagaaatatctttaagagaagatggagatttgtggttccatgagaaaggcactgcgtgcataagactagaggagagagactacttctgactcggatgtgtcacagagcttcctaggaaggttagggaagcactctgaagagaaaaggaagctctgtttccatttcagggagcttggcatgctgcttgtgtccttagaaaagtgtaaatgggagcctgcaggtgggaggaccagcagagttgactgactcattctaggtgtggccaagggtagcaaaaagccagagtccttacaggtgaagagagagataagacctggacgtggaagtggaagactatggatgttgttgggaaagctagcagctttattgggaaggcaccagcgggtgctgttgaagatgttgagttgggtgaaggggttaaggtccgatttggggagcagggtgcaaagtagacagcttagcagaaaacttgagcttgcgtggggcgcagacttttaacagtccatgcagggtggtctcagaggtcgagagcagtgtccagcagtttccaggcatcaaccaaggcttcaactttcttggcgctacagttttgttttgtttttatgaatttaaaagctggaaggaagggcttatgggactgtttgagcatgtagattgtataggtcgtttgcattcttcatgacccttttttgtttatgttgtggatttctctctctctctctctctctctctctctctctctcattcctgcacgtgtgttccatttgatggaccttgctgttctcaggtctgtgttcactaccattctgtcctttctacagtatccgatggcggtctctgaacacacagcaattcgatctgcagatctttctcctgccgcatctcccgagagccctccacttccaagtctaagaacatccccactggaatgactcaccttaaactgaagtcctttcctctcaccaaggtctctccttccagcaccctatctccaggctttgttctctccacacacccaggaggctcgccctggcttcctacccatccttttctaccttcactttcctccttcaaagctcactcatctctgaatcccacagattctgtttcatgcctctcattccttccttccttattttatggcctctactcaaagctcaggccttatcatgtaatgttactaaatagaattaatacctctctcctcctcccatccctaggagctctccaggatggaattccaaattcctcaaatttatgattcagggccctcctttttttaatttttaagattattatttaattgcaacattccttcgttccaaagcctctcatataccctttgcctgctcaaagtcatggccttgtttttaaattattattatatgtatatatgtctatatatatatttctaagtataacatgaacagtccatataattctacctgtgtgtaaaccaactttaattgaccctttttaccttgtgtccttaaatatcccaaacaaagcccttcacccctgccaagctgccttggtcacttgtacccacaaatctctattcctttggagaacaccagtcccatctcgcttttgcaaaccaagtcctacctatgcctgttctaaagcttgcttcacagcacacgttggaaacctgctcttcccgtgtgagcctccaggcttcttgactgccgggatctgcagcttcgcattcaattcttcctagccagggaggtgcatttccttcttcagtccttcatacaccctcagatcccatagtcatgggactccatgtccccatcactccttccctatacactcatgcctatctaaacctggctacacagactagctcttcctcattcctggcaccagccgtcacgacatccagttgtgacacagaagacattatcaagcctcttcctagatagctgtcttccttcgaggcagaggtttcctaaaacccagagaggagtcatggatcaagataaggagcctgtaaatgtctttacaaacacactcaagagtcctgcgaatgctccagactgatatggttactagttcttttatcttcttgctttgagattgtctgggccaggatgaggaaggccagaagatggaaatcggggtagcttcagtgtaaagttgaaaatacacaggagagagacccacaaggcagagattagcagggatccccaggaacagtgaccatcgtcagtgtacatactgtcgcctggacttcaccctgtggactctgaacttttggctcctgaggtcttgagaggtgcggactcctggtgtatgttaactgtttattcacagagtaatctgtcatccttagtgagaacctgactctatagaaagacaccgttggcgtctgtgctgagcctctaacctgtgttcacacctagaggtgcttgaaagattagagagccttgccctgggttggtaagcttgggtttatggtatgcacagtgtgggagttgccaacacagactctttggaaggtgtgtaattttcacctctgagctcacacatatgcttatgggaagaaagttcatagctttcacttgatgtcccaaggaatctagagctcaaaggattacgacactggggctaaggagatagctcagtggtaagagtacgtgttatacacgcagatggacctgagtttgaaccactggcatccacatacaaagctgggcatggttaaaagtgcctataatcacagttctggagtttgtgtagagataggaggttcccagaacttggttgtcagctattctagctgaatgagaatttctggttcagtgagacccatgatcactttttcttggcactttgactagttgtgggtctcttacagagagaccaaaaagacactgcaaaaagaaccttctctgattagaggtgagtactgtattatctgtgactatcaggataagtatttaaaaagcagctggacactcttatcagtctggtaaagtagtaggttgtcctctaggggctagggcctttctaaccatgggctcttaattatgtttacattaccaggtctgagttcctgcctattgagtggaacttaattccaaccacacagctgttggttagccccaaggttagtaccacagctgcacagttggatgggtcttccaggccagatactattgcaacagtgagtcaagggtttcccttcccatgaagccttgctgcctttgatgctagttgttttcttggtcttagccacgaaatatcaaagtaattttaattgagtttccataactgctaaggatattaaatactttaaaagatatattgtagacattttttattattcttttgagaactcttggttcaaatatgtggtgatttggacaaacccttaggttcatctttgaatgactagtcggcagaaagtgaagtatttaaaagggttagaacaattaggacaggaggtctggttagaggaagtctgtcactggaggtgggcttcgaggtttcacaagcctatcccagcctcagtctctctgtctctctgtctccctgtctctctgtctgtgtctgtctgtctgtctgtctgtctgtctctctctctctctctctctctctctctctctctgcttgtggatcaggaggtagctctcagctacttctccagccctacccctgcctgttgccatgctctctgccatgatgatagcggactgagctgtaagcaagtccccaagtaattgctttcttttataagagttgccttggccatgatgtctcttcacagccatactaagaaaaaaaatctacagcccatttttaaaatttgggtcacttgttttcttgatgtttttgttttctgggttctttatatattctggatttcaccctctatcagatgcatggctggcagactctcttccaccctgtgtgcctccccttcactccattgcttcctctgctatactgacactttttagtttcatgggctcacacagtcctttgttagccttgattcctgggtaaattcacagagtcctgttctgcacttgtatcatgtaaggtactgcctgtgttttcttccagcagctcagagttctaagttccccactgatgtctttaagcagtctggagttgatttttctagagggtgataataaggctctgattttatttttctacacgtggacacccagttgttccagtgcagtttgttgatgctgcctttcctatgctgtgtattttgacactttgttgaatatctgatgactataattgtgtgcagcacttaaggctacattttattttcctattccttactcgatgggcaattgctatttcccacttttcaacgagtataaacaatgctgctgtgaatctcatgtgcaggtttctgtgtggataatatgttctcatttctctgaattacgtacctcagagtagaattggtgggacacatagtactataactcgatgtttaacactttaaaacatcttattacatttatttatttgcctgcatgagtgtattcatactagggcacgccgtgtgtgtgtgtgtgtgtgtgtgtgtgtgtgtgtgtgtgtatgtgtgtgtatgtgtgtaggtcagagaacaacatattgcagtcaggtctctccatcctggggctcaaactcaggtcacctggcttgtcaacatcatctttatctgcaatgcttacatttaacattttgagtagttgccaaactattttacatagcatttgcatggttttaattatcaacagcagaacgtgacagttcctatctgcggtgggttgagtgaaagtgggccaataggctcatgaatttgaatacttgttctccagttagtggaaatgtttgggaagaggtaggagttgtggccttgttggaggacgtgtccctggagggtgggctttggggtttctaaagcctactggagactcagtctttccatcactgtctcctgcctttggatcaggaagtaagctctcagctccttcctcagcacctgcctggtcccctggtccccatcatgattgtgacagattcaccctctgaaactgtaagcgagcccccggttacatgctttctgttagaagttgccttggtcatgatgttttgtcacaatcaaagaacagcgactgaaactctacttctccgtgttctcatctgcacctgctgctgtcggtgatttttactttaaccgtctcagtggagatgtcatgtctcattgcaatttcattttaatctttttaatgatgaatgatagtgagtctttgtacaatcccgtggacgcccaagacgtttcctttgaagaagcatcattcatatcctctggaaagtattgatcatccaatccattgctctttaaagggctttctgaaacacttagtttacggagctatgtctctaataaaaatgactaaatctaaattatcgcttgaaaaggaaaacagttctgtcaaatgacctttctaagcatgcccagctcgccaaatcactcaggtggcctcagactaagatttttcccagttgacttttgttcgaaatgtggcaatttagagagaaatttataatttgaaagatctgtaagggttgggtattaaatttctctttttctgattattttttttgggggggagaaacctttaccttatagttatcatatgtgatatttaaaaaaacagatcaatggatgtcaggacgggtggctgatggagagatgccgggtagatagatggataatgaggggatggaggtataggtgggcagatggagaggtggagaatagggtgaatgatgcatgggtagaggggtggaaagaagggagggtgtatcaatggactgatgaatgagtgcaccagaaaaggaatgaagtgtagggaatcagacacccaagcagtcagtccaggtttgccgactgccctttgggtcttcttgtttcgactcagaaaagtcgattgattttcagtttttcactccacggaactatagaagagcaggctttctattgcaagtttgaaacaagatactatatatcctattgcttggaatatctttgacaagatgagggcttgcttggctcttagatgtggcacaagattttatatgacagatacctgcttcagggacaggacacatgccttcccctgttagcacttttcctaccactgtgaaaacttctaggtcactgtcagtctcaaggccattttccttctctggtggtccaggtggaataggctagccagagaccacaagctcccatgactcaccaccagcttccaaggacagaaaacacatatgggctagcgaataaagctctggtgttcagggatagagtaagcaaagaaaagggaaagcactctatgcaagaaggtaggaaagggttcagaccctggagagagagaggggagaagtagcggatgctctgtggataggctttcatggcaacaacacgatgggtgggtgcctgtaaggttcactcaggaggaggtacagtgggaattgggttctgggagcaagatttaatagagagtattctgggtggggctgggacattttttttcttttctcttccttcttctttcctgttccctcactttctctctcttttgttccttcccctcccctcgatccctctctccccccttttctttcccatcctctgctcttcccttctcatcctttctcttttttcaagacacagtactgtatagctcactctaacctctcacccactatgaaccaaaggatgacttctgaatctcctgcctccagttccagattgcagggatgacagccataagccaatgcccagtttatgtagcattagagatcagtcccagatcaaggattcatgaaggctaggtaaacactctacgaactgagcccagccccagccccaactccttcctttgctgacgatgatcagtggctttggaattaggcattcagatctatatcagctagggaaggctccagattcatcctatagactcattctatagactcttagtgttctctctctctctccctctctctctccctctccctctccctctccctccctnnnnnnnnnnnnnnnnnnnnnnnnnnnnnnnnnnnnnnnnnnnnnnnnnnnnnnnnttgtgggccaggtactatgctaagcactgggcatacagaggtgaataggaagctatcctccaggtaaggatagcttcagtgcttactacatgtggtgccagagaccagcacaaatgtcactgagtaacaccagagataccaatgctaccaaccagaggctaaaatgacttcccagatgaagtacttcaagcataggttttcaggagtggatggggccaagccaacagaagagtagtgacattcttcccactcaaagactcagaagactggctagtatgggcaaccgaacagctcaaagtaccaagagttagcagagctgtagcatgagcaatgcaaacaggatatagagaggacctctgtcatggaggcttggcactcagcacgagtctccagcagccagaagccattgaatatataggaacagaacattcagctatacaggtttttaggttgggaagacagtcagcattttgtttttgataggaggattcgggccctaggccagaggaactcgagtgccaagcacagagagactccagctgggagatttgcagacaagctttctggggtgtggtcaagggctatgagccaggctgtgtcactgatgtacagcagggcactctgtaagtcccccagggacatagacctcagtgcctgctatcccacttgggcatctgtcatgtcacagctgcccatacggctggcggtcagagaagccagtggcatggagtgatcccccaagggctgttcacaaggagcccacttcccgctttcttctttagtcccagtgtaggctgtggaggaaaggggcagagggaacagagggcttggccaggttagcaagaaccaacctgcctccagcagaggtgcagagggtgagccagggcttactctacaggaataggaaactcactaagagtgtgcctacccaaaatgcatgggtgggcagatgtgtggttttgctctgacagttggaacaggtgattacaactgattcccagaatgtctggggtatgtgtgcagggtgagaggactctggcatagggaacggactgggtgctgacagaggctcacacaccccttccccccaggaggcctctcctagagcacgtggctgctccactcagctttgcctggcaaatgttttcttgagataaaattattttttcacaagtacacgctttgctaaatgaagcggtgggaaggctggggccttgttttgtgccctcggcttcccagtcctaatccagcaaatgtcaggattcacagcttgtagtccgggaacatttggtcagatctggggaggctttagagaaaagatgtgcagggaggtggaggtcagagatggtctctggcccctctgggaaggatcggcagcagagagacttggattaaaagacattgtggagccttaccaactgccgcaatagctcacacacaacttccacagctcagggatacggctactccagaggagaataagcataagcagcgaacacgtgaggacccaggaaaagctggtggtgtcctcacagtgatgactacctctccctgactacacagtggccttagactcccggcatagcatggagtcgtgcttcttaaggccagagactcaccgaagcttggattcctggctctagccccacgtttttgtgcttgtctagcgtacagcctgagcatcattcatccttctgacagccttgcgagtagaccaggggccatattttgaaatcttctggagtaaggggctgcagaaaagcctcctgagagcccttcagccatacttcttaagggagtgtattagaaacccaaaagcttggtgagcagtcccgtgtctgtctacacaggcgacgattgcttcctctttcttgtttttttttttgggggtgggggtggtggtggtggtggtggtggtgatggtgttctccatgcttcctctacccaaaagtggttctgatgtacgctgcttaaagcagcagtgccggatggtccaggtgaccttccatctgctccaggtacactgaccattaggccagtttgccgggctttgcttttgtctctccatactcaggaccatcactgctgatccctacctgtcccccaaacgcataagtctctgtgctgtttgtcacacaggcaaacttctgctttatggcatccttcattgcacagacagcttcctcaatgagctcatggaaccagaggaagtcttggttgcctgtgtcctagttgatgggttagtcacaaggaggctgtggctgttggctgctgtaggacaggaagggactagaaacaaaccaagaccaaactgagtctcccccacttccactcccagaagcccatgatgtggggatctagctacaaaggtctgggcaattggaaagagggggtagctgctagacccaccaggagctgagctagctgagagccacagtccatcagttccttagccttgaaaatagtttgattaccaatcttacccagggaactgctactcctggagttgtatcaggaatgttttattcaagccaaaaaaaaaaaaaaaaaaaaaaaaagtgccgcctttggtgactaaatctgtctcaggaatttcagctatgatcaatcccgcgttgttaatttttaatttctttggctcattccttcatctcttccagatcattccccatttatacctctgtggacacagagctgaacctgcccttttgccctgtagctcttctccagttccctcttggagctccttccctccaacctcgtctcttgagtcttgctctttgccttagtccatgctaacaaagtccctggtgcccctcaagattacggggtctccgtgacctgtgtatcccacataaagcccagaagctctggaaggttccaggcacatccctgggtagttctgccctttgctgtttatttatacccgcctaatgatagtatcaccctggaagggacccacagctccagattgtgtcttcacagaagccagctaaacttcttgccatgcgctgctggtaacttctcctcaatattttacaagtcattaaccattgccttgcatactgattttcagaaaatgtttggaagaaaaaaaaaaaacaaacctaggcccagttacttgctcccattacttttgaagacagtgataagcacacatgctcccctcacttccctgtcccagacaccgtaatcctgatggatactagaggtttgttagcaagggctaagaggggcaagactcagacacaggggtggggggggaagtgccccagtatgaagtaggggagagctgcaggactgaagtcgatattctgcagtgtctcccaccatagcagagggagcctttgtctacaatagaggtgattctccattgtccggagacacgggtcacaaggaggagaactggggcctctgtttctaggtatgcctagaaaccaagccttccctcacaccttgcagcctcctcttcccagccatgtgaccacactttgcaaaccctccagctcagccttcctacacacttcaccacgctcaacactgacagccaatgttttcctcaccagaccatcgcgaagattaaaaggcaatagatactcacagctctatcatgtatctgaatgcaccgtgtgtgctgctctatatgtcacaggtaatcaatctgtctagtaattctgtgtatcaatggaagcacatatagaagatgcaagtgtgtatatctgaagggttggtggagcctcatccccgctcagtcaaactgcacatacaccaaatcccagctctgcagctcagagcctcagcatggtctctggcagtttgagactcacctcatgtgcttcttatcacccctgcattattgtgccatcttggctatgtcccatcatgacacaccagaaaacatggtccctcactgagatggtttgtatatgcttgactcagggagtagcactattgggaggtgtggttgttggagtaggtgtggccttttgtgggtgtgggctttaatacccttgtcctagctgtctgggagtcagtcttccactagcagccttcagatggagatgcagaactcccagctcctcctgcaccatgcctgctcccacttttgatgataatggactgaacctctgaatctgtaaaccagccccacttaaatgttgtcctttataagacttgccttggtcatagtgtctgttcacagtagtaaaaccctaattaagacaccccctcaccccaagatgccacagcctacaggaagaaatgaggattttgcaggttgcatggagacatagaaggagaaaggaaagggaaggttagaggatgtggtatccactatttctctggtctccagcccttcttctttctgtttcccttgcagaacaataagcaaactctaagaggttccctgagtctcatctcctaactgcactcatcaaatgggaaaaatagatttcttcctggaaggacgatgtctgttctattccctcttcagcactgacttacgtttaaataaagatgtcagatctttgagacggagtagccagtgttaaaaatctgggtgaactcaaggcaaactctgactcagcagatgggggtggggggaggcgctacctggtcagtgaagagctggaatattctgacagagtagcttaccatgggagactagtgctctagttcctcaaaagacaagccaagccgggggtatggtgtggtgggtttgggggtgtacaaagagagggtatttgtgtttcatggactccaaggctgatgttctaatggtgggcctgggtaacctgtctaagattgcaccattgactttctcatcaaccgaaaaggcaggtgaaggttgatagattctgttatgcataagtgattccaggcctggcaaagaaatggaacctctgatgtgcctgtcattttcctggataggtgagtcaggaggcactgatgtggggcccagggccgtgaagtcacatgaggactgaaagaatgcaggacatgtcagaggctacaaagagccactgttgtctctcaagccttattcatggctcgttccttgaccagggagctgtttcgtcatcccaagtagtctcattgcctctttcttcttctccacccgatgatatccttgtcttcttcctaccacaccaccttcatgaagccctcctggatctccttttacctgggtcagagaagtgccaactctagaggccacaacagcttgagtgaaggcaaacactctcctccctcagtctccgaggaagccctcagagaacggaatttttaaatccattctcagccctggctgggtgacttagacaacatctgccattcattaagtccccacatatctcataaaattccattcaacatacaattaagtgtagctcactgccactctggagttggggtggggtggggtgattaagttgtcagtttggacacagggaaccatgacatgcgttggtagacttgagccttgatagtcccgtgttctgtgtgtagatgggaaagggctcaaggaagagacgctttggagcaattccagtgggatactttgctttctgctccatgatgatgtggggggggggggagagtagttgtctcttattgttgaaaaaacatgggctagggctgtcactgtggagagcgtggggtaggctgctctaaactgctctccactcacacactctctccttaaggggaatgttttcctccacctcaccaactattagatgggtttcctccaatgacaccatctcttattgctaaaggactggtccccttgctgtgctgcactctcagacacctggagctagaacttccataaagcatacaatgaccctcaatgacaggggacccccatcccccagagtttctcctatctaagtgcagcacagagagtcacttcctttcctccttgtatgaagggagtcttctaatgcatggcctctcttactctatgttttggagaaatgattctaccactgccttgaaagtcatagctggaagtggaagtagacaaaacactatctatgacccccaccccccaggacagggtctcactatgtagcctttgcttgactgaaactcactatgtagaaaaggctggcctcaagctcagaagtctttctccttctgcctccttagtgcttagggattaaggggctgtgccaccatacacaggattatgccaagaccactccatcaaaggaaaaccaacagagcccacttctcttcccattcccctttcccactcttccccagcatgcagctctccagcatgcacagctcctagaacttcagccttgtgcatcatctcagtgtcgttgcctagtaacaatatgcttagcaaccagtaaaggaagtgtgatcacacctctcagcattgtacatggagcactgcagacaatacaaacagctcctgatttctctctgcggctacaggaaggtaactttcagaggtggccagcgttctgctcttgagatacagtgctcaccatccaggggcccacattggttgttgtttggcttttacttggcattggataatatctttgtgggggcgggtgggtaggtggttcttgaagggccggatctctctgcttgcacttgttcccaggatgcctctgatgcagtcagggcagcttgcagaatcctctctgctcccacgcagccctccctgcaccaagcctgcacccctgcccccagtcactgtgttccccacatcctcttccatttggagatgattctctacaccctaccatttacctgtcagctattgctctgcctgtgcctagagcagtagctctcaaccttcctaatgctgcgaccctttaatgcagttcctcatggtgtggtgagcccctcccccaacaacaacaggattattttgttgctacttcataactgtacttttctgactgttatgaatcataatatatgatatgcaatatatctgatatgcaacccccagaggagtcatgatctagaggctgagaaccactggcctagagtctttgtctttcagacactccagtctcagtttcccatgatcttcatgtccttcccctctctctgctcttacatgtatatgcatcccatcctgattcaacctctggaccagacatcacacaagttggggacaagattggtagctacctgctcaggctcagactctctggctggctgtgccgtctgctaatccacaacacccaagaatctccagtgaagtcataataattcgctttttgataagaaatcccagagactgcgccctttagccctgctgtctcttaagccaaacccagcttctggttggcgtctcaggactcagggtcctgcagaaaccagaggagagctgagctgcactgcttggcagctgggaaagcaggctcaacagccatgcgttctctccttcaccttggaattggacccttgagtataggacttgacctgtctattagaagagctgcttgcaaggcccaaagaagataaatgcactgatatactctacacaccctgagcctctttacagatttttgagagaagaattttcttggggaaaaaaaatctggtcttgtttttgccgtgagatggaaaaagatagctaagactgaaacagatacatgtcagtcacccattctttgatgaccttggtggcaacatcaaacccttttaagatgctctatctcgaagctgtcagaataaattatagccacacttctaccttttctttccttgggccccatgattaaggtggctaggtggcacctagttaggactttaagaacattttacaggcctcttctaattctggctggggaacaaaaaccaaatgagtcagaagctaaccaaggctgagttgaggtgctgagagagcagtccctgaggtgggtgtttggggtttatgtcacctgtacttccatggcaattacgtggtagctgggtgaagggcaaatttgcaaatgcaggctttctggaggcaagaggtggcaaagcacactccataggtggtttagagtaagtcaaatagaatttgggtgttattggatctcgaaggttgggagtctggccaaagatgaacagacattccagaggcatgagcgctttgcccgaacacctacccttaggcaattggaggcttgtctcataaaggaagatctctacgggaaaggtaggaaacccagcaagctctcaaggctccttctctcaccggacgatacttttcaaagcccttagaaaggggcatgtgcagcttcaccgagcgagcgagtttaccaacccccaccccctcaatcgtgcaacgtcattgaggagctaagcagggcttcttgctaaaactcctgctttttaattaaaagaaaaacaaaaacaaaaccttaatccctagaagttaaatataccacagaggtcaaccagtgacctagttagagctagctttgaaaagacagagggatttgatgaggatctacggggaggcagatttaccaattttctacccagacagctagaatagtaggtcataaccaaaggcagttaagtcaagagagactctggcaactgcccaacctacccaccattcacagcttaggaaactgtttcccaagatgcgactggaggttaactgtgaacacttaaaaaaaatgtttcttttacattgcaaataaaaatacctaactaaaacaatagaagagcatttacccaaggctctgctataacatggaggcagtctctgtccagattccccgaatctgttgacttccatacctctgcttactccagtgcaactctaggcaaggctgggactggatctccaaaaagatcttttacaatcccagagtaggttttttttttttttaaccattttaaacattaaattgtcaacacttcacaagtcacaggatcatttcagacacattatcttttgaataaaacatagacatagtctatggggaaatgttaatcatgaaatatcagtcttaagccactttctcaaaacacacctgctgcaatggggttaaagctgcctgcccagggctgatgtgaaagtagaccgtgtgtttggtttctgtaagccacggcccacgtagcaggcagggaaacagggctaacggggtggggaaaagcagtttgaacaccttcccccgcacaggctcttgtctacagcttttgttcccagcgtctcttcaataaatatgactcagtctgatgttcgggttccacttcctctgggcagggagctgactctgtgctgcctatcctgggtgactcaggggcccatgggcagggctgtgtcttctttgctcagccaacccagctcccttctgtcgtgggatctctgctcttcttcgattctccagctttctgtatgctcaatgaagaactacggtggcgtctctccccgccccactgtacatagatcttggtgagcagccaaagggctttttttacacccacttactcctctgcatgaggtatggaaggccaagtgagggtcacaatggattcctgtgagaaacacaaataaaaaccaagagctggagagatggctcagccggtaagggcaccggctgctcttccagaggaccccagtctgattcttagcatccacacagtaacttacaattgtccaaaacttcagttccagggcatccaatgcctccttctagactccatacttccagactgtggtgcaaatgctacatgcaggcataatactcatacacataaaataataataatataaagataaaacattataaagacaccccccccacacacacacacactgaaccaagagaagccttttagcctctcctttctcttctaaatgcccatcaaggtaagcaggtacttcactgggcaggggcaggcggggattggggtagtaagagaccccatacttgtgaacctgtgttttgccataagagtcagccagagactatggagatagatccatgtcttgtgggcatgagcagctgagttcagtttccaagcgttcatgtaaaagaaagctgagcctggtggttttcacttctattctaaacactagagagatggagacaggtgaatccttaaagttcacaggtgaagcagcaaacctcctcagccagattcaagccagtgaaaaataggagacgagtggaacctggggaaagatacctaaagttgtcctcttgcttctacacacacacacacacacacacacacacacacacacacacacacacacaccagccatactaacaactttatctatctagatgcatatttttctaaactcaggacggttttgtatcgaaaccagtaacattttcttcaagaacaaaatataatgattcagaatagtaaacattttcgctatatgatttaaaagatttattcagcattaactatgagagagcactagaaattgattcaggtttttcattgatggagcttgtgatggattgactaagatgccccccatagtcttgggtatgcaaacatttgtttcccagttggtggtgctctttgggaagtttaggaagtgcgggcttgttgaaagaagtgcatcactggagatgggctttgaggatttaaagacacgagccacttctggctcgctgtctctgcttcgtgcttagggttcgggatgtgatctcttagcttcctgctctcgccaccacccctttactttgcatcatggacttgatccctaaggaactgaaagcccaacggaactctttcttctataagttgccttggccatggtgttttatcacagcaatagaaaattagccaatgcagggccattaattttggaggcagtgtgtgatgagagactttaggtaaaggtggtatggcagagggagtgataacagtaagctgtgaatcgttcttggttttaggggatggcccaccctgtccatgagagtacccctattttccagggcatctctgttgcagtacttgtagcttgtcaaccataaacatctctcccatttaatttagtagcattagttaggaagagctcagcttcctattcaatcctctcccaaactgacctacgaatgagtgaacacaggtccatacacacattctttctgtacccatacatcctttagctgccacacatcctttagctatcagacgcatcccttgagcaactgagtgatggcagaccagtgcttgaccaactagggcacattctcagggttgaaccgtgagggattcgtcaagaggtagagtttcctgcagttttaactgttggatgaacctctcagctgcttggtttactacttagctgctgtttacccagggagctcgaatgtgctgactctcctaggtcactcagacctggcttcgggaagtcatggttgtggatcttgatgctcagcttgattggattgagggtcacctaggagatttgtaagggatacttctaggggtgtctctgagcacatttccaaaaacattattacatcataactctgacctacacaaaggtttaatctatggatggattcaacatttgaatggaagctggtagaactgtaggaagcagggcctggttggaggccctgggtcgctggacatttgcctttgaggcaacaccgtagccctgactcctctgatttttcctgttttcttcctggatgttacggtgatgctttcctttgccatgccctcccttccggatagttctcccttgccatggttgtagaagcaatggagcctgacgactatggactgattcctcggaagctgtgagagccaaagcaaacccttcttctgtgagttgtttgaccagatatttggaaatagcaatcaaaaacagtaccagcaagaaaaggccaactacagaagaagaagggagaaaagaagagaggcactgcattccagcttatttcagagtgtcttttagttacagatttatagataacagaaacccaagaggggattttctagtttccatagtcaagatgtaggaagacccaggaagaggctgagttcgaagaaccagggccttgaactcacccacacactcctatgtctgcctctcaccctgtggctcttgtacacattggctttgtttgtgtgtttgtttgtttaaatagtgtctgctgtggtcacagctctgttacacatataagaaaacacctttccttaaactaaagtttaaaaagtgttaggtttggctagcatcaggtgtccacttctgaatggtctccatggccaggagatagaagcaggatgctggtttcatttagttaatgtgcattcatcctgtgtgtagagtaggatgaggaagctgaagagatgggccaccacaatggacagcctccacttcaagtatgaaagggacgtgaagggggcgcttcccatgaagaaaatgagagacatcctctgaagggctgagaggaggcatggcaggctgatgaaataggtgagctctgggtagtgatttgcaagccctggtaggctcatgattagtggccacacatcttcataatggggacaatggaaacaatggcattgaaagtctttggaaagacatctaggttctttccatctcctggctattataaataaggctgctatgaacatagtggagcaattgtccttattacatgttggagcatcttctgggtacatgcccaggagtggtatagctgggtccttaggtagtactatatccaattttctgaggaactgccaaactgatttctagagtggttatatcagcttgcaatcctaccagcaatggaggagtgttcctgtttctccacatcctcaccagcatctgctgtcacctgagttttttattttagccattctgactggtgcgaggtggaatctcagggttgttttgatttgcagttccctgatgatttcttaaacatttctttaggtgcttctcagccataagatattcctcaggtgaaaattctttgtttagctctgtactccattttttcatagggttgtttggttctcttgagtctaacttcttgagttctttgatatattggatattagccctctatcagatgaaggattggtaaagatctttccccaatctgttggttgcctttttgtcctattgacagtgtcctttgccttacagaagctttgcaattttatgaggtcccatttgttgattcttgatcttagagcacaagccattggtgctctgttcaggaatctttcccccgtgcccatgtgttccaggatcttccccactttctcctctataagtttcagtgtatctggttttatgtggaggtccttaatccacttggattcaagctttgtacaaggagataagatgctcttcaacagaggaatggatacagaaaaatgtgggacatttacacaatggggtactactcagctattaaaaatgatggattgatgaaattcttagacaaatggatagaactagaaaatatcatcctgagtgaggcaacccagtcgcaaaagaacccacatggtatgcactcactgataagtggctattagccacaaagctccaaataaccaggatacaattcacagaccacctgaagttcaataaaaaggcagaccaaagtgtgggtgcttcgatccttcttagaaggagaacaaaatactcacaggagcaaatatggagataaattgttgagcatagactgaaggaaaggccaccaagagactgtcccacctggggattcatcccatatacagatatcaaacccagacactgttgtgggtgccaagaggtgcatgctgaaaggagcctgatatggctgtctcctgaaaggccctgcagagccttacaaatacaaaggtggatgttcacagccaaccattggactgagggtagagtccccaatagaggagttagagaagggactgaaggagttgaaggagtttgcaaccccataggaagaacaataatatcaaccaaccagaccccccagaactcccagggactcagccatcaacaaaggagtatacatggctccagctgcatatgaagcagaggatggccttgtcatgcatcagtgggaggagaagtccttggtcctatgaaagcttgatagatgcctcagtgtagggaaatcaagggtgggaaggtgagtggaggaatagcctcttagcttagaagcagggagagggaggatgtgatagggtgtttcttggagggagggaaaccaggaaaggagataacatttgaaatgtaaataaagaaaatatccaataagaaagaaaaacaaaaaagaaaaaatgaaagaatgaacaaaagaaagaacgaaagaacggaaggaaggaaggaaggaaggaaggaaggaaggaaggaagaaagaaagaaagaaagaaagaaagcctttgaaaataggtcatattatgatttttctgagagtggaaaccatgaagaaagaacaaggtagcaggaccgaggaggagacattggtaagtctttaataaagggctatgcagcctggcacccttctgtgccctcccacagcagccactgtaggcagaaggctgcagcatttgccttcccggctgcagtggcctgctgcaggctcgttcagaacaacagatgcctttgctcattgttctgtctccctgggcttgaacccagggtcagcattagtgaggaacctgccacggaaccaaatcctggctttcaaagatgatatttatattgcacagctcatgtctgaaactgaaaagccaccttgccctccagtctttgcatgggcgatgtttttaggcagctatttttggttttgccttttgactctccagactgtgctttgctcttgttcaaaaagagtcttcatgctttaacactctgctggttggtatgtaacaatggcttctcaaagatgcctgcaccctaacctcagagtctctaagtagattgtcctacgaggtgaaggaagccgggcaagtggggtgaggttgaagatcttggagatgaacattctggatgggtcacgtgggtttcctgggatgaaaagaggaaatcaggaatgatggccagaggaagagaaggggatatcatggagagatagacagagggagaggggagaggagagaggaggggagaggaggggagaggannnnnnnnnnnnnnnnnnnntattaataagaataccatggcctgtgcatgtagtcctgtactttcctagcatacatgaatcactaggtctatacttcaacactacaaaggaagagaaagggtgttcttcaagccccgggaaagtaaagacaagagaattaaaagggttcaatgcacagggggcaagtatggataaaaactggaaggattggtcagggagggataggaggaaagagagaatatgggagagactactggaatagctgaggtttagaaggcaatatggaaacccataacagtaaaatatccttgaacatttgaggattaccctagtgatgtctcaatacaaaggaggataggaagtcttagctgaacgtattatgtaaccagtctatctctaactggtaggactgggaccacaaaccaaggaagaacaccttcaaacttcaaactgttcagaatgcaagatgctctggggcagctgtggttcactttgtagatgtggccaaccaattgctggccttacttaaggcccagagcactagagggagcacatggctgacattgcctggcatgacaaagaaccagaaactgagtgacttataagagtcctcagacaaaatgggaagagaaaagaaaagaaaagaaaagaaaagaaaagaaaagaaaagaaaagaaaagaaaagaaaagaaaagaaaagaaaagaaaagagaaaggaaaagaaaagaaaagaaaaaagaaaggaaaagaaaaggaaaggaaaggaaaggaaaggaaaggaaaggaaaggaaaggaaaggaaaggaaaggaaaggaaaggaaaggaaagaaaagaaaagaaaagaaaagaaaagaaaagaaaagaaaagaaaagaaaagaaaagaaaagaaaagttcctctacttttctggaaagcaacttggcaggacggattgggaggaattttaatgagttctcactcagtcattctccttatacatgtgatgtatataacatgatgtttgtgttattgtgtatgccacaaatccttgggagcagcaacctgaggcctgtgggcactcttccttccttgtgacttaatttgcaacatgatccttaggctgatggctcttcccctagagcagtggctctcaaccttcctaatgctttcacccttccatacagttcctcatgttgtggtgactccaaccataaaattatcctcattgctacttcttaactgtaattttgctactgttatgaatcataatataaaatatctgcgttttctgatggtcttaggtgactcttgtgaaaaggttattcgattgcccaaagggatggggacccacaggttgagaactgctgccctgtagaatgttgctctgagcagtatactgtggggactgatggctgtaataaaaagtagctgtgatgacaggtttgatccagtcattcagcagatgctcactgaccttggccacataataggccagggagggtggatggggttggttacagagatggtaacagaagcaaagatctcagaaacattgacctcccatttacattttgaaggaccagcaggaacaagtggtagctattaaagctaatgtagagtgggcattccttttcccatctgtacacacgttgataacagcacatgcagatcccgcttgcatccagtgattctccaggctctgtaccctgaagcaaattaagcaccctcaagttacagttaatagggaaataaataaataaataaataaataaataaaggaaacaacctgaaggtcctccagtaggtgactggttcatccatgcaatgaaatactacccaatcatgaaaaaggccaccacacagggaagcccattctcactgataaaacagtgggttattgtgacagtcattatgtgaatgcagatgtaagatgaaattacacagacccacgtgcatgcatgcaaacaagtgaacttggattgcagcgggtgaaaacaggaactggggagatgacccagtcaataaagggtctgctgcataagcgtgaggacctgagtttgggtccccagaatccacaccaaaagccagacacagcaggacacacaagctgtgacaggaggatcatgaggtctgactgaccagtcagtgtaactgagtcgatcagcttcaagttcagcgagagcccagcctgaacaaagtaagtagataacagatgagaaagacacctaacatcgatttccactctaaacatacccatcatgtacatgagtaaacacatgcattcatacacacacacacacacacacacacgcgcgcgcgcgcgcgcacacagtgaacatggagtaaggactgtagttttgtccgtgtctgtttcccggctttgatgatgtactgagagatgtcatcattagagaaagatgaaagatgggtcttgagtcacaatactcagctggttgtgcaccttcctgtgatctataatcacttcaaaaggagaaaaatagctaccggctaaaatttctcaagtttcttttgttcctaagaatgttttcaaaacctgaatacattcagggccacttgagttagtgttagagcaacccacggtccccttgtagcttccagatgtttgctcatggagaaacaggacaggggtgatactaaaaactggtagcagatgggagtgagtggcagctcacccctccactgacaactgcagctcattgggccacatcatgcctgcccatcccctcacctacacacaagtgtatcattgccaactaaaggaaccatgagattctgtgcttgagacattgttgtttctgtcgcaaggcatcagtctagcttcctgacttaccatctcttggtgagagaagggatatagctgggaaagaggctagagagagagacttcattggaggggagatctggacaaagaaacagatggctcagatagagataataagataggtatttggtataaacagttctctgtattgagcaaggaataccaggtgagaccatatcagatgttctgaattctaactttaacactcaagtgttaaagttcatgtgacctctgaagtttcttagcatctttggggctagatttctttcctgtaggttggtatcactcaaagtaaccaggatgactaatttcttttgatatttgtggtttgtatttaactcagtgtctgggagtgtatacatttatgatcataacttatcaacagaatttcccactttaatattatggtttctccttatagccacagagaatcccaagcgatggtgcaactggcctttattctgatgcctgaaagagtacatgttcttttgcctctagcatcctctctcgttacttcctcttatagattccttgggtctcctgagttccattaaggtggcacagggctcagggtacagttcagagtggagggtttagctgactgactgctaacgaagttctgaagtgctagggccaaatgaagctgtagaggagaaaaattgtaatttctttttgtatgtttgttagtgtttgcattatattttacatgttatgcatgtaacatgtctgtgcatgcatatatgtatgcgtgttcaatagtgaacatagaaagatctgaaatgtgtatcacctgcatgcatggtacctacaaagtttagaagagggcacctgatcccctggaactggagtttcaaatggttgtaaaccaccatgtgagcgctgggaactaaacccagatcctctgtaagagcagccagtgttcttaaccactgagccatctgtccagcccctatttagcacatgtctacaatgtcattttttactgacgttagtcatactttgtatctgcttttcccacactatgaccagtcattgaatcaattgtgtctgttggagtgctagtatcttttccatctttgtaacttttaacatgtacttgaattaagcccaatattcaccggcattccagtctcctcctcaaagtagaaggtgtttatgacaagctgttcctaaaccattgtcaactagtgtaccagtgagactttctgttaaatatcctcactcccccatttagtcattaagatcattatcttgaactttctgtgctctcccttctatttaaataatacagctcgaccgctattgtgtagtttgagggcctgacttctggccttgcactaggcaaacactctactgttgggtccctcagcccctcctactcctccttctcaaccccccacccttcctttctgagacagggtctcactgtgtagccctgcctgtcctggaactcactgtgcagaccaagccagccttgagctcacggagatccgtctgcctctgactcccaagtactaggattaaaggtgtgcgccaccatagccagcatcccctattctttttccagtcctaaatcactctatcaccccagttttagattttctggttgacgatgcgtatctgctgccactccttatggttggctcttaaggtatggaccgtcattgcaaacgaggagcgggcatagttttggggttttgatggtggaagcatcctacggtgttttgagtcccccacacctctgcatttctggatgcgcttctcttttaattatttgaattagactttccaccacacactgcacaggctttggtctttcactttttcctttcttttagtacctgggctccagccagagctcaggcgtcctcgagtcagtgggctagtgttgctgctctgggcctccaggctagcacagctccttattctttgggtctaaggtcagatgatatgaccctgccaacactagtcgccatcctgctccatggggcttcctctggttctgtgacctcgccagtgctcattcactgctctgagtttcggtcttttgatttttgatacctggaatttccacattcctacttgggagtaatggagacgtctggtttcattttacccagcattccatacagcttgaccaagttccttccctagagccactaaaaatcacatttgccttctctgttatgtagacaaacactcatttatgctaattcaggcagcagatgtcaatgaacccactccatcgggggctccctgccctcccagctcttcatacccagcagggcacacaggccaaagtcaaaccctctgagggatacccacaaatttactggcaaagctactaaagaagggaatgtatgctctcaggagttgaagatcactcttagctacatagtgattggaagccagcctgggctacataagattctgtctctcacaacaacaacaacaacaacaacaacaacaatgaccccatagcttcagagagaccttagctgaaggaggcacagccctaggtctcctcagtcccacgactgaggccattgagtggggtctcatgtatcatgtgctttcactgtggtatgggaaggtccactgaaggagctggagggattgattctgcatctgagacagtctccctatatcctgaaatgatgctgggagatgctaagtggtcccatgttttcaatgctaacaatgacaccagttgtgcccctgtacctacatgaagggcacatgggtatgagggagtgtacacacagagtcatctataatcctgctgttctaaacacactcctttggaatttttctcatctttttgttttttgttagatattttcttcaattacattttgaatgctatcccaaaagtcccctatactctcctccagccctgctcccctacccactcactcccacttcttggccctggcttttccctgtactggggcatgtaaagtttgctagaccaaggggcctctctttccaatgacggctgactaggccatcttctgctacatatgcagctagagacacaagttctgggggtactgattagttcatattgttgttccacctatagggttgtagagcacctcagctccttgggtactttctctagctcctccattggggcccctgtgttccatcctatagataactgtgagcatccacttctgtatttgccaggcactagcaaagcctctaaggagacagctatatcagggtcctttcagcaaaatcttgctggcgtatgcaatagtgtctgcgtttagtggctgattatgggatggatccctggatatggcaacctctagatggtccatccttttgtctctatggaatcttctgcacctgagattctctcttccatctcttgtattctgttgctgatgctcacatctatggttcctgatttctttcctagggtttctatctccagagttgtctccctttgggttttcttcattgtttctacttccatttttacatcttggatggttttgttcaattccatcccctgtttggttgtgttttcctctaattctttaagggatttttgtgtttcttctacctttttagcagtgtttgcctgtagttctttaaggacttctacctgtttagcagtattctcctgtaattccttgagggatttttgtgcttcctctttaagggcttctacctgtttagcagtgttctcctgtgtttctttaagtgagttattaatgcccttcttaaaatcttctatcaccatcatgaaatttgattttaaatcagcatcttgcttttcaggtgtgttggggtatccaggacttgttgtggtgggcatactgggttcttggtttctgttagtaagattcttacatttcccttttgccatttagaaatctctagtgttaatgttcaagctgtctctggttggagcttgatcctcctgtgattctgttagcctctgtcagcactcctgagagtccaactctcacctgagttccagtggtcagagcactctctgcaggcaagctctcctcttgcagggcaggtgtccagcagtctggagctctgatccacctcctgagtcctcaggtcagagccctccctgtagaccaactctcctctggcaaggaaagtgcccaggggtctgggtctcagctctgcctcctgtctgagaatgaaggcctgacgggaccctgaccaagaagctctgttgcttctatcgcccacatgctctcaggtgattgggagatcctgggtgtgctaggggtcctgcagcgtggagagtcctctggtatcctagatgccctcggctggtttcacacagaagatggtagggctgtcccagaccttaatgtatcccagcctctggtcaggcgaggttcctccatccctgttcctgccggcacaagaccctccgagattttttgaagctgatgttgcgttccactcacccgtgatcccgaggggattcccaaggtcctgcggtgtggagagcactctggagcccttagcagcctccaactgggctcagaaggaagatggcgggggtccaatttttctcatccttaaatccattttctcctgctgcctcagctcagtatgtcaaaaaacatgcaatgttcatgttctgaagggacagtctaggtttccatagtggtaggaagagcagcctgagtctcatttacacacacacacacacacacacacacacacacacacacacacacacaccaaatcctgggcaagctggtacaaatccagatctcaccctcatcctctgatgactttgatgacccatttgacattttgaaggcaaggctaagttgatatcagagtctgcacctcctggacctacctttccccctgggctaccctgctccctctccacttccggggtgtgactcacaggtagctcctgttagcagagcaggtgtgtgtcatttccttactctgaggagtcccaaagtctcactatcttccaccccagctaacccccttatagggcttagatgcttgctacagacatccttccagaggtccttcagctgttgggggaaacttctgtgccctcactgggaagttttggggagccaagaaccaagttcagtctattcatccttccctctcactgccacaccctccccgcttcccttcagcaaaccactcctgtacttcgacctgtcccctagccctggttcctagcctcaccatgcgtttctgctacccagtacccctctggtcatatcatgaccctcactggaagacggggtagggcgggggagaccccaaagacaccatctttgacacagtcccttgaaggacttggatcatttaagtggaaggagatgaaggggccataagctgttcttcacccatgaaaggggtcaacaggtggtggtgagatggtttttgctccacatgtatcctaaaggcagacacaaaagatgacagaaaatacacttgggccttctcttcatttctccttccttcnnnnnnnnnnnnnnnnnnnnnnnnnnnnnnnnnnnnnnnnccctccctccctccctcccttccctccctctcttcttctctcttcctttctttccttcttcccctttctacttccttccttccctttatccctttcttttgtctgcctgcctgtctgtctgtgatgtttgtttgtgtgcatatgtgtatgtgagcaggcatgtacaagtgtgtggggaccaaatttcaacatagatgtcttcctcaattgctctcaccttattctttgagacagcatctctcactgaacccagggctgatcagttcagctatattggctgaccagtgagctccagggatcctcccactgccttcccacatcactgacattgcagacatgtgctgccatgcctagtttttatatgggggctagggagctggactcagatgctcataaagcaagtaccactgagccggctctctagttctgcacttaaactgtataaggtgttctcattctttgagcaatggggcaggctgcaagcatgaagacccttatatctaaaagagttcaaacagagggggcctgagatgggcagggctgttgctcctgtgacctgcacagcttttttctgagatcctctgtgactgggattggagtgtatcatgcatggtctctttcaattctgcatgcttctgtagccagactctgctactcttcccagcgtagcccttctcctttgagtctcctttgagttatagaggctgagtggattcaagtacaccgtttctctgtaacactcgagcgtgtgcatgtgtgtgtgtgtgtgtgtgtgtgtgtgtgtgtgtgtgtgtgtgtgtgtgaattctcatggttcatttcaccaccctcaggcctaagggctacaattgttctctgtagagctgcagaggaggaagtgaggaaacagtcaggtccctgcagggctgattagagagcctggccacttgccaccaacatgcgtgtacatgctgagtatccattgattgggtgtccacattctgccaaaagagcccggagcctggctcttcacaaatccccaccctatgtacacccagcttgactttgcagtcttactacaaccctacaacatctgcaccgtcatgttcgtgtcactggggaggaagctgagaaggaggacagttggcagggcacttgtgacatggctaaggaggggtagagccagagcttgtccaaggtcttcctgtccttgctatgagatgccaccaaaagctgattcaagagctcttcacctggaaaggacatcgctggaatagatagggccactcagtgccatgttcctggatgagtgatgagctgcttattgtattctaggtcctatgataaatacaaattcagaaaaggggtgttccttttttttttttttttttttttttgcttagcttgcaaaaagctagtaggctgaagctggggaaacagtgcagcatgcaagcatgagaacctggacttgatccccagaactgatgggaaaaagctgggcttggccatgtacacttgcaataccagcactgggaaggtggagacggatatacccctatggtttactgcccagccagtctggcctgctaggagagctccagaccaaaaaaagactctatccccagaacgaacgataatatgaatgtggatggctcctgaggagcgacacctaaggttgacctctggcctccacacacacgttcaacacgtgtacaaacacactcacacactcaggtgcacgtaagaactagtagtcagaaaaaggaacataacaaacttgtagtaaaaacaggagtagagagagctcatcttactggggacataaagagagttccttggcaaaaacaaacaagcaaacaaaacacccggcatctgaggtgcctttgcacagaggaggctcgtatctgggctagtgatgtagcattctgtgctggaggggccaaaaggaatgttaccacaaggtctcttgcagttgcgaaacaagcgttcactaacgcttttgctttctctactctctcatgatggatggtcccacacccagacaaattccagcctagcttctccccacacggatgaggctctttatgattggctggtgtagacagcatcagctcttcctccaattggctgtgaattctttggattctgcctcaggataattcccttcgcccacgccttctgtatctttttgtgttgtccgtatcctgggtgaggttatgcttgccaaaatcaatgaactggccaccaaattattaccctcggggtctgctcctatggagtctacaccctggctagctatgggtacagccacctttgtaaactttggggcttctcttgcaccctacaacaaaccccatgtctcagccacctcctcctcttcacaaacccagctcaggctccacccttcccgtgagataagattaactcctttgcttgcactgctctctgtgtgtaatgacatttaaacctctcttgcataaaccacactgtgccctatggcattatttagcgtgtgtgtttctctctccaactggtctaagttcctgatttctccctgaactgtagcatttgtatcctctccattgttctcctactgtgtgggtactcaagctgtctgttaagtttatggtaatcacaatcctagccgtatatttcaagtataactgagaaaaggctggagacagagagacccataacatgtaatttaaccttgatatcttctctatgtttttttcccctttcttaacaaactgaactggtcatatgtttcactgggctaggggtgtggtgtagcagataagaatatcaaatataaatctatcattttttagctctatgttattgcgttaccttaatctcctcatgcctcagtttctccatatacaacatggcggaggaataacagaaccaacctcttccgtttgttctgacagttaaaaattagcatgtatgactgaaacattcaaagtatccagtagatgctcactatctaaggttatcacctggctgttctccttcctagaaggtaaaatgtatacaaccaggaaggctcaagataaccctggtaacgaagccttagtttctttagaacttgttggtaatttacctcctggccacttcaactgtcctcagaggatggaaacaaggaatgtcacactagccgttctgaggaagggtccagacaccactgaacagacttcctctcttatggttgtggactgttttcatccatatcgagacctaagaggccttcagtcagtactagctcagttgccttgttcctcaaccatggccacagtccacctcagcttcgggttaaagggggcagcagctccacttcctgtgatcaacaggaagtctaaaacccaaagaaattaatcatggctctttggtcttgagtggcacaagtcttagcctagaagatgtcagggcttccattctatgccagaccaaagaactagttcagttttctgagaacagactcaaccctcagcacctcaacttcctccctgtctttataccccaggagagtaagggttaactgcccaggtcctgggtttcatgttgacctagtttgtctcctatgcacacagtagaatccagtggccatgtccagtctctagatcagaggctcactgtgcctgtgaaggctctgtctttacctaaccaactcagagttctttctgacagccagattcttgtgtgctacaaattccacctctccctatagctttgagatggacagactccctagggcagaccacaacctctttcctgtacctccgaaaagaggaacaataactaccttagatggggggaaggaaaggcagaggcacccagaggtgtccccttccgagggccttttggtgattctacccccttgcagagggctgttccgagctgggatcctgcagaagcctcctctatcattagaggcgtttttcagcattgcctattttggagctacagctgggtgcttctcagaataaatagagctgtgatatggagataaaaggagaaaggaatcttaccatcttttagattcccgcactccccagtcttttccaatcttctattctcaaagcctttccctgagaccccttcctcctcactgcctgcttggtggctctccaataagcacaggctcccttcacgggcaatgctgggtaccctgctttggctctacaagttccaaactgcatagacgcagtgtcaaacgtcacaagagttcgtgtcccttatcggaaatgtttggatctagatttttgcaatattttggattttggaaaatttatgcggacatgatgatgtatcttgaagaaaggccccaggtcatatctaaacatttatttcttatgcacaactcatgtgtatagcctcaaggtggtgtcatacaatgttttagtgtacctaagttctggtggggtcagatgtggaattttccatctatgcatcacgttccctgaaaaatctaccagtagagcattattacaagcttggattttcagaatggggatacttagtgcagtggtttgataggaatagccccacagactcatgggtttgaattcttagcactattaggaggtgtggccttgttggagtaggtgtggctttgttggaggaaatgtgtcactgtggaggtgggctttgaggttatatatgctcaaactacacccagtgtggcacacagtctccttctgctgccttcagatgtagaattctcagctccttctccagcagcacgtctgcctgcttttacagttttgcaagccagccccaattaaatgtttatctttgtaagagtttagctcagtggtagagcgattgagagcaaggccctggattgggtcctcagctctggggaaaaaaaaaaagaactggacccgtctttcttctgagatgacactactaaattgatatccactctggggattgctgcactctggttcccagggctcctgtaggtgaggtagactcctagcactcaagactatacagcttttctccagccttacactgttcttatcccaaagctgtgtcctattgaaatcctcgggaagggagctagtactgcagggacagaaggatacatctgacttgtttgatttgtgtcatgcagtgggtccatggactgaggtggcccccatagtaaggcacccagtccgatgctctctaaatacctgcggtgagaaggcatggttactatagggcaaataagcagaatagcgtgtggcctcatttgaggccaagttatctggtatcccccgtgtgcctcccatggcaagtgggtcttaacagtgcatgggaatcatgaaagcctctggattggctttcactgaaagcccttgcttctcctttccctctcctgctgagatgtgctcaactgactgccttcacccatctcatagctgatgtctgccgtatagtgcagctcagcccgcagggtccttaggagatgtgtagggtgtaagcagatgatgatcctgagaaatggagacacgacatgacatgaaaccctccctcccttccaggagtaaacagcttcagctgttccatgctctcccttctcagcctggggggtcagatccatgtggtacctggaagcatctctgaggaaagacttgggggtatgagatagatgcttgtggtgagttttctctcatggcttgcttatgtttctgaagatggacccatccatggttaggttcccatattagtctatagaaacctcgataggcagctaaatggcataagctgtcactaggggtagaacagggtttacaggactgtgagggacagcacgtatccttcccactagctgagagacttacagctgtgaatgccagatcacatctggagactggcccgactcttccaggtatagtgccagggttgagaatgtgggttttgaactcaactgaacttagaagtatatctcatttctcctgtcttagctttgtgactttgggctggttctttagtgtctcttagagtccgtttctccatctattatgggggagtatgaacagtatctctatcaaggaattccttagtctttaattcaccccagcattcattgagtccactccataccaagcgtggcccaggagtgaacatagtgtgggaaaggctgacatgtcatctgtcctgatggttgccagtgcactctgccagaagatggagtgttatacggattctacaagaaagtttgcttgggccactcaacaccgtagaaaatctgtgatgctggctgccgtgacgttcagcattaggagcagggcacaaatgaaccacagctttagaaaacatgttttcatcccataagccatcctactcctcctagtgtggagattttattagtcaggatttcctgggggaagagaccaataggaagtactgaaagatttattgtgaagagttgggtcacgtgattgtagaagctgctaagactccagttctgagtccgtcagctggaagcccaagagggatggtgggtaaactccagtctgaaaactggcaggcttaagaccaagggagaacccatgctttggttttgattaaaagacagaaaaatcctgagtcctatctgggaggtctttaggcgggggggggggggggggtgtgaggggattcttttcttactcagggaagattcggtatttgttcttcaggccttcaacttcttgcatgaggcccacccaccttgaagagggtgatctgctttatacagttcaccattcaaatgccagtaccgtcaagaaatgcactggtaaatccactcagaataaggtttaacatggccctaagaaggtcctggaggccctggaggccctcattgtatgctcttagggctgaaaagatcagctcttccaagtgctgcaggaaaagcatgccacactagttgatttgttctcttctagaccagaggtactttaaatggaaccagaagggacccaagagcccagccttactccctatttgtaaaccccaagcactgagcctctcatggttgatctgggggtgtggctcatttactcacctagctaatgaacgtctggtttcaattcccagcatcatgggaagacaatgtgactcctgcttctgttccacaactttagaaccagaagcagagaaatcaccaagttgagggaagtggggaggggtggacagctctgaactcaaagagaatcaggggtagtttattctgaagccaaaatatgagtgaatgttctcaggaacatagatttagatctctccaaatacattttcccaacgtggaagcagtttcatggagtttttgtgggcctagaacaaagaaacttataaatcaagtcatttaaaacgttacaccaagggagtggcttacctccatataagagaacttcaaccataggccccagatggtaactgattcttagcccttccattggtatgatatgagttttgttattatgttccagagattttaaaatgtgtttatcaggatattaggtatgatacaggtctgactccttgtggggctaaaaatagccaaagagaattgtaactaaggtctcaggctgcagcattccaaacgcttcacagtggttaaaggctaatcagcctttgtagactcagaaacattttaggaattctcattcataaatccagcgtcattctttgctacataataaatcagaggctagcctgggcaacaaacaaacaaacaaaaaccaaaaccaaaaacaacaacaacaacaacaacaaaaacaaaaacaaaaaagaaagaaacaaacaaaaaacatggctaattgtagagcagagccaaactcaatgctttacccatattccttggggttgggttaagctggagggagcatgcccaagtgtctctgtctgtaggagtccttaaaccttaggaaaataggaggtcagaaatgctcctaacagtgacattaacagctgcctgggacagcaagaagacagcagcattaggtctctgccaggcttctcaattctaagcttagctaagaccacaagatgtcagagccagggtgctgcttgggatgagggaacctcagtacagtcccaatcttggtctgaaccaagtgttgggcagctggtttcccctctctggtaccagtcttgcaaatgtcactcagtcacactcaaatagctgtgtcatcattcctgttaaagatcctccaatgagaccagaaagtgtaggctagagaggtctcagaaacagagagaccaggcagaggaaggaagcaggagggagtttcattataaaacgaaagtacaaactcaagtggggagggcagccttccccccagaaagctgcaaaccctgggtttctggacagagtttgatgtgtaaactttaatggaaggagggttaatcctaaggagggaagaaatattcacgaggaggtggtggccatgactaaggcaaagcaaaggtaggcagttccgggaacgggttgggaattttttcctgcagagtttactccaactttgtgtccttatatgggatttttggatgtgtcatggcattgggtgcatgacgggaacagtggattttgcaagatgaagcatttagcagttagtttggtccaggctttggatggtcttgagtttttgtccttttagaggtcacatggtgtctgctgtgacagtcctgaggctgtatcaacctctaggtactttgaatttatctctcttttccccaattctctctctatatatgtacatgcataactacacacacacacacacacacacacacacacacacactacctgtttcaaaatcctttgttcagctcggtaagtaggccatgtgtttttttaacgactttccccaaggatcttgcaagttctagaaaaaacagcagagtggatgatctctgaaaccctatctagtgctgaattctatagtgttctgatttagtcagggctggtccaagggggtaaattgttaccactgcaccacagaggcagaggagggcagggacagacaaggagagagagatctaaagttattagctgttcaggagtgaagggctgaaagccagaacccaggcatcctgtctccaggggaggactgtgttctttcgtctgctccacgagctcctcctccaacaggccctttctcctcatgccatatgtctgtgccagagaacctcatggaacacaagtatcacagtgcccattcatgttcggtttagtgttctacccatataacctgcttgttgccagtagggctgtggctatgtagtgagcagggcaggctgtgttctagattcttcctttccttacctggcgctcagccatgcaagaagggctgtgggttatgcagtgagcagggcaggctgtgttctagattcttcttttctttacctggcgcttagccatacatcgagacacttgacgagagctggcaatgttgacagctgagaatagaacccaagagtgggaggggaatctgctcagccagtactgtggagataaaaagagtctggggatgccaccttagctgaaggatgagcaggggacagaactcagaatggactcagcatctcacaggagccaatggttgagctttaaggccatggaaaaggatgtatgaccctcagagcttattatactccaaaattctaagtatccaagacctaaacccagaaagcagagactaggtttacacccagaaaatatggataggaccactggcttggtgactatctgggactagctttcaaaatttctgcttatcacccctagtttttaacaaccttgctcattttgattattatagacttcttgagatgggagtgaaatgtatgtgaatagtaggtgaccttgtcatggaagggtgcgtgaatacttcagaccttcactacaaggttgtgttaaaacagtagatcactgacagcaaagcctgagtgacgctcgtggctggcacttccagagggagagctaggatctgaaagcagatgtagaaacacttcaacatgtcctaggaaaatgctatcaacgctaaaaatgctccagaagtgaaatgggtagatgatgggtttccttgacaagataacttgtcaccaaaatgtttatggagatgctcaaaggaaggatctggaatcatgaccatgaccaatactgtatattggaggcatctatctggcgctttcagagagggagttcagagaagagagaaatgaagtaattgtgagggtgttctcaacctgtgggtagagaccccttgagggttgaacagctcttacacaggagttgcctaagaccattggaaaacacagatattaacattatgcttcacaacagtagcagaattatagctatgaagtggcagcaaaaataattttgtggccgagggtcaaccataacatgaggaactgtattgaagggtcgcagcatcaggaagcttgggaggcagtgtgttatggggaaagcattgggagggctgtgcttcccaaggaagcagcctggcctgcaactttggattcgtcttataggcagctttaatggagggagaataattcatgagaaaattgttcatgaataataaacagattataaatattagtttagttaatcttcccaactgttctgttctgttttctgatcatcaggaactcagcccaggtctttgggagtttaatgtctctgtcctcaagttttactttcttctaaaatacagaggaagtcaaagcccagctgggatgcccagtggccacccttcccacactgtcaagtttatttgcggggttggctgcttttccccttaccaatgtctgtccgcagtatctgtctttcttctctggaataggacacctgactgcatgccctcctctagaagaccttccctcccctttatctcttttctctcactttctacctgctcagctgtcacattctccttcccataaaggtctctccttgtggccaatgattttaactcctaagttctacttgggaaagcctctagtctagacaaggaaacttaacccatcaagctggaacccttgcaaaggggtcttgggacttctgtgtaaaggcttagagaggagtggtgtgttcagtccctggagaagcgagcctgttgctttaggcactgtgaatattcacacccaaggtattgttgggaaatcattcttagctaatctgaggctttatataaaacagaagtaggggtcagatagaccagctgtgctacttaagccatctgggtctctttctggatgtccgtggaatgcagttagagtataaaatcttggtgtatatggtgtgtgtgtgtgtgtgtgtgtgtgtgtgtgtgtgtgtgtgtgtgtgannnnnnnnnnnnnnnnnnnnnnnnnnnnnnnnnnnnnnnnnnnnnnnnnnnnnnnnnnnnnnctcctggctatgatcacaacctcatacttccctttatgtgtcacccctccccctcccccacatatacatcttgtctgccagaagaggtagcctacaccattcccctgagccctctgctaggttctctgtccttcctgccttctggtctgtggtgagctgtagtgaggtgaggtgctattctttttctgacttcctgtgctcttcagaaaccttaacaagagagggctgatggacctgtaagccaaacacagcctctgttcgattcagggaagctggagtctcaagtctgacaggtaaaacccaggattctgattgtgtttctgctagcatccagcaaggggatgtgaaaagcttgggaggggctggatgtagggtgcagagccttcactattttcatatttgggtcaatatattttgagaggtggccaaaacaatcccagagaagcatctactgttgaatcattctaacacggaatgggcaaactaaattttctatctcaagtaactgacttcaaggctctatttgttctcagctacactctagctgtaaacgtggatatgcagttatatcacaactatgtgtaactttgagatcttgggtaaatgtaacagaggatgcctatctagtctgctcaccggttactttttagggtagactagagttgattctgaatgaggctctgggtcctggtggcatggaggccagtggaaacacggcattggtttactcatcacttcccttcttctttcctccctccccttcccctctttcctcctccagtttcctttgccttctcttctcttccttcccctcctctcctctcctctcccctcctctccccccccctctctctttctttctcattttcagataaattgctggtctctctctctctctccaaactctcatttgtagagctttgcttctgggagattcttttcctgcgcacccctggccacctggctccccattcctacacctgcctctgggtccatgtgaccattttctttcatggcttctttgctacctccgtgctgtggaggtttccagttgtgttttcccatggtcttttatttgaatttctaaccagggaatgagaagtcctgctgctgttggatcaacagtcaagaagttgcagtagaactcacatgggagggggaggggaaaagggagggggaaggagggagtgggattgctcttttgggatctggctcctccctactttgaattctcatagctagagttttagaagaacaaatttcccccaaagtttctgagctctgcataactacctgtttcttttcttggcacccatttcccaatagaaggcttgagtaacaagacactgaaatagaaactaccagggcactgggatgggaggccccaagacagccaggaaggcctgcatttatgacttgtaacctactgaactctgtcacaattcggccttggtgaacaccacactgtcaaggggagtcttgtggcctgggaactgggggtttctgggatcccactgattggcgcaccatttagtttcctaaattcagttctcaccagggagataagggctatgcttgtggtttcttacccttcctgggaaggtgttagaattacttagaatgtcaaaggttgggaaagagggagatgctgggcccaggatataatgtttcagcaatgcagaatgaatgagttctagatctctaacaagctctgactagtcttgtatcctgtggttaatcgtcactgggaatatatctcacaccctgctccccctgccagatggtaactatgtgaatagatgaatattgccagttagctctgccataatacaacatattgcacatcttaagtatatataatttcaagtccgggttcagtgtgtggctccatgtataacattggtgataggtatgtgtgtgtgtgtgtgtgtgtgtgtgtgtgtgtgtgtgtgtgtgtatgagtgtgtgtgtgtgagtgtgagggtgtgtgtgtgtgtgtgtgtgtgtgtgtatcagtacttttgggttgttattacaatataatgggcttgtcctgtgagtgcaactgcttgtccatagtgggagtatgggggaaagattctgttacctgtgctgtttgcagaaatagctctttcagggagcacagagaggcagaaagacaggataggtgggtgctcagggactagaggctggagagaactgaaggcacaggatggtaaaggaccctgagacaccatcagacactcatctcccaggacactgcttagaggccaggatgcctttccatgtcccaggcctctcctaccaggctgcatcagttgcctgtctatactgtttaccccagacctcagtttggattggattcggaaatgctgtttgctgcctagcctggctttgtgctaagaagactggccactctccatggtctgtgtggagaatacaggaagtcagactgtaagaaagagagctccaggaagaggcaaagctttatgcgtgtgggacagacggtacatatctttaaatacatttaaccaatatagcagcaagagagcttaaagtcgtgtaactgcatgggattctaaatgtgggtgtgtttttatgtagttgcaaattccattctctgtggcttaacatttttatatacatcttttcacatactactactcttgtatttttatcatggctcatctctatgttattgatactgctgaaatttccttctgagctctttgttctggttctcaccattcccctgtggtaagcagtgaacatctttgtacaaacaatctactttcctcacctcagacccatggagtgttcaggttagcgtcaaccttcaactaaatacaacctagaaaggcctggaaatggaatctcatttgaggaatcacctagatcagactggcctggggcatgtctgtggggattattttaattgctaatcgatgtgattgggcaccgcccactgtgggcagcaccattccctaggtttctggtcctgagttgtataagaaagctagctgagcatgagcctacctgccggccagcaagcagcatctttcatagttcctgccacacttctttaagttcctgttgactttctgcaacaatggacaaggatgtgaaatcctaagccaaataaaacccttttcccccagaagtcactttttgtcagagtggttcttatcaaagcaataaaagtgaaactaggacatgggacatgtttcccaaaccaggttagcaggtgtgagttatttagtatttaaaaaggttgctcaccagaaagccagttctgagtaactcaccaacccatcaacatgtaagtttcttttgttttccctctgggtctcttggctcctttaagttgtttgcagttggtttcttaaagttgatttcattagcatttttaaccacaagggtttctccatctatttttaacttcccaagtcttttcacacacaggtggcatcctgtttgcttgacggggcatctggattgttgttttagttgattgccattagaacgaaggctggttgctgtagtgtacagatggggacatcatgctgtttgacggtttcagtgtctgtttacacaatgcagaactttggtgtagactggatttgtagaccagcagcagattggaggctggcaggtggaagcttgttcaagaggatgtttttgtgggaatggggagggcaatgcctatgatgaaagtgcttgtgtttatactttataggatttttnnnnnnnnnnnnnnnnnnnnnnnnnnnnnnnnnnnnnnnnnnnnnnnnnnnnnnnnnnnnnnnnnnnnnnnnnnnnnnnnnnnnnnnnnnnnnnnnnnnnnnnnnnnnnnnnnnnnnnnnnnnnnnnnnctttaagttgtttgcagttggtttcttaaagttgatttcattagcatttttaaccacaagggtttctccatctatttttaacttcccaagtcttttcacacacaggtggcatcctgtttgcttgacggggcatctggattgttgttttagttgattgccattagaacgaaggctggttgctgtagtgtacagatggggacatcatgctgtttgacggtttcagtgtctgtttacacaatgcagaactttggtgtagactggatttgtagaccagcagcagattggaggctggcaggtggaagcttgttcaagaggatgtttttgtgggaatggggagggcaatgcctatgatgaaagtcttgtgtttatactttataggatttttttctgagtgcttgggttttctcttttttttaagttttaatttcatttgatgatttttttttggtttgttttaactgcatgtacatctgtgagggtgtcagaagctctggagctggagttacagatgggtatgagctgcaatgtgggtgttgaggaatgaacccaggtcctctagaagagcagtctgtgctcttaaccaccgatccatttctccagaccctcgagttttctttttaattaccatttttttaaattaaatatatggatcacattagatcccttaaataaaattctctgtactcatcttactatacacgccactctgctgaaggcctgcattccggtcaaggctgcatagctagcagcagatgatgaacttggcgaggaatttttgttgaagcgatcatgtctaggagccatgtcagaaaagccacgtgcagctgagctaccctttgacactcaaacacatccagagctgcagatcccaaagtggagcttcggctgtgtatggacgaggtgtgttgggtgagacgggaacgtaagttcttgcccagcatctgcctcttaagaaaggggactctacggtggctggctccatcagttttccttaatgctccaagtgggagagacatctatctgccttaaggacttgagcaaagcagcgagagcaaagactagtaaaaggggaagcctgcgcagccgggaaggctcctcatctaggtgcttaccagccaaagatggaaaagacctgaaagacattctctctgtcctgaatatttacagattcatcattttctaaagtaataggataaaataaccatttgtatattaagtgtatttgttatcttgggttcagtatagcaccaacaggaggataagcataagctagatagaagtgccacgtcctttctaggaggagctggaacacgcttagatgttgacatctggaaggtcttagaatgagttgcttgcagacactgaaggacgcctgcatgtaaatataaagactcttcctcttcccctccttccctcagtcacagtttaaatcttggccaaaattaataaatcaggtctgtccctttgaaggtcaaaagagggaggaaggacagctggctccttgggacaccttgcccttatccactgatctgcttttgacctgccttggcacagcaaagaaaaggatttgtcaacagcttccgggtgttcaagggaacaactgagaaaattaagtggttgtgggtggggggtgnnnnnnnnnnnnnnnnnnnntggttgtgggtggggggtggggggtggggctaagaagagaacagtcagcaggaccaagaggcagccagggtttggaacccaagggagcttctagacctttctcagagccaatcactccaggcattgtagctaggcaaacttcccacctgtagcccgaaacccaagaagggtagcagagctagacaagcctctccaaataccccatgccaatctctactctcataacattctgatgacaccccaaaacctgccagctatagctcctccatgagctctcagcttggccatagcaagatgaaatcactccctggtcttcaatctgtggcttggttcgtggcaaggactcatgcagcccctgtacccatcagaacactgacactccatcttgtcttcccgagcctttcttctccccctgtgctcagggatctagaaactttggtactcggtcaggagtccttcacccctggaacaaagaccctccaaaacctgtggcccttaataagacagaaacccaggctatagccacaagtgtacaaagcccagggggaaatttttttggagttttctaggtagtgcaactatgcattaacttctgatagaccacattacgttaacaaacagtgagttacagtacagttaacatgaatcaatgttaactgtttttaaaccatggagctgctaagtcccaaatcttccccccaccccacaaggggaagcttttacttatttatctgtacatggcaggatatttctctgtagcacagcctaccctcaacttgaaaatctgataaacctccatctgtttttgttgttgttgttgtttttgtttttttgttttttcaagacagggtttctctgtatagctatggctgttctggaactcactgtgtagtccaggctggcctcgaactcagaaatctgcctgtctctgcctcccaagtgctgggattaaaaggcgtgcgccaccactgcccagctctccatctgtttcttgagtgctgggattacagggtgagtgctacgatgaccagcttaatttttttaatgttttggtctataagaagggatttacccattttacaaggttaattcttgccttgttctcactgtgtgtgaagatttttgagagtttgtgtgtgtgtgtgtatgcgcgctggaaataggggtggaaacttgaccacctcaggtatcgttcttcatgtgttgtctagctttttttttttttttttttgagacagaatctctcactggttgggaactcaccagctagtctaggtatggctggtctgcttatccacctctacaacaatgggattacaggactaagttaacactcctgaattgttttgggttttcctattgggttctggggagtagactgcatgctcatgtatgcaaggcaagtatagtattgactgatcccattccctgccaagaatctgctttggtctgccatcagtgtcttctctttcaatctcaacttgatatacctcattcagtaactacaagctctctctatggagttcaaaggcatgggcagagacagctagaacactcatcttcctcctactagattctcatgggcatttgactaacaagagttgtttgaaaacttgtgacttcccctgcttatcatcatggcctgctcattagcctctcaagaagatgtgatgagaactcagtcagatgcccaaagcaagctctggttgcatatggttcaggcttccctacccaaacaccaattttgtgttccacatgattgcatgtgggagcagtcagggagagagttaagcctgcctggactgatggatgccagagagtgtgggttctggaaaggttttccagctctgagaggagcaagttcctctatagaagacctgtggcctgcttctgcttccaagcaccttgtgcctttctctcttgccagactaggtagagaaaccactgagtgaggtagggttgggggggtcaaaggtcatgggtaggctggtagcctgtaaccaggaaacctgccctgccttgccccagctcttacactatccagacaggacaaggctagaactgcactctcatgagcccatggccatttctctgccatctgagagatcatacaagtgattgaaaagggccatgatggaaatagttacagcagagaaactggcacatgctatgaaccaaggcatccctgtgtactaccaggagctgaatactcactaggctttctcctaaccacccctgctgccttctgaggtcatacagtgagtcaccctattgccaggttatagttattaaaaataaaagtttccccccaccatatgaagttcaaattctttaataacacgttgccactttctctggtcttgtttctcagtgaccccctctcccactcttatcctcagcccagtatgtcatttcatttcctgatcttctgagtcatactttgcagagtcccaaagcccagtgagcaggtcctgcttcggtgtttgtcaagcagaacacttaaggacactttggggcccgtatcatgctatgactggtgcatgggtatgtgtggtgtgtccatgtgtgtgtgcatgtacatgtacacacacacacacacacacacacacacacacacaagcaggtgctaaattctttcttttggattaatggatctcttttggatagaaatcctcttttcttgtcttcttgttttcatttaatcaacctctggcatagctccagagattcagaaaagtggaggaaaggaggacagagtcagagagggtagggaacggggaggaagagaagatgaggcactctacaggaactatccactttgattgtctgaggcagggtctcccattgaaggtcgctgactaagctaagctgtgagcctcaggaccttcctgtctctgtcttccctgcactagaattttaaannnnnnnnnnnnnnnnnnnnttttatgtgggtgctgaggattgaattcagcaatcctcacgcatgttcagtgtgcaccaaccgggctctctctaggccctgcttagcttgagagggaaggtctccatagttcagtttgacctgaaactcatgttctccccacctctgcctcagtggtggtgttgcctgcgccaccatgagtgctagcgattgtggaaagcaatggaacccaaaggtcaaacaagagggagaggaatctggccagcagcaaggaaagccttgaacgaatggggagaaccaaggctcccttaacaggaaggtgaagcgcctggtttctggtgctctctcggagccagctgacctgcagggaggcaggtgttggtaacagaaggctccaagtgggtaatgggcgcgggggtgggaagcagaaaatgtggtggagtctcaaatgctttttgaattacgctgaattatagctggcagtaatcacaaccttccgggttcattcctttgccttgggaagaagggaagagattaaccaaatgacaggttggggggtcccagggctgtagaatgctggccccacaggagcctgggggttgaaaggaccaagtcagtgggtgcagcatggagcctggggcacagctgggtccagaagctcaggaatgactgcaaggtcacgacaattagttaagtgcctgtgcccagcaggccctgagataggaaaggcctgccttccccattttgttgatgtggaaacagccaggggaagtgactcagagacagagtggaaacaaagagtgcctctcgtgatattctgacttctgttggtctgagtggctggtgcttgggctctctcccgtggggcttccttccatggaacatacttctgtattctcaggtcaggcaggggaacttgagtgggcagagcaggaactcggggagtctgggaggctttccaggtgaacagaatggacacaggaaggcgagcttggttatgaaggcagtctttgggctggagagacagactgggctgcagaggccacctcatttactgctgagttgggcttggaaaacctggccttgctgttaaattagcttttccagttctttctttagctaattctcaggcacaaacaaacaagcaacatgtgtattgcaatgcccctgattcttcagaaagactcggtaaatagataacatcagcttcatgtctccatagagaaaacggacctaaaaaggtcacctggttcaggtggcatagctgataagctgcagaaacctcagaccaaaattgccaaaagttactgctggcatttcatgaaggaatgagccttgttttgttttgtttttttaaattaggtattttcttcatttacatttccaannnnnnnnnnnnnnnnnnnnnnnnnnnnnnnnnnnnnnnnnnnnnnnnnnnnnnnnnnnnnnnnnnnnnnnnnnnnnnnnnnnnnnnnnnnnnnnnnnnnnnnnnnnnnnnnnnnnnnnnnnnnnnnnnnnnnnnnnnnnnnnnnnnnnnnnnnnnnnnnnnnnnnnnnnnnnnnnnnnnnnnnnnnnnnnnnnnnnnnnnnnnnnnnnnnnnnnnnnnnnnnnnnnnnnnnnnnnnnnnnnnnnnnnnnnnnnnnnnnnnnnnnnnnnnnnnnnnnnnnnnnnnnnnnnnnnnnnnnnnnnnnnnnnnnnnnnnnnnnnnnnnnnnnnnnnnnnnnnnnnnnnnnnnnnnnnnnnnnnnnnnnnnnnnnnnnnnnnnnnnnnnnnnnnnnnnnnnnnnnnnnnnnnnnnnnnnnnnnnnnnnnnnnnnnnnnnnnnnnnnnnnnnnnnnnnnnnnnnnnnnnnnnnnnnnnnnnnnnnnnnnnnnnnnnnnnnnnnnnnnnnnnnnnnnnnnnnnnnnnnnnnnnnnnnnnnnnnnnnnnnnnnnnnnnnnnnnnnnnnnnnnnnnnnnnnnnnnnnnnnnttacctcactcaggatgatgccctccaggtccatccatttgcccaggaatttcataaattcattctttttaatagctgagtagtactcccattgtgtaaatgtaccacattttctttatccactccctctgttgaggggcatctgggttctttccagcttctggctattataaataagactgctatgaacatagtggagcatgtgtccttcttaccggttggatcatcttctggatatatgcccaggagaggtattgcgggatcctccggtagtactatgtccaattttctgaggaactgccagactgatttccagagtggttgtacaagcttgcaattccaccaacaatggaggagtgttcctctttcttcgcaccctcgccagcatctgctgtcacctgaatttttgatcttagccattctgactggtgtgaggtagaatctcagtgttgttttgatttgcatttccctgatgattaacgatgctgaacattttttcaggtgcttctcagccattcggtaaggaatgagctttgtaatacagaagagagagtgtgattcgagaatgagcagatgtcttttaaaatgaatacattcaacactgggagtgacagccaatacctgtgactgccagactcagatggccgagcaggagaaagtggaaggccagggctagactgggccaggatatatcacaaacaaacaaacaaactaataaacaaataaacatgtggtgacatacacctgtactcctagcatttgagaggtggggccaggagaaccaagagtccaaggtcaggagctaggctatggctatagagaagagcacttacgatgcatacatgaggacttgagtccccagcacacttgaatccccagctgagcatggcttcatatatctgtaaccataccgaggggcagagcctgcgtatatctgtaacaacagcattgaagggcagagacaactgtcccaagaactcactggacagctattatcctgggtgatgtgtttgtggttttgtgagacttcacctcaaggtactagggaagagaataaatgagaaaagacatctgatgtccttcactggctgcatgtatccaagtgcatacatacgctcaccagcatactcatatgcatgtaactcccacagagaggtgtatccacacactcctaactctaaaagagaattcaaggttccctatagctgcatagcaatctcaaggccagccttgacacggaagaccttgtctcaaaaaagcaaaagcaaaaaaaaaaaaaaagccttcaaaacagaacaaaaccaaaatcaaatccactgggtcacaacacgagttttctgcacgatccttatatatcagattttgtggtagacacatgaaaacattgtcatggccaccatctgtctcccaaccacaatttggaaactctgattcacgcaacctccatctctaaccatcagagccagtcagtggctgggccttaatacccaggccctcactaacagcagtggacggtgacaccaacctggtagctttggtaactggtgttagtcagcagcgcggttggcatgatgtcaggcagatgaatgcttacccacttgactcattcagatgtgggtttcaaacttgtctccagggccgctgtgccacatcactgggctatccctcactgtggactttggagtcgggcatcatggtagcctcaagtcttggccactcgctggctctgtggcctggcaaagctgacctctgtaggactcagtttcttctcatagtacataaggacaagtcccatctgcagaattattctgggaaatcgggttactgtgtgaactccctgttatgtgatggtagatgttccataagagagaacactgccttacaatgtccacctgacaaaggactttcttttcctgtggtgatccccagaaccttcctcaggctgggaatgcagagcttggtagtatagctgagtcgtctggaagaggtttaaatcttacttcagtcccacctcctttgggcaggtagatgacttgccgttcaggaagggcatcattgagtttcttccagaagattaataggggctcggagactcaataggcccctgaagtatcctttgaaagtttgagccaagaagttcttgtagccaatcaaaatgtttcctgttttaatttgggcccatttccttgtgtttgttattctttgcctgtagcctgggcagttctggggcctaagaagcacactgaagcccactggtggctcagagccaagggttcactggtatcatggtatggacacgccttggacaccacttggagggccgagggcagactaggatacagggtggagtggtcaccggtggtgggagagctgagtctggagaaaagggtagggctttggctcatgaactgaggggtcaggggacttttcaaaggttaaggcaacagatgagaaattcaaatagccaggaggtgcaggcaagttccttcacgagtactaggagccgacggtttgttggtcaccgtctcgtcctgacttggaattcagtggtatacagtgatggcttgaaatcagccatgatgggaatatctacaccataggtgggaaaggctgaagacaaacacttacccctgtaaaaggcacctggcagaaggaacaggatactggaacgtggtggtcacatacgatgttggaatataggcaagcgatagccaggaagtgatttccctttgtgtcctactactattaatggactcccattccttctctcccttcacaaggcttccagaaggtaagcagggtattattgccccatgttatcagtggggaaaaggaggctaggaaaagttaagccatttgctgggtctcgcggaatttttttttttttttttttttagttctggaacagggtcacaggcagagtgaggaagagagactggagaatctaggtaaatctcaggccagaaggacaggccttcctaaacactaccgtctggtaactctgctttggagagtttgggtaaatcattatagattgttctctgtggaaggagtctgggcaatttttatgtgttaatagagatctgggcactgccttgtaggctagggtcttcagactcaaattctgttttcatttttagtttgttttttttttttgagatttatttactactataaataagtacactatagctgtctgcacactagaagacacaccagaagagggtgtcagatctcattacgggtggttgtgagccaccatgtggttactgggatttgaactcaggaccttcggaagagcagtcagtcagtactcttacccactgagccatctcaccagccctcattcttagttcttataggaccagtggagacagtctctcagggaaggtctggattgtgtttgggctgctgaatgctgcttggcacatatgttactgcagctttatgtcattctacccttggagcaatactgcctttgtgtgtgtgtgtgtgcgtgtgcgtgtgcgtgtgcgtgtgtgtgtgtgtgttttaaggtttttctagaatctatagtaattctgctggtttcttctgcaaatgtgttttccctgggacaaaatgcagaactgaggggcccacatcaggctgaaggtaaaagcggatcatgggtaaccagaatgactttgctaacatatttctgtcagcaccctgtgggccatgagctcactgggctagaggaagctgccgaagataagaaatccacatcctctgggcttacaggcaatggctgacttgtcagctggtgtgggctgctgttgctcagaggtactgggtcatggtcaggatttggggacaggatgctcactgtgctagacactggtcagattcggaaatgggtggggctcccaagtataccaggttgtagttatacatgcatatatacataatacatacacacataaacacatacatacatatacacacatacatattcacacatacatatacacatgcatatgattatgcctatacctatacatacataatacatacatacacacacatatacatacttgtttttttaagaatagttttaggcttacagcaaaattacaggaaatgcaaagaattcccataatgccactcatcaccacatgcacggcttctcccattactaatcccatactgataccattgtggccttctcttgtcgtttaacatcagactttatccttcctgtgctgtctacaagacagatagaagtatgacgatccttatggaatcatggtagactgaacatttccattgtctgagcatactctgtgctctctgttcatccctccctgtctcctcacggcaactcctggccttaaatttaatctttaaacttttgtttttccacaactggaaccatacaggatgtacatagacttctcttttacttaaaaaatattcatttagctgtatgtgggctccatgccttgaatctcagcactagagaggccaaggcaggtggatctctgtgaatgtgaggccaggttgacggacacactgagaccctgcctcaaagaaaaaatataatcactttaggttcttccatggagttcatatcttgacaactcttctctctttgtgcatgcatgcttgcgtgtgtgtgtgtgtgtgtgtgtgtgtgtgtgtgtgtgtgtgtgtgtgtgtttgcaaatgtgttcctatacatgcgagtagcacatctgtgtgggagtatgcaagcatcaatgcgcatgagcatattggatctcaggggcttggccagcagccttgggtcttagcagagtgtagtctaccttctttgaaataagctctcattgacctggaactcaccaggtaggcctgtaaggcccagatttcctgtctctgctttctctaacaatggggtgataaatgcatggcaccacgcatagctattaaaacaactacagcaacaactcgagttctggggagagttcaggtccacgtgcttgcatagccagcactgtgccgtctttacccagccccaactcttctcttcagtgtgaataagagttcattgtgtggataccagtttgcatatccattcaccttgactcatcccgcattttggtgattacagataagactgccattcctcgtgagcaggtgttggcgtggctgttaagttttcaaatacttcgggtaaataccaagggagaggattccgtgatggtgtggtaagaggctgccaggctgtctcctaattctggctgcaaccgtcacgttcccccacattcttactgcagttttctcactgactccttgttttgaatggaaagcaaagctctcctctaggagcagccataacagtgcaggctcaagagcatctgaaggtctcgttcctaagtacctgacactttgccctggccgtgtctaggcatagacttcaaccttctgctttatcttcaagcaggtattgctgcctccacattcctcagtactcagtgacacatgacaaatgaccatggagtgttccccagttctcaccgttggatcttgaactttaccaatacattttaagcctatttaagtattctctcgtacttgtccagcatttcagggggcatctgggggtgtctaggatgtgcctactgatgctgcagccctctgaatgaagatgctacctagactgaaggggcacctgatgggatcactaaagacatttctctctttctctctatgtaaacctctctctatgtatccctatgtcataccagcatcttggggggttagaatttgagcatataaatattaagggactcatgcattcagtccattgcagataaggtcaagtccctggggttgtgtgtcataggtcactccacttcccccctcagatgcctgtctcccaatccacctttgtgaaagccttgtgtacaacttaccacatacaaattgaagcctaccagaccagcagatcctcaagccagcaggccagcacttcctggagcatatgcagttgcttgtttgtactcctgactaggactatgctatttagggactaagtacccccccatcttcccaatcctaatgtaccattgccatcatccctcctgggccccctcaggccttgccacttcagtattctccctcatctcccagctgcctgttctgcatctttgcctaaaggctttctggcatctcccttgtgcagaactgacaagaactgccaagaacactgagcatatgaagtggagtagacatgctcccagctctccctttctctgagtgagatgtggtcggtccatcctgggctccccagtcccctccagttcccagaggattgaaagggggcttgtccaagattcagtactcagcacagtccccttttcgcctgtctttccttcaatgccacattgttctacgctcctgggggtgcttcctgcagacacccctcaaataacttctgaattccttcaagaagaatttatatggattgttactgtagggtagaacactagggtccactatacatagagggattattgagagaggggggttacatataaagagagagaggtatacatagagacaggtatacaaattcagatagacttctagaacacatattctcctttctgtcagtctagtcccaagatgtatccacccttgtgagctcagccttgtgctccccttttctgcttcccctgaccccagagacatgtcttctttctccctgaattcttacaataccgcctttgtcccttcctaaaacatatctccttttttgttgttgttctttggtgttgttgttgtatgggtatacacacatgtacatatgaggtatgtgtgcacacacaggtagaggtaagatttgaatgtctttctctttcactgtccattttattcttggagacaagatttcttgtggaactgagagcttgtggattcaactagactggccagcaagctccgagacccatcttttcctctccacagcctccattgctggggttataggagcacatcaccatacctggattttatgaggttactggggatctgaactctggtctttgtactttattgactgagccatcttcccagccactgctttattgttttgttttaaaggaatagttccttagagtaatgactattcaaatctttccaggtacctggatcagtataaataaacaatcataggctatgttctgcttctaaaatacttgactccatatttatattgttactctgccagctccattatttttccctcctaattcctggtgcaggcaacaccccaccaccaaactacacccatatgagaatgcacatcttttatctctaagaataactctcagacctagggcttagctcattctagaactagctgggtagttttctgttttgagacaaggtcttgctctgtagatcaggtcagcctgacatttatgacaaccctccttcctcagcttcccaagtgctgcaatgacaggtgtgagccgtcagacccaagtttaaggtgatcgttagaaaaattcttggaaattaagaccgcctaatcctcaccacagacacattcaatacatgcacagagggcagggattgggggtacactggtgacccctgtacaagcctcagctgatgttgccaatgcatagttacaacttttcttacttctttggacattcccccactttataattttatacatttatttatggtgtgtgtgtgtgtgtgtgtgtgtgtgtgtgtgtgtgtgaacccatgtacatgtgcagacagtcacgtggtgtacaaactactctctggagtaagttctctcctgccaccttgtgggattgagaatggaatttgtgggatgnnnnnnnnnnnnnnnnnnnnnnnnnnnnnnnnnnnnnnnnnnnnnnnnnnnnnnnnnnnnnnnnnnnnnnnnnnnnnnnnnnnnnnnnnnnnnnnnnnnnnnnnnnnnnnnnnnnnnnnnnnnnnnnnnnnnnnnnnnnnnnnnnnnnnnnnnnnnnnnnnnnnnnnnnnnnnnnnnnnnnnnnnnnnnnnnnnnnnnnnnnnnnnnnnnnnnnnnnnnnnnnnnnnnnnnnnnnnnnnnnnnnnnnnnnnnnnnnnnnnnnnnnnnnnnnnnnnnnnnnnnnnnnnnnnnnnnnnnnnnnnnnnnnnnnnnnnnnnnnnnnnnnnnnnnnnnnnnntccttgcagaacactgtatgctattttaaaatacaaatgtagttagtgtttaagtttgaaaataagggctctgtgtcactagcccttctgaagtttcaaaaacctatgtccactggtgattaaactagattaagacagctgagattcaggctgaattacagattgcacggattcttaatttacttctgtgtcagtactgtggccaggctgtcctcagtacaggctgcagtgtgcaggagcccagactagctccatctgtcatgcaaaacaactttctaccctaaacagcagggaaccagccaaggggctttttttccctaggccagcctttctgtgatccctggtactctatgtggtgagttcctatgaggtccaggcctcctatatgaaaactctagcaagtactgaggttgtgagcaagatcagtcaagttaatggcctgtacctgatctgggcactttatcttcttctctgtacattctcttggggccaccgacccccaagttatgtttcttctcagattttcctctccactcctgttttccttctcctatttatcacagcctcactccctgctttttctgctctgctgtgtcatgccacagccgcctcctctcgcagctgcctcatgtgctaagtgtgggcctcttgcctaggagccagtgtcggaggagaacagggaaggaaatagggccagaaggcagagcttgcgtgcttgagagtgagtctagattatatacctggatgttttatcaaactggctcccatgcttcaaagcctccccagtcgaagcagctggaggcctttgcagggagttttcaggattaaaagaatgggctgttgtatccatcctgggtcttgtgggtgtgccagcctgggggatgtggcatgtggcttgcaagagctcactctgtggctgtctctctgttgtctctgcaggactgcaatgtgccggtcctagctgcagtctgagaggatgtccggggtgtctgagcccttgagccgtgtaaaagtgggcactttacgccggcctgagggccccccagagcccatggtggtggtaccagtggatgtggagaaggaagacgtgcgcatcctcaaggtctgcttctacagcaacagcttcaacccagggaagaacttcaagcttgtcaaatgcacagtgcagacagagatccaggtaagggtggcggcctctgttcctcagctgctctgctcctccttccacttcctggacagatgagcaacccttcctgagcctagcaacttcttctagcattgtctgggcagggcagatgttggcatcaggagagacattttcagcttgctgtaccactctcctctagctgtgcatgcagggttacactacactggcctgttttaacttgcctttattgaacatttactatatgtatccctgtggtcagtttctcaacatacatgctattgaattctcccatgaggagacccaataagaacatacccannnnnnnnnnnnnnnnnnnncccattctcttccgaacattccttcatgatggccctcagaagattgctctggagggctcataatttgagcaaaggaattgggtaccttgggggaagtctccccaggcccaagggggctaaattggctctgtcactagcccttctgaagtttcaaagacctatgtccactggcgactcctttcatcagtgctatggtagtcctagctgccaggtcactgtgctgtatcttgtacaatgcacactacagctcacacaccagaataggatgcattgatgaacacgctgtctcttccagttagcatccttgcttcagttgggtagacttctgttacccatagctgatctgattagggttctgcttgcccgtcacgtgtgagggtgtgtgcagagagtaaggaggccctttcctctggcctctgctgatactcaagcctcctttgggtgtcccatttctgcacacaccttatgccatccaccgccaactcaacctgtttgtttccaaaagttaacttgatttccaagtagtgagaagcaccataatgacccaattttgatgacaaacgaacacatctagctattcccactagaatgtgttctgaggatgtgctgaaggacagatggaattgaagtcgtggcacaactgtccatggggaaaaaatggtggagacaaacccagacactattgcataggccagcaagattttgatgaagggatcctggtatagttgtcttgtatgaggctatgccagtgcctggcaaatacagaagtggatgctcagagtcatctataggatggaacacagggcccccaatggagaaactagaccaaggagctaaaggggtctgcaaccctataggtggaacaacaatatgaactaaccagtaacccccagagcttatgtctctagctgaatatgtagcagaagatgacatagttggccatcactgggaagagaggccccttggtcttgcaaactttatatgtcccagtacaggggaatgccaggaccaagaagtgggagtaggtgtgtaggggagcagggcggggggagggtatagggaacttttgggatagcatttgaagtttgaaatgtatataaagaaaatatctaattaaaaataccttaaaaaaagaaatggtggagaatggcaggaaggttgttttagtgaatagagagatttcaaatgtggcacaagctatatgattctaagtatctaaaggagaggtgggcacagataatgaaggtgtagaacacacgccttggaaatccagagttagactgggggctagggagcggcatgtagttgttgtttgcttggtttggtttctaaacatggtctcactgtttagcccgggctggcttcatattcactctgtagcacagaccaatcttgaacacatgaacaccatacctcagctttccaagtgctagcattacacatactcaggctcacacacatagttcttaagcaggagatcttcctggctctgtagttacttaaggtcagaatgtatgacaggctacgagtgtctgaagaattctctggaggggcacagggacagagtggataacaaaagagtgacataactcttttcttggaacttatacccaagccttttgattttccctgcttgcaatgtttcctactgtcaaaacgtaaccttctaatgccatcctgttattacaagctgtgactttaaaaccacctggactaacagtcatgccaggctccagctggatggcttatgtgggcttggatctgaatgcgtacggaatctgtgtgcagatttccctcaagaggaccatgcccacctgttgctttgctgtagggactcaagatgataaatgagaattacctagcacacagtgggttaagtacctggcacatagtggattccaggatctggatccgttggtagtctggtttatcattgctctgcacagctatctcagagctaccagtgttccacaggaaaaaaaaacctcaatttttttatttatccacttatctgtcttattttcaaacttagacagtaactacatttgtattttaaaatagcatacagtgttctgcaaggagtttgccccggggctggggagtatggcataatagattacacgcccagtgtgcccaaggtcctggtttctatctctagtnnnnnnnnnnnnnnnnnnnnnnnnagggaagggaaaggaagaaggcaggctcagagaagagatttatgctcaaagaagcttgggaaatgcttcattaaacaattgggaactggataatagcttagtgataaggcactggcccatcactgggaggccttaggttctatccctagaacatacctctcagcccttcctgaaaatcatgaatggagtctttcacagcaagacttctcagaaccctcatgtttacctgatgaattactgagacagagccatatgtggtacttttcatttgcctaaaggagttctttgtaggcaggacttgttgattctctggcaagccttttaagacacattttccccaccccccaccccactccaccccacccctccctgctccatagcagaacaggagagactgagagagagagtgggctatgggctgggaggttatagttactaataggacagaaatgtggatttttactaatggagtgttggggcacaaagataagttgatagttctggcctgtatcaagaagatagagtcaatagaaactgatgattaactaaatgtgggagggaagaaaaggaaggagacaaagataactcagactctggcttgggcagcagaaggggtgctcagtgccattcattgggacgagaaaggaagtccaagctgagatttcagcttcacgcctgttctgtttgaagcactcttgaaacacccctgtggatagacatggtcctgcagctcagaaagatgacaggacatagacgagacgatttgggtgtcaacctgcaatgaaggacaagccagagaactaggccatcactgaaggatgagaagagcaagagaaggattcgaggggggggggggtgatcagggaagccagaagctgggagagaaaagatagtttaaaaaaaaaaaaaaaaagcaaccaaccaacagaggtgaggtgggggcggggccaagaaaggaatggttatcagtgtgggatgctaagaagttcacagataaagccggaaataggttccctgacttgaggactctcaggactctatatcacagatggtattctgctgggcagttccactacaagaggcctttgttgtggagagagaattaaccaatatggcagagcattttttatcatgaaaggaagaaaagaggagaagatacagcaaagggaacatcataaggtcctaaactgagaaggtacatagtaggtctgagtccattagtgccccaagatggacaattaaagccatgttagtgaaagactctgagaggagcccctcgctcaggcctcaggacaatagcggacacccaagaactcacgatagaccgagcttgttgcaaaccacatgaggctttattcggggaaagccagagctctggggacgactcatatccctcgcaggggtagaggagtcgacctcgaggggaaagaggtcccagtttttataggccctcaggggggaaaggagaagggggagagtaggggatttccagatctaaacgatatctattctcaagaaatgggtatgggaggggtacaaggaaagagtctaatgaaggtgcagcaatgggcacacacctggtcagaacattggcagacacacaggttcgaggagtggccagagcattgtgcacctctattattctaaatcagtgaagctagttctgctaacactgacatctatcttgccaatttcagggcttctgtgactttttacattctgtcaggatctttcattagtacctttgtcttcactccatctcattggaaacattgatataaatgtaaactactgagtgatatgagattattcttttaaaggttgatgtaggttacatggtggagattggaggaaggcaagcgtggccataggtagaggtctgtggagagatggtaaggtcatcaattaggatagccacagatactggtgatggctccaccaatggtaggaatgataacagtggtggtgatggtggtggtggtggtaatgacaggggtaggtgactatgctgatggtgaaggtgatggtaaaaactaacatttttacacacacacacacacacacacacacacacacacacacacacacacttgttatctcactggcttctcaaaaggcccctctgaaacacaaagtgttattatctctactttctatttaaggaaacttcgtgcagaggagttaagcaaattgttacttaagtggtgggttttgttttcaaacccagacagtccacctccagagcatacactcttacacaattcagtctataggaggaagatcagtgatttggaggatacaagagttggcagctctctgataggtcgggaatgtgaggcatgggaggagatatggagaactgctgcctaactcagatagacaggagcccattgtctgagatgagcactggaggaagctggctggggatggggcatcctccactcagtttggtctctgagtacatttgagatgcctttatattttcaagtggcaacatttaaaacaccacgggcaggtgattctggagaaagattaattcttggtacagacatttgaattggtcagcctctggatggtggctgaatgaaagaaaccctgtggacaagacaatacagaagagcaacctgaataatctgtcttctattccacagcttatggttgtgtgcctctagtaccaggcacctggatggggcactgacattctctaaacacggtgtaattccctgttcttgtaaggcttcctgaccaaggctatgacattcattcatatgcatgaatgaatctttaaaaggcaatggaagtgctctgataaaaagaaatagaacctgtgcaagcacaagcatgcaactcaaagaggttgttggtccagctttgtaaagtgcctgtttgagaacactgccccctgtgtgtagagatggggcccagacccagcatccttgcttaagattcttctgaagttagtggcctctttctcccctgcttccaaaccccacactgtctcccctatcacttggtcttgactttggtgaatttttcttttactctctgtccctttatcacccccccccccacctcctgctcccagttctcaaaatgctgccaacaccttcagacttgccgaggacatgtccctctataagaacactgctgcaatgtcaaccccttctcttagctgtgtgtgatgaaacagaagcaacagagactgcctcaaacagcccactttggtgtcatggtcacacagtgttcttatgccagacagactgctaatttctttattattattattagatattttcttcatttacatttcaaatgcgatcccctttcctagttttctctccgaaagtcccctatacccccgccctgctccccaacccacccacttctgcttcctggccctggcattcccctgtactggggcatataatcttcgcaatatgaagggcctctcctcccattgatgaccaactaggccatcctttgctacatatgcaactagatacacaagctcttgaggggcgggggtaactggttagttcatattgttgttcctcctatagggttgcagacccctctagctccttgggtactttctctagctccttcattggtggcctgtgcttcatcctatagatgactgtgagcatccacttctgtatttgccaggcactggcgtaggctgacaagagatagctatatcagggtcctgtcaaaaccttgctggcatatgcaatagtgtctgggtttggtggttgtatatgggatggatccctgggtggggcagtctctggatggtccttccttccatctcagctctaaactttgtctctgtatctccttccatgggtattttgttccccattctaagatggaatgaagtatccacactttggtcttctttcttcttgagtttcatgtgttttgcaaattgtatcttgagtattctaagtttctgggctaatatccacttatcaatgagtgcatatcatgagtgttcttttgtgattggcttacctcactcaggatgatatcctccagatccatccatttgccctagaatttcataaattcattgtttttaatagctgagtagtactccattgtgtaaatgtaccatattttctgtattcactcctctgttgagggacgtctgggttctttccagcttctgctattataaataggtctgctatgaacatagtggagcatgtgtccttattacaagttggaacttcctctgggtatatgcccaggaaaggtattgctggattgtcttagtcagggtttctatccctgcacaaacatcatgaccaagaagcaagttggggaggaaagggtttattcggcttacacttccatactgctgttcatcacaaaggaagtcaggactggaactcaagcaggtcaggaagcaggagctaatacagaggccatggagggatgttctttactggcttgcctcacctggcttgctcagcctgctctcttatagaaccaagactaccagcccagagatggtcccacccacaaggggcctttcccccttgatcactaattgagaaaatgccttacagttggatctcatggaggcatttcctcaactgaagctcctttctctgtggtaactccagctgtgtcaagttgacacaaaactagccagtacaattgaccccttgtcaacttgacacacaaaaacatcactagtaagcctcaacccttacaatcttattcatccccaagatctaaataactttaaaagtcccacagtctttacatattcttaaaatttcaatctctttaaaatatccatctcttttaaaattcaaagtctttttacaattaaaagtctcttaactgtgggctccactaaaacaatttcttccttcaagagggaaaatatcagggcacagtcacaatcaaaagcaaaagtcaatctccaacagtacaatgtctgggatccaactcacgatcttctgggctcctccaagggcttgggtcacttctccagccaggccctttgtaggacacgcgtcatcctctaggctccagatgcctgtactccactgctgctgctgctcttggtggtcatctcatggtactggcatctccaaaatactgcatgaccccttcagttctgggccttcaattgcaactgaggctgtaccttcaccaatggccttccatggcctctcacagtgccgagcctcagctgctttgcgtgaccccttcatgccttcaaaaccagtaccacctgggtgacccttacatattaccaagtcccgctgcagcaggagtacaaccttgnnnnnnnnnnnnnnnnnnnnnnnnnnnnnnnnnnnnnnnnnnnnnnnnnnnnnnnnnnnnnnnnnnnnnnnnnnnnnnnnnnnnnnnnnnnnnnnnnnnnnnnnnnnnnnnnnnnnnnnnnnnnnnnnnnnnnnnnnnnnnnnnnnnnnnnnnnnnnnnnnnnnnnnnnnnnnnnnnnnnnnnnnnnnnnnnnnnnnnnnnnnnnnnnnnnnnnnnnnnnnnnnnnnnnnnnnnnnnnnnnnnnnnnnnnnnnnnnnnnnnnnnnnnnnnnnnnnnnnnnnnnnnnnnnnnnnnnnnnnnnnnnnnnnnnnnnnnnnnnnnnnnnnnnnnnnnnnnnnnnnnnnnnnnnnnnnnnnnnnnnnnnnnnnnnnnnnnnnnnnnnnnnnnnnnnnnnnnnnnnnnnnnnnnnnnnnnnnnnnnnnnnnnnnnnnnnnnnnnnnnnnnnnnnnnnnnnnnnnnnnnnnnnnnnnnnnnnnnnnnnnnnnnnnnnnnnnnnnnnnnnnnnnnnnnnnnnnnnnnnnnnnnnnnnnnnnnnnnnnnnnnnnnnnnnnnnnnnnnnnnnnnnnnnnnnnnnnnnnnnnnnnnnnnnnnnnnnnnnnnnnnnnnnnnnnnnnnnnnnnnnnnnnnnnnnnnnnnnnnnnnnnnnnnnnnnnnnnnnnnnnnnnnnnnnnnnnnnnnnnnnnnnnnnnnnnnnnnnnnnnnnnnnnnnnnncacccactccccctttttggccctggcgttcccctgtactggggcatatgaagtttgcaagtccaatgggcctctctttgcagtgatggccgattaggccatcttttgatacatatgcagctaaagacaagagctcccgggtactggttagttcatattgttgttccacctatagggttgcagttccctatagctccttgggtaatttctctagctcctccattaggggccgtgtgacccatccaatacctgaatgtgatcatccacttctgtgtttgctaggccccggcatagtctcacaagacagagctttaactgggtcttttcagcgaaatcttgctagtgtatgcaatggtgtcagcatttggaagctgattatgggatggatccctgcatatggcagtcactagatggtccatcctttgtcacagctccaaattttgtctctgtaactccttctatgggtgttttgttcccatttctaagaaagggtaaagtgtccacactttggtcttcgttcttcttgaatttcatgtgtttggcaagtaaaattgcaaagcttctgcaaagcaaaagacaccgtcaataagacaaaaaggccaccaacagattgggaaaggatctttacctatcccaaatcggataggggactaatattcaatatatataaagaactcaagaaggtggactccagaaaatcaaataaccccattaaaaaatggggctcagagctgaaaaagaattctcacctgaggaataccgaatggcagagaaacacctgaaaaaatgttcagcatccttaatcatcagggaaatgcaaatcaaaacaacactgagattccacttcactccagtcagaatggctaagatcaaaaactcaggtgacagcagatgttggcgaggatatggagaaaggggaacactcctccattgttggtgggattgcaagcttgtacaaccactctggaaatcagtctggcggttcctcagaaaagtggacatagtataccggaggatccagcaatacctctcctgggcatatatccagaagatgtcccaaccggtaagaagaacacacgctccactatgttcatagcagccttgtttataatagccagaagctggaaagaacccaggtgcccctcaacagaggaatggatacagaaaatgtggtacatttacacaatggaatactactcagctattaaaaaaatgaatttatgaaattcctaggcaaatggatggacctggagggtatcatcctgagtgaagtaacccaatcacaaaggaactcgcacaatatgtactcactgataagtggataatagctcagcctgctttcttatagaaccaagactaccagcccagaaatggtcccacccacaaggggcctttcccccttgatcactaattgagaaaatgccttacagttggatctcatggaggcatttcctcaactgaagctcctttctctgtgataactccagctgtgtcaagttgacataaaactagccagtacatggatcttccagtagtactatgtccaatttttgaggacccgccagactgatttccagagtggttgtacaagcttgcaatcccaccaacaatggaggagtgttcctctttatccacatcctcaccagcatctgctgttacctgaatttttgatcttagccattctgactagtgtgaggtggaatcacaggattgttttgatttgcatttccctgatgattaaggatgttgaacattttttcaggtgcttctcggccattcagtatttctcagttgagaattctttgtttagctgtgtacccgatttttaatagggttatttgattttctggagtccagcttcttgagttctttgtatatattggatattagtcccctgtcagatttaggattggtaaagatcctttcccaatctgttggtggcctttttgtcttattgacagtgtcttttaccttacagaaactttgcaattttatgaggtcccatttgtcgattcttgatcttacagcacaagccattgctgctctgttcaggaatctttcccctgtgcccatatcttcgaggcttcccccctctataagtttcagactgctaatttcaagtttttaatcttgactcttctctctgtaaatgtgaatgccccactgtgctttctctgtgatgaaacaaactatggcaaagcaggcatagcagcacttagctatgatcccagctttgtaggggttgagaatcatcagtaccaggacagcctgagctacacagtgagaccctatatccaaaacagaacagctttgtgaataatcattggccatggagcctaagtccttgtagaaagcaggcagtggctaacaagaccagcagtgccccgatgagacattggtgctgcccttcttgaattcctactttgttttctttttctttagaatcatgtttgttaggagttctgagacttcataacaggtggaagcttaagtaatattttcctctaatatgctaatttgctcgtctaggaaagggattaagacaacaccttgcaaacaagaatcatccttcacgcttttaaaaatctgccttctagtaccttttccttttctttcccttccttcccatctccagcttatttgcaggttgggtgaccatagtcctcggttccatcccagtttgtatgcactgtccagggatgattagcagtgccttgctaatatcaatccaaccatgaactagagggcaaattttaccatcacccaggtctaagtgccatgctcctctctgatcaggatgctgaagggctagttcgcactctcttctccttctagctgactcttgctagtacattctgtgtgcattagaacttctgcttttcatatgggagagcattaagctaagggtgcgcttgtgcctgtgatacaatgtatcttaagagttgctctcacccatgtgatgatacaatgtatctcaagagttgccagagcccagcaccatcttcatcctagatcccttttcaaggccctaccttgtacaaatataaagtcaagatttattttttaccaggtgtagtggcgcatatctataatctcagcacttgggaagccaaagcaggaatatttctggaaatttgagaccagtctgagtcacagaataacttttgggttagccagaaatacatagcaaaaccctgttttaaaaggggacagggctggaaatatgacttagcagttaagagaacttcttcttgaagaggacccagcacctatgtggggattcacaagtctgcaatacaacttgtaaggaatctaatgccctcttctggtctctgtgggcaccagccactcatgtggtacatacacatacatacagacaagcaaaatactcagacacataaaataaacctttttaaaaaacacgcacatacaaagaaaaaaagaaaagaaggaaagaatttatcttggttttgtcttgaagtcttctggagcgttcgttccccaccctgtctcgatgcattcctcccacccatggtgggctctccagattgcagatgtcctttgggtgctgcttgacacgaggaaggtggaatctagctccccaaagcagcaggctctgcacccacttccactcactacatgacctgcccatccccacaagcctcccagactccccagaggaagaagataaaggtattgcaatacatagccctgccctaacttagcaagacacttaccccaagggcttcaaatttagtcctgtcacctaactagatacagggaattaggggatggatgcttttgtaccccttaattcgtatgttgaagttctaatccctaatatgatagataggaacataagaccctttggaaagaactagcactgaatattagtgtgttccccaaaataccagtgttgaaacttaatatttaatatggcaacatgggaaggcaaggcctttgggatgcgataaaatcatgaatggcattagaagtccttaagaaggggttgagagcccagtgagctgggccagcagttaggattgcatactgctcctgctgaaggctgaaatttggttgctagcacccatatcaatgggtcacaactgcatttactccagtatcagggttaaaaacctaaaaacctcttctggcctccatgggcactatactcatgcatacagctcttcctcccatacatacgcacataagtaaaaataaaaatgtaaacatcattttttaaaagatgtcaccctggccacccccctctcctatgtgaggatcgagcataggctccatcttgaaacccttgccagatgctagatctttgatcctggacttcccagaactgtaagcaacatattttcactgtctataactgatcagtaaggaactttgtagcggcagaagggacagattagcaccagagccagggcaggagctccctaaggctggcaggcagtcccaggcccagaggccatgttctttgtcacctaagcattcctcacttccctccttcagaggcacaagggcaatgcctcaaggttggaggagctacagaaagaaaggggagggctccctgtccaggaaagctactcctgaaagaaggcttagnnnnnnnnnnnnnnnnnnnnnnnnnnnnnnnnnnnnnnnnnnnnnnnnnnnnnnnnnnnnnnnnnnnnnnnnnccccccccccccccacataagaccagcccatgaaacaggcaggaagggctcagccaggaaaccacaaaccatcaccacagagtgacataaaaagaggcacattaatacacacttcttcttttccgcaccccttctcacttcctgtgtgtgcctccagctcctcacacatacagacactcaccacactgagaacaaagaagatgtgaagcctgatgggtctctcttcgtttatctgtatgcatagactccgtgacgtctgcgaaggaggaggcaggtgtcggtgctgctgttctatttttgatccgatagtttcgtggttgaatatcctcttgagagcttttatcacttcggaatgaatgctttcagagtgaaaagttgtgcaaactttagtatttttctctgctaccactagttgaaaaatatcagccccctgaatcgaggattcagaacttacgtagctcttgtctttacttcctaaccccgccttaataggttactaggaatcaatggttaaaacaacaggaatgtttctctcaccgctctaaagactggaagtcccaagtgcaggtgtcagaaacacatctggtgactcctactgctcctgggctttggtagcatcacttcactctgcctctctattcctactgccgtctttaccatagctctcataaggacacccctgattagcagccacacagaaagtccagaaagactgtgaactgagttgttcgacttaattatatctatatagagcctcttttgaaatgtgatctaagggtgagaacatgggaatatcttcttggagcaatcgatcccctgttagctacctggttgaaattactagtgttaccttcaggtatgtgcagtgagtttaatgtaaaggtgtttcacatacatattaccttgacacccagctggggtcagggaactgagcccagatgatacaagtctgtcatttccccccattgctaagggtctcagttaccaaaaagcctgtgtgctgccctgccctgcatctgatttcctgtgaggctgtcagagatatggtgccttgtcacttaaaaaaaaaaaaagatttatttttagttatgtgtttgttttttcatctgtgtgaaggtatgctaggtttgtgtataggtgcctgcagatgccagaaaaaaaagcattgaaccccctggagctggagttacagtggatcgagtcacctgacatgagtgctgggaacctaactctggtcctgtggaagacaggacacacactgctattgagacttcctccagtgtaactttgtcatttcctagataaccacatcctattccttagcttatgatgttaacttcaatggtacccaagttttgaatgtgatatacagtcttctgtaacactctcctgctcacctgcctgctctccatctctaccggctatccagatcttaatctcttgaagccctctttctagagactagttagaattctactatgctgttgacaccaagacttggacatgaagattgaacttcagtggccctgggtgttaaatggccacatgcaacaaagaatctttttgccccgttatagttagtgtcactattgatatgacaaaacaccatgaccaaaagcaagttgagaagaaaggggtttatttggcttgtgcttccacattgtagtccatcatgaaggatgtctgggcaggaattcaaacagggcaagaacctggagggaagagctgatgcagaggccatggagggtgctgtttacaggtttggtcatcatggcttgcctagtctacttttttttttttttataggctctagaaacactaacccaggaatggcaccacccataataggctgggctttcccacgtcaatcactaatttagccatgccctacaggcttgcttacagcccagtcttatagaagcattatctcatttgaggctccttcctctccagtgactctagcttgtatcaagttaacataaagctagccagcacatgccccaaatgtcaacagcaccctgatcagactcactaatgcagattattaggcactatagcaaatgtaaatactctagatccatcccccacagccaatgacactcttccgttgttcattctgaagcaaggcatgtgacccatcccccaagccaacttcacaatgtattataaagtcattactttaaaaggtatcagagtagcggggaacttttattttattttattttatttttgtaaaaaagtacattaacctgcctggtactttcctatctgctttttcttattctttcttcctcctgaagctcatcttagcattaagagctcttccttgtggcatattaacaatcagaaatttgaatagaacaggtctatatttaacagagtatttttatttttgaagacaacccctatgctccaagtcagttaaagataagacgcatgttactgtctcaaaatctttttattcttccttttcgaagttctgtctccatgtagaacaaaaaaggtaatgaagacacagctgtgttgggcttaatgcttatgccataaaactcttacagttctgtgctctgggcagaatgaagtcattttcctctggactatttcttccagagggcaggtatggccagatcagctctaggtgtggcctgatcatcctgggataatttttattatttataatcttctttctgttcctggtagcatccacatccacccaagctatctcatcattacctatggtgccatcataactactatttattgaatagctaatgtgtaccaagcattgtctgagctcttaatgtacttggaatgtacataaggcaggccagtcacagttatgtgtcatacgtcaaaacaccttagtctgtcaattaaaaataactggaaataaacgtaagcctgcactggtgtctcttggagagttatcacgggaagattctttttgaggcaggacacagtttttggaatcctcaaccaatcactgattagaactcaaagagtgtatgtgtccatctgatccaagatcagacacagacagttgttttagacctattttgccaatgtctttattaaatacctaggagtcttaacaaaataccccctgtagtgtggctgaagactacagaaatgcatcgcctcgtggctctgaaatctaggaagccaagatgaaggtgtgggtagggctatgcccttgaaccctgtggaggaacccttgcttgtctcttctccagacaagcatgaggactagagctcagactcccagcacctacgtcaaagctggtgggcacagagcacacctgtgagcccccactctggggactgagacatggtgtcttcagagcaagctggccagatagaccagcaaaatcagtgagtgctgggttcaagtgagagaccctgcctcaacatatgaagagggagaatgtcttctggaagacacctggcataaacttcttatctccacatgtacctacacacatgtggatatgaggacatacatgcatgcacaccacacagatataaatgaacattagaaagtaaatatacaagtcgtgacagctatgacatcactagatgatgtcacctcatgagactactttcttaaatgtggtctaccaccagctgaaaagtcctcacctagtgtatgtgggtgtggggacaagctaggtagagataatccttctttgtttctgacctacaagtgaaaaggtcaaagatgggaggggagccttctagaatcttcatactatttaacgatttgaataaatcaacatgaatctagaggaaaggaaaattggaggaatacagacattttcaagaaagtaccagaagtctttttgagtctagactgtaactcaaggcagctagaagacccacccttcagcactggaagccttggtaggggaagaaggtgaggtcttcctggagcaaaaagaaccctgggcttatctaaagagacagcacttggtaaaaactcaggttacatatggcaattgagtgagtaggggaacctcatgtactgtcatttttaaggagtgctttattaatagagaaagaaagactgactgtggcagctggtgagctggggttgagcaccaacactgctgcccctgctgtgtgcatgggtgagcaatcaagggaggcagggctggaggcagaagagcaggtgagccccctaatggaagccattctcttgacacacagacttctgcatggctggagggagggggtgtgcgcactggagctgtggccccatcactcttcacagtgtgcacatggcagatgggggctgatgctttgaatacagaaccactgtagcttgatagggcaagggtagacaatcacaggggacactgtggcccaggaagcttgtcatcctgttagaagacctttcttgtcagaactagattcacagcctaattttttttaatatatatcttatattttgaggtaattatatcattttccccttccttttcctcctcccatgaaccccactttgctctctttcaaattcatggcctctttttctttaattgttgttgttttgtgtgtgtgttcttaaatatatacatacgacctgctcagtctgtataatgttattcgtgcgtatggtttcagggctgaccattttgtattggataaccgatggtgttctcttccctggggaagactgttccgctgttctcagcactccttagttgcctgaagtttgtcttgtcttgtcttgtcttgtcttgtcttgtcttgtcttgtcttgtcttgtcttgggttgtggcctcttgagattctcccccctttaattttatcatatccatgggtgtcagctttgttcatgtcctgtttgtgcaaccatgttgatgagacttcatgagtgtaacttctgacatttccaggaggcaaaacgtcacaataaactccccgttcctctggctcttcctttgccccttcctccatagagatgcctgcgccttaggtgcaggacttgtgttgtgaacgtatccattgggactgggctccaccttcttcattttgattagctgaagttttctgtaatggtttccatttgttgcaaagaggagtttccttgaggaggggtgaggactctgcttctgtgtgggtatagggttacatacttagaatgcagttgaggggttatgctggtttagtgatgagtggattatagattctcctctaaactccatggctttactaactccagagagctgactaggtttctagtatcgggcatgatttccctcttactgggatgaccgttaggtccagtgagaaagctattgtttaccaacagggtttgtgtgcacccttagggaggcctgcttcgaaagcttgcatgatgccttctggcaccgtaacagggagacagctttcagttcagatcctgctctgtgctctcgtccctatttctgaagtgcatggtcacacattagtttgcatgatacggtgttgatactctttctgtgtggttatgagcctcacattcatttctcccagccatgtctgaagggtggacatagcttgcctccctccaagttctgacacaatgtatttccctcagctgtaccgttaacagacttcacaggttaagggcccagttcatcagacaccctttccctcagatcctgagtcacccacacttttactatgaattagtagttcccacttcctcctcaggctcaatgaattactagaacaagtccaagaactgggaaagtacacgacttgatgctgtagttttatcctagtggatacaaattggtacctaagaagcatacaggacttctgggagactcctagacaggaaacttctgtatcaagatccatcacctgctaggcaaagcaatgcacatcaccaagactcaggtgaacatcctgattcagatatattagagctttcaaaaggaaataaggcatggttgatgatgagtgaactctttggctgcatggaccaacttgatttctaccaccccgcagccccaagcttgggctgactctcaggctctaagttgcagctctccaagaacatagctagctggtctttacaaactgaaaaccaatatgtgattgaccagtgccccccgcttcccccatgcttctgaaactgtgggtcccccatatgttaaaaccgaacaagaataacaaagctagttctacctcctggaaaatcccaagatttggaaccaaggacaaagaccagccaagtcctctataatccaacctcagtaaatcagtccggtcacgtgggtggaaggtaacagtgccgttcagtgaggctgtctgtctccagcaccatccacattcatcctcaggaaagaaatgtatggcttgagctatgcctgccttacctcgtggaagcgcttcaggatgatggagtgaagtagtcagggatgcccatcatactccagccattggtttctggtccaaatcgatgttacagactcacctagtgctatctgtcttcctctcagccctggaatcatctatttctacaagggccttggacccttttccggaagtatggcgcttggaaactaaaactcaggcttggcttggaagccactctgacatggcattgctcgttaagcccgttagtagaatcaactcaaaactcaagccctctccccttcagtgtcagtcacacgaaccacaacttcaaaacaatcccttgttgcatggtctgctctagctctctcctctccgtggattgaatactttcccgaactgttagaaggggtccattcttttcaatacaggtctccctttgctaagctcccctgtagggaactaatttcaccctcattcagttctttgtgtccctgggctggctgctaatgccagctccttggccttaccgttctgacccttggcccatcagcacttacaagaaaaggaaagagataagggtgtgtgaggggtggggaggggcaggtataaaaaaagatacaagaacaaaacaaaattgtgttttttataatacagtttaaatgggatcctgtaagagactgctgtgttaaggtatgctcattaaaagaaaaagagtattaacctggagccaagcaacatcccaaagagttaactaacgtaattttcacaaaaatcacttcgctcagaagctattgcgtcctcatttattaggaaaagcctagatctgaagcttttaggaaaagcttttggaaaagctggacctggatctgaaggcatgtatgcacaaattatcaaagaagtaatttaaaaatgaagaaaagaaatggagagaaccaacttcaattctgtcttcaataaccactcttagtccccaggccacctctccagccctggcaggtttttacaaagtccatgacccttgacccagtaattctactcctttggattaattgcaagcaaacaccagtttattatttatataagaaacacttttcattaattttcaaatgttcacgacagtaaaaacaaaaacaaaaacaaaaaacaaaaaaaacataaatgccttaggtttctagaatcagagggctaaataaacatattatggtttgttgatacagaagactattattcatctccaaaaaggagcaacaaagctggggtgtaggtcagtggcagagcacttgtctactatatacaaagccctaggttcaattcccagtgtaacaaagcaagcaagcaagcaactttgccagggtgtcatgatacctacttgtaatcctagcccttgggaggctgaggcaggaggactgtaaggccaagaacatcctgagctatataatacctagtatttcatgcatatgaaattgtagaataggaaaattcattaaaacaacgagaggggaaaaggagttagtcacaagggttgacccggacaaagaatcatctaaagatgtggaaaacatctgttttaatcagtaagtaggtctcaagagggtatttatgtgtcagtactgaattgctaaaatttatacatttttaacatgttacacacacatacacacacacaacagtgtgtgtgtgtgtgtgtgtgtgtgtgtgtgtgtgtgtgtgtgtgtgtacatacatagatcaccttaaaggaaagctgaagaatggcagcatctcttcgctgaagcaggctgggaatgcaaagagggctcttgtgctcctgaacttatttttgcataacttaactgagattttcagttctacctcagtcagggttcctaactactacaaaatgaagtgctcagctaataggtttcagtttggtaagaggtaggctctacacttcagcaccagaggtgggaactgcaagtaggactcagtggagacatgagagattctgggtaaaatatcagggtgaccaggtgggtagagatgagcaggaggtcaggagcagaagtgggtagagacagtggcagacctgcctgcttcataaggtaggccttacattctcgtccaggcttctctctctggagccactgtagatcacttccttcaccttcagccttcgttctgatttcagagatgatattagattgctggtctgtactctggtccccacatcccccaccccacaccatgcatctcacagagcggtagtgggcttctctgagagccattgtctttctttgtaggaaagagagttgtatggaagttcaagagaattgaaaggaggcatctggaacaagacgttaattggacattattttaaaccagcattacttaaatattagtcttgacattttcctagaagagagaaaaaagcaacatgcttgcttctatttccaattatggaattaattgcattttgcttgctaacttagacaacttcttgggaggcatgtttaaaaaaaataaaaaaacatacagtctaaacaataaagcctccctcctcttcctggccagcctgccgtctcgggtaggctgatgtaggttgggtatccatgcatttcagactcctagttcagaagggtcagtgtcagtgaggttttaaatctgcatccagggaactctgctctgccaggagtggactcagctcactcactctatgtggacccaagggagaaatgtgattaccagcagctaagttgggctagtcagggctttctggtgggcttctgggaagccttgcagttgacattcatattaatcaggctggcctgtgtctgggccaagaagtgggggcactggtctgtgggtgtgggacctgctgaaactgtgggtaaaagaaaaagaaaaccccaagagcagaacacagaggctagtgccttcctgtcagctctcctaagatcatcttttcgtgggtctgtcccttaaggtcagcctcatgcttccatcttctccagctctgccatgccccaagtcagcttggcaaagcaaaacattggtgtccagggctcaccatcccagcttagtcctggcatcagcttacttaccaacaataacgcagtggtaacacctgcttgcttccctgagtcacgtggactctgtgcagtcatgtgtggagaagacctggcagatcttagtcctgtactgcatcctgctggctagactggaaactatccagaaggggcttttcacagggcacatgcccagctggtattaattgtttttgaactgtgctctcagcctctgcatcttgtcctcgcttctgctacctcctcccacttcctctatgtctgtctcattctgccaaattgttcattcaccgggcagagcacactgtgtcccagggcctgtgctcactgtcagagaatcagaaataaataatagccaagacagactgccacacaggattaggggatgttcatggggagcctgtgagagcccagcaggggtgcatccctgacccttagccctcctgtctcctccctaggagatcatcacctccatcctcctgagtgggcgaatagggcccaacatccagctggctgaatgctatgggctgaggctgaagcacatgaagtcagacgagatccactggctgcacccacagatgaccgtgggcgaagtgcaggacaagtatgaatgtctacacgtggaagctgagtggaggtaggaatgtcatcctcccttcaagcatgcccgaggctcggaatcttctagaaaactggagtggctttctagacttagtcctcccacccgtccggatgagaatagttttgaggtctaacctggcttccatagagaatcctcatttcaggacagtatctaggttacagttccagaccagatgctgttggtgctatggtaagagggagcagagggcgggaaggaaggagagcccaggccaagggcgggtctttgaggtaaggaaactagtatctgtgccaaaagcctcatggatggcccttgcatgctgagggtagaggagctttggccctgtgagtcttactgctctcttgggaattcagcttcccagtgtcaaccagagtctgtcttgatacaggtatgaccttcaaatccgctacttgccggaagacttcatggagagcctgaaagaagacaggaccacattgctgtacttttatcaacaggtgaaaagcaccccactgtcttcaggggagatggaaagataaaggccagccttctagaaggcttcccctccccacccccaggctgtttcttatgctcctatctcccatctgtgtggctgtgtacctgtgaagcaggaaaagcaggttggtgctcaggcaccgaggtgtggtttcctgccactgaccatcctggtattcccaaggacttcatttgcatgagtttgctttctcctctttaagtttagagcggtaaagagagttgtcacagggaccaagtgacgtccattcatggcagagtactggcaaattggcccgaggaagaacaagttgtagttcttaccacttcccatggtgtaaatactcctgttgtggcctctttcaagccatcagtgtggcacctgctagctcacagaactttcaaaggtgtgcnnnnnnnnnnnnnnnnnnnnnnnnnnnnnnnnnnnnnnnnnnnnnnnnnnnnnnnnnnnnnnnnnnnnnnnnnnnnnnnnnnnnnnnnnnnnnnnnnnnnnnnnnnnnnnnnnnnnnnnnnnnnnnnnnnnnnnnnnnnnnnnnnnnnnnnnnnnnnnnnnnnnnnnnnnnnnnnnnnnnnnnnnnnnnnnnnnnnnnnnnnnnnnnnnnnnnnnnnnnnnnnnnnnnnnnnnnnnnnnnnnnnnnnnnnnnnnnnnnnnnnnnnnnnnnnnnnnnnnnnnnnnnnnnnnnnnnnnnnnnnnnnnnnnnnnnnnnnnnnnnnnnnnnnnnnnnnnnnnnnnnnnnnnnnnnnnnnnnnnnnnnnnnnnnnnnnnnnnnnnnnnnnnnnnnnnnnnnnnnnnnnnnnnnnnnnnnnnncagtgcctccattttagtctttttcaaagatttatttatttatttagtgtcttcacacacaccagaagaaggcatcagatcccattacagatggttgtgagccaccatgtggttgctggggattggtcccaggacctctggaagagcagtcagagctcctaacccctaagccatctctccagccctgccccatttttttctttttttcttttcttttctttctttctttttttttttttttttttgagaaagggtctctctatgtagccctggttctcctggagctggctgtatagaccaagctggagctcaaagagatccatctgcctcgcaagaactgggatgaaaggcacaagccaccaccttggctcaaaagtatctcattaagctgattacgctggccttaacaaactcatgtagcccaaagataccttgagcctataatcctcctgcttatcatgtggagtagctgagattacaggcctaaccattagaccggcttcagttttattctatcaaaaaaaaaatggccatgggagaaaggcacgaaatgcttctccatggtgggatactgtcttcattacttttctattgccgtaaagaggcatcatgaccaagggaacgtactgaagaaagacattaggtttatggttcagagggtaagtttgactattatggtggcgagtgtggcagtaggccagcaggcatggtgctagggctgtggctgagagcttatatcccttatctgtagggaagaggctgagcaagaggggggggggagagagggagagagggagagggagnnnnnnnnnnnnnnnnnnnngagagggagagggagagggagagggagactgatagataggcagatactgggagtattctagacttttgaaacatcaaagcttgcttccagtgacacacttcctcccactaggccatagctcctaatccttcccaaacagttcctccaaaagggaactaggcatctaaatttacaagcctataggggccattctcattcagcccaccaatactgtacagaagagaccaagccctgtaagcatcactgtgtttacctcccagggcctctgctccaggaagcaaaagtgagggcatgagtctgatccttgacctttctcccatcagctccggaatgactacatgcaacgctacgccagcaaggtcagtgaaggcatggctctgcagctgggctgtctggagctcaggtaggtcactgcgcgccctcttctgggaaagctgggcgctggctttggacttgttggcttgtccctcttctaggaagtgaagtaggcatgtgagagacagaaagaggaggagaggaggctaataacctgaagggctcactgtctagtctttatggtagacaagggagaagagccactcccactctacctggtctcttcccacctatggcttgtcccaaccccccacccacccacccattgcctgtttccacccaccattgcctgttcctgccctcatttctaagctgcctgtctctctgacccccccatcactgctgctgttactcagtgattcagagatgtttctagaactctagcctgggtttaggaaaccactcaaaggtagggatctcagtctgggctgcccatggctgcatcccaagctccaagaggtacgtactcagtttgtacctaggttagcacaccatcaaatcagtttgcagtgtttggagatggcatgtatgccgttaattataattagagacagaatgggtgtgtctcaaacagtcttctactaggagaaggtgaccaaaagtaaagttgaactgttcctggaaggaagtgaaagatttcagctagcagatagtgggtggagttaggttggggaactgggcattccagaccaggaaatgtggggcaaaagccatggctgggaatgagatagtggaagcaatgaccattttgatggcaggctgatgacatcattagaatgacatcgttagagtgagacaggacagtctaagaagccaggccttaccctttgctgttgtatcccattgccatttgagacagaagaggaccctgtggctaaacctatgtgcttagcctggtcttgaccaaggccacaataccttcagtttgatcagccaccccctggtcaaacctcccttccctgttgtgcggccccatcagtgtaaaagcagcttcaacatctgagcacacattgtggttacctgggaggtagaaacactagcgtcccaaccccacccttggtcctgtggtctacaagaccttagaagatgaacttttagctagcctctgaggtggtttagaggcagttagcctggtcagaattgctgaaagactttcaaggagtgttgccaagtgttacttctgtttggcccaaagtgtcattctgggggatttttgactctacccatgacatccatccacattgactgaaaacggaactctgctgactcttccatggaactggggggtggggcttagagagaggttgttggggtccatggtggggattgtacagccggaaggtgaaggttccattttgatttgagtatctgagattgttggcttgttaaggacacctcatttccttacagttagtggcagctggtcccacaaaagcaaggacctaatagtacccagtatagggtctgccatcttgggtgctcatagacagtgtaccagagaacctatgaagtttgttatatgtgtccttgtctgtcttctgtgtctgctgtagtcatgaagcttgaaccagatgttacaggcttcctctcagaaatgagacaatgctaaaaagcagatctattgagcttgatatttgtggagctcatgctagactgtggtgttattctgagactccagtaagccacctggtccagatctgctggcaaatgacttcatattcttacacccttcaaccatcctcaaactgatattggttacagtccaagtaccaagcttggcactcaagggttagacaaccagagaagtatctgaactggcctctatagtcacattgagttagacaatcagagaggtgtctgaactggtctctatagtctcatcaagagggcatagtgtgctagagtctgttccttaatcacctcagggttgtccccaaactcacactgtttcatgatccaacatcctgccattctggtgatatcctgagcctgagaaagaatcaggctctaactctgagggccagggctgtggtattccagtgggtatgtggaaaacacctatgtaaacctactaggcttccaggcccagtgagtttcaagtggacaacgtagaattcacagcttacatggtgatggggtgagtggacttttaaaatgaggttattactaattcttaccaagagtcagacaggtttttgaaaatcagaccataaggcagaatcttctagacctatggttctttacttaaactcatgggcaattggcctccttctaccaacatcaaggattgcataacctgcctacagataaatgacatcaccagaaaaaaaataacatatcctttcctggtttaaagaagcacaatgtgcacataagacaggagactggtgatgtcagacctcaggggactggtgacatcagacctcaggggactggtgacatcagacctcaggggactggtgacatcagacctcaggggactggtgacatcagacctcaggggactggttcctgttgagaagaattgggctgactgggaagaacagagggtctaaagcggggtacctggacaggaatgctgagtcttcatttgctgtgctgttcttgacaagttacatagtccctctgtgccttaatttctttatcttgaaaataaggatgatgttagcagtaaccatcttggagggctgttgggaagagtgagttagttaatatatttagagtcctgcgaacaataacaaagtgtcctagaattagttctttattcattgattctataaggggtctgagatctggactatcctgaagagagggagaaagaccaggaggaggaggtcacaggccctgacaggcagcaaaggggtgaccagaacggaagaaagatgttcaagggagagcaggcagtctccctctgtccctgtgccaagtgggagggtgagggccttttcatatcactcttaattatatctgtggtacaggattttgtgtgctcgaggcaagccctctagcactgaggcagacccccttgggctcagtttactcgtttttgtttgttttgttttgttttgttttgtttttagagaagttttaggttcacagcaaaagttagcagaaggcacagaggtttcccatggatcctgggcccagcaaacacacacacacacacacacacacacacacacacacacacacacacagagtttcccctattgtgaatatccctcaagagcagtgaagttcttatggtgaatgaatatccacagatgcaccaggatcacgcaaagtccacagttcacatcaaggttcacctgagtgtcacacattccacgagtgtggccaaacgtcatgcagaagtttcactactgtgaacatctattgtttgtctcgccctccccggccaccaccaacctttttattattacggttttgcctttcccagggaatcacatagttgggatgatagctaattgatacttatttattatttatcgaagggttctttatagatgccaaacacatcactttgtgtaagcattctactgttgggtccagggtggaagccaagaaaatatacttcagatgtggaagcttaaaaatgaaagctttattttctgagtgctcaggaaggtggccagttcaggatctgaaccgtaaccctgaagggagattgtacaacatttttaaaggatgggaacacaaagcaagggggagctaggagcgatgcagtgttagtttgtgtcttgcaattgtattttgacattatgggttaagcaagggagtacccatggagactgggccatatccagggtacctggcttcaaggtccttaattcattctcctagacattgggtctggagctcagagagatgtgtggagaaaggagtaggtcagcctcgtgcagttaattagggcataacaggcaattgattatatgtttttacaacataggcaccttgatttagataacagcaatttctgtattctttaccagttaacagagcattaagaaaacatttggagaagtgggataggtgttcattcctaggcctgggaacgtgaacttgtttgaccctgtcagcagatgaagaagttgtccttgagaaacaggtcaactatagggaagtccccaagtcctctagggcctgggatcttgaactcagtttttaaaaatgaaatggtagtacttagagtaagtttctttttcttgttccctattgcacagtaaactatgaagtgcatgggccatatgctagagttagtcagaaggaccaagtaacttatcttctttgaccagatggaaccaggaatatttcccttagccagtgagacaacagaactttctgggccaaagaatcatagtgaatgtgttacccagggcttgttcagaagtgactgacaaggctaggattagagaaagaatactcaccttgctttgcttcagaaaatcaggaaggaatttgaccttgtggttaacctgtaaatgttggcaacaagttaacattttattactgccaagaggattttgcatgtctttattttccttagttctggggattgggtgtggatctgttaggagtctgcacccgcccatagactgctgccatctagtgtttgcttctcagaattgcaggctcggcctggagagaacctatgggtactagaggcagtccaaacaactggcacctcttatggttcccctcttcagcctgagaaaaaaagtctattttaaagtttcgtttttgattgacacatctgcttctgttgcttttgaaatatgaaattgttgttagcttccgtcatcacgctgtgcggcagagcatggagcttaggtctcttctcacatttaacattataaaagtggttgggtgtgggaaggtaaaggctcccatatttgggcaacttctttaaggtgtgtaagtcggtgctacctgcctagctttatctgcagagggaactttaaagcaggtctggggaagcacgtctttaaggaaatgattgttcggcccgagagtctctccatcattgaaggccttttctgcccctcactcacctcacgcacatgctagactgtgtggttggttctgtctaccctggtaaacaaaaacgtcaatgaattgatgtcttagatgtttttgaatactttgaaatctcaaagctcacccccaaaggctcacttcatccaacaaagccctgcctcctcttcccaacagcccgccaactggaatagtcaaacatatgagcctatggggggccattccaccacattctactccctggtcccccacaaacttgtgggatcgtaatgcaaaatgcatctagtctaactgcaaaagccctggtagtctttcagtttcaacactgtttaaaagtctaaagtcttctgctgagactcaaggcaatctcttaaactgtaaccatgtatgaaattaaaaaaaaaaaaaggcaggctgcatacttccaacatacaagaggacagaatatacattacaattcaaaatgggagaagagaagacacagtgagaaaagactgggccagcgcaagactgaaaactcacagggcaatctctgggtcttcttgctccatgtctaaagtcagaggactgagatggcgccaccccaggggttctcaacctccctgatgctgcaaccctttaatacagttccttatgttgtggggacccccaaccataacattattttgttgctacttcataactgtaattttgctacagccatgaatatctggtatgcaggggatctgatctacaacccccaagggggtcgcgacccacaggttgagaaccactgctctattctttttctgctgactgcaccatgcttctccctctcgggatgcttccactccctgtatgtagctcttcttggcagggtcttatggttccagcacctcctttgcgttgggatcgccagagcaatccaggcttagcttcactcagtagcttcatgtagggactcccttgccacacacctgccctcaggggctctcctcaaccatagaggaagactccatggtccctttactcatgtatccattctgacttgaaatctaggatcatgtggatgacactgctatgtttgactgcccatgtggatagagcctggcctgttgaatcacatttgcaaaaaaaaaaaaatttcctctgttattgatttattaccaaccatgggacagaatcaatattaggctgtcttggactctcctccaccaagaaaactattccaacactttttaatttagcatcaggcagattctaaggacaagagaagtcagcagcctcatattttgttgttgttgttgttaaaatatcacaagaatgatatagagccgtgtgtccaatagtgatctcctctgaaacctcttgaatggctcttccatggttcacattgctctgagcactattttcttccaagcctgtgctaggatggcccattaagccttacttaaaggagtcaactgctttcctagctaaaagttccaaagtcttccacattcctcccccaaaaaccagcacggtcaggtgcatcataacagtactgactccactctgggtaccaactttttttttttcctattgctgtgataaaatgccatgatcaagacaatctataaaagaaatcatttaatttgggtcacaatttcaaagggtttatagttaagttaatggtggcagaaggaaggagcagctgacagctcacattctgatccactgggaatgttgagagtcttctgaaacctcaaagccatcccccaacaaagccacacctcccaatccttcccaaacaggtccaccaactggggaccattctcattcaaaccaccacacttggtaactcacaaaggactaaattcccctttttttagttctgttccaatatttgtgctgttaaaacaaggccatttgtgtaagggaagccagtgtgtgcagttacccaggacatgtgtcatagctcactcagtcctggagggaatatggacaaccacactgactagaacagtcctgggaaggcttgctctgaggttttctagaaatgtcataagaagcagatagcactggcttgggggaacttctaaagctgccatgactgatcttggagaacttaaccacagggtgctttgggtgggtgatgaagcaccctagacaggccccttagagctcctagttgaacctgctcccggagctatcattcatcctgtgatttcacgtctgcagacctgccctacagaggctcattcctctttcctggcatcgctatttccaaaacccagcagagagaaggggcagaaggaaagagccatggctctgcgttttccaagttctctcctacttagggacgtttagggatgggtaactccttgtcaagatggggctttcctgggtacacactgtagtgtacatctctagatgctgctgtcagcatgtggagcaaccaaaagcacctccagatgtagataagggtttcaggctacagggggatagtgccaagttgcccccatttgaggacacttagacccatgcaaggcacacttgaaatgtgtttaggaaataaaacacacagcgtgactgtagattttcttttagttcagtttagttttgagacagggaccttgtaacccatgttcactctatagttcaggctagccttagactttgacattcctgccgcaggctgagagtccaggtaaaaccatattcttggtttcatctcctggcttccgttcatttgatatggtttaagactttctacccttttctcttggcttggaagtagatagaatagaggtatattccaatatcgttaactagaatttaataatatccctcaagtagtcatgaactgtccctaccacactatcctcagtcgaatgtgtccctttttgattgaataagaaaaaaaaaactttaattttttttttttttttttttttttgccttactccattctatccagtggtgtttgaaacacattcaatatggaggctcctgtcatgttgtgttctcattctcattcttactttgtgtcacttcttttcctgtgtcaaacagtggaaacaaatgcagacgatggtctggtgtgtgtgtgtgtgtgtgtgtgtgtgtgtgtgtgtgtgtgtgtgaggggggggggataagggagagggagagagaggggggaacacgtgtcacagtgtgtgaggaggtcaaagttcctcaggtttggtggcaagcaccattgtaatctgagcctaaggactgtttgtttttgctgatgcctacagagctgctgttttctctctcagctacacatctgagaaatccaaggactagagccctaaagcacggggaatctccggggaactcagctcactggcttcccctttcctcgtggtttcataaatatctggtttcattgctcttcgagtcttgttaccccacccatcctcgctgctccctacatctggtagagacagatgctcataggccagcacatggatgttgggtgccgcactcgtaggcttcagccttcagctctcggccctcttctccatcccatctctccctctctctccccaggagattcttcaaggacatgccccacaatgcactggacaaaaagtccaactttgaactcctggagtaagttttgtgtcagacatgcatttcccccacccctcccccagtgtcccgctgtctggttcacctgcccatctccccaggggccctagggctcagttccctggtctccaggccctctcacctccttttggttggtcagaagttcagcgtgtatcaaatgtggcttctgttttccttctttcagaaaagaagtcggtctggacctgtttttcccaaagcagatgcaggaaaacttaaaggtgagggaagcagagatcaaggagcccagggagccctgttcgatgtgggtttgggacaagagctagagagtccagagaagaggatctatagcctgaggctacctcacagaagacagcagatgcacgtgataggccctccaggcctgggaatcaggatgaggtgcacctggctcacaactgccttcgaggcctgattcctttcatgacctgggtggtgggattccatgccacccaccttccttcaaaagggttagcgtgtgcttctgtggaggtggtcctgagctttagggactatcttcagctcagtatctgtcgtggcggagaccctgggagccaagttgtagcggtaggcagcctttctataagatctaaacaggaagctgagttgaccctgtactccccatcctctgctcagcccaagcagttccggaagatgatccagcagaccttccagcagtatgcatcactccgggaggaagagtgtgtcatgaaattcttcaataccctagcgggctttgccaacattgaccaggagacctaccgctgcgaactcattgtaatggcctgttcctcttaccctcaccctgcatgaactccaggcctctgggatggaaccccgggggggccaatgcatggtgtgggggaggggaaagaggaagttgatcagggagagaaaagagatgggaagaggtgagctgtatggtggagtttagaatggaagaagggctagagagatggtggcgtttgtttacgttaatgagattttttttaggagctgggcagtgtggtaaatggtgccctttctccttttattccagcaaggatggaacattactgtggacctggtcatcggccctaaaggcatccgtcagctgacaagtcaagatacaaaggtagagagagcccaagagtgagcctcagtccagctccggctcaggtctctttcctcctccctgcctcttcttctatcctcccatcatctcttctctgccccattgcccagggcagagactttatagggtctgacctgggtgtagatttgttgagaggatccggggatagcagcgagggtcaggtggttccttatttgccgtgatgctggtgcacaaagtggagtggggagcgagaggatgccgtagatattcttgtggtgcataaggaagagtccccccttcgatggtaaaacaagctagtgacttcctgggaacctgggtccagctctggctctaccccccaacctgacatacaatcttggcaagagcacctttctcccctttttcttctgcaacctgagcatctttggtttctgagacagacttgccagcgatattctctccatcctcaagagagattccgcacccctcatcttcaccctcatcttgaccagtttccttggtcagatcctgaggataattggtcttcagtcttccctgcttccttcacagcccacctgcctggccgagtttaagcagatcaaatccatcaggtgcctcccattggaagagacccaggcagtcctgcagctgggcatcgagggtgccccccaggtgagcatttctggggtacctgggagctctgtggatgagatttattcaagccaagctgtccaagtctgggagggactaggggttctctgttaacagatcttgttaagcaacatgtatccaggactggcaagagagaggaggctaacaccaaactcaataatcagagttcagtccccactgtcaccctgacacccagcccatgtactggaaggaaagaaatgacctggagagaattttcctctggtctccacatttatacagtggcgactttgtggcctctctcctgcagccaacaataaataaatgtcttagtcagggtttatattcctgcacaaacatcatgaccaagaagcaagttggggaggaaagggtttatttggcttacacttccatactgctgttcatcaccaaaggaagtcaggactggaactcaggcaggtcaggaagcaggagctgatgcagaggccatggagggatgttccttactagcttgcctcctctggcttgctcagcctgctctcttatagaatccaagactgccagcccagagatggtcccacccacaaggggcccttcccccttgatcactaattgagaaaatgccttacagttgtatctcatggaggcatttcctcaactgaagctcctttctctgtggtaactccagctgtgtcaagttgacacaaaactagccagtacaataagtataaaccaaaataaaactccacccattatccaaacaaggtatccatatccacactatgctaatggtaagatttaaggaaatttggaggaaaattatttctttaatatcaagaaagaagtagaaaacgttttaggataggtagaggtgactgaaaataaggtacatgtatagcagaagtctaacacttagtgaataagcaatagtttagaaatcaagatctaagggacacggggctcttttgtaattagaagtaggggagagacctcagaccaccaaacatttgtttctcttctcttagcagcatgcacttagcccccaattctgtccacctcccaattctcagttttggcctgtacacaatgagcgcccaccaaatacaaagcatcttgctatttgctcaaagatcagagagccagacctggccttgcaacaaagatcactaggtagccagcaggagggacggacagtgcgccctctggtggctgtctctaacgacacatgagtgggtggagtcccacagaggtgggccgggtcctgcagccctttcttcctccctggggaaggtactctagcccagctctgctttctcaccattggctggccccttctttacagtccttgtctatcaaaacgtcgtccctggcagaggctgagaacatggctgatctcatagatggctactgcaggctgcaaggagaacataagggctctctcatcatgcatgccaagaaaggtgggtttctcgtgggatgtagactagcccagaggtggaaggcagagggaagatcaggcattggcccttacatggaagcaaagattttaagagtgcgaggaggtgctaagtctattctagatggtcagctactggaagtaacttctcaaggggctgtgtttgcagcctctggcatagcagagcctttgataacatataactgttctgttctctgtgatcctgattagggaccagtcaggaaatgggtaagactggagcacgtgatgttggcaggaggaagttttcaaagagggttctagttccagcttccaccatggtgctgacagggggccttagatgcagtgttccacctgccatccattcacccatatgtccctgtccccaaccctaccttcctctactttcccttagatggtgagaagaggaacagcctgcctcagatccccacactgtgagtacaagagagatacctctatggcacagggctggaagactatgcagggaacaccaccacctcccttgtttctgagagaatgcttgagtctcttcatttcattagggtgtgtgtttcctcccagttcacacccatgggacattccctgtcccacctggtgctatcttgagaagaaggcttctgtctttccttcagctcttgccccttggagtcctgggctactacactcccagctcactgatagccaggttggctgtttttaaagatcccgcccatcatggatgtgtggatggaggcagagtggggctgcttgaggggggatgtttcagggctctggggtcagctagctcctgccctcttaccttgtcctacagaaacctggaggctcggcggtcgcacctctcagaaagctgcagcataggtaagcatgctcactgaaccctcagcctctactcctccttcatgcttggcgcatgctcactgaaccctcagcctctgctcctccttcatgcttgcccgaggcctgtgtttcctctgccgatgttactgagccttctaagtcacagtggtaactactttctctatcgcttctcaatgatggctcaaaaaaaataccatttgttgtaataacaagtgtgaataatttgtaccacggtactgttttgatcttggtcagctgtatcggcacacacaatacaatagactgaatgactcaaaaccagccatttctttctccgagttctggaggctggcaagccccatctctgcagattctggctggagaaggctttaggttggtctccttgctgtggggccacatggtagatacagcaagctctagtgtcttcttttaagagctgattttaataagagtcctctctcctcatgatgtcatctgactcttatcgcgtcctggaggacaccagacgtcacactgtagggtaggactgggacgtgtggatttgggagagatgaagacatcaagttaatggtagagtaaaataagtgatgtgtcatttgaaactaacaacactgagagaataagctcgggtcaagctaagtgtccctgactgtgtggcttccttgaatcctggtgtaggagcctggagtctcctgcatgagcccaccccccacctcgatgccctggcttcctaggcaggagccatgctttaattcctggctgtgcccagtgaagacacatagcccatgggctgggcccctttctgtcattacagagtcagacatctatgcggagattcccgatgagaccctgcgaagaccaggaggtgggtacttgaagaggttggtcatccctccaccacggtgaccagagtcagggccctgggaagtgacaccatgagtattcatgggacaccacaggagaaccttctgttcttccttcatcctcattttcatgtgctcagagaaaaacggaggaacccttggtttgggacctgagattctgttacagattggccttgtgtgggtctgtgtagcttcagtgaggaccttaagaatgtggagctaggaccaagggatcagggaccagggaatggggaacagaacaatagatctttctaaagctgagacgatggaaccatctagatgccatgtccagctatgtccttggatctttgctgttgaaccctcaggtccccctggggaggccagctgcactctggaccctgtgacccccaccccgtcttctctttctatgcaggtccacagtacggtgttgcccgtgaagaagtagttcttaaccgcattctgggtgaaggcttctttggggaggtctatgaaggtgtctacacgaaccacgtgagtctcagactcttatctgacgtccctctcttctgcctgagaagtgagagaggagtgggtttggaggtagcagctggctgacacacagtgggtcctcattcacatggcatgggactatttctggagcacccaagaagtgagggggacgagagtcaatcctgagattggggagcagtgtactggggggtgggggaaaaacactgcggtctcaagcttgtgggagaatgtagaggagggaggatggtaagatgaggttagaccagggctgaagcaggaatcaatgttcaggtcgctgaagctgaggtgagccttgcctatgtggttaggctgccagcaggctggagaaggcagaccccatggagagcagaatggttgaaagccaacagtaacgacagagaaggaggccctgtgtgtgttctgccacatacctgcttgcctttgggcagatcacgtgaacgctgtgtcctcatctggacacagggggggcggagtggggggcagagtggggggaaggtgccagtcagaagccacactgtttgcctaggctggtagtcaagtctgagatggttgtgctgaggctgaagggaagacaccttcttctgaaaagcattgtggtccctgaacacacacttctattgcagaaaggggaaaaaattaatgtggccgtcaagacctgtaagaaagactgtacccaggacaacaaggagaagttcatgagtgaggcaggtaggcatcccctggggagaggcccctgagatgctccagccccccggaacgggagctgggaggccgggaaggaagtcagagcagcaacgggaccccacccccccactcttgattgcaaaaggtctcttgtcccatgttccacagctggggcaggaaactgtgtttctctttatgtgtctaggaggggaggctgtgttggtggtggaacacttgcctggcatgcataaggtcctgtttgctcctcacctcagcactggggaaagaaaagccaagtgttttctgtatgacctttaacctgcttcatctccctcgccctccttcagtgatcatgaagaatcttgaccaccctcacatcgtgaagctgattggcatcattgaagaggaacccacctggattatcatggaactgtatccttatggggaggtaagctcaggggccttgataagggacttcatgtgacaaccgggctgcggtggagcaaggcatgggaggcatttacagcaaagggtttttcctattaagtgtctttcctttaactattaggtggaggaattgccgaaacatattaccatctttgaatttgcccctcaagggaattgaagggtcagtggctttcagtagcctggtgccttggtgccatgctgggacagaaagtcattctggtgtcctatcttttcctgcagctgggacactacctggaacgaaataaaaactccctgaaggtacccactctggtcctgtacaccctacagatatgcaaagccatggcctatctggagagcatcaactgtgtgcacaggtaggaggggtgtgagactttaacctggttcccgagagggagacagtgtatagaatttaagagtgatatggtcctaagccaggcccccagcctggtctgtgcctggcaactgagagtgctgggtactccagactcagatagtctccatgaaacgtttcctcaccgggaaacttgaaaggtccaaggatactgagaggaagtccaaagtctgaggtctcactgtagctctgtgccttctgctgcatcctggcaagtgctggggggaggggctgccctctggctcagagctccagctcctccactttgctctctgcatgacacacagtctaggaagaaggaagtgggctagagaagtgtctggagcttcctagggtcttttggtctccaccctagttctctggtgttcctgaaccaccttctactttaactatagctacacgggtggctcttccctgctctccactggctttgttctcattcccttgagatcatgagccccgaggagactacactgggatgctcaccccaccacagacatggcctgtgtggctttgagcctgattctgtgcagagccatggaggaattacaaacaactactccccgcatcccccacttcatccatcaacttccttggaacaccttctcaatccagcctgtgtcctagaacaaagtcagaccaacagaaacaagaatcctttccctttagaatcacattctagtgtgagggtcaaatgggggttgcacatggcctggggctagggagatgtgctcacaggtttcctttatgtatctgaagctgtgtgttttaagaatcatccttttagtagcagaaactgcaggaagtggcatggcctgtgagaagcaggagggccctttggggttggtgtgccactatgaatgcagccggtccaggtcagcggatactcctcaaggagagctagatacctatgtgttttagaacttatactaccctggtggcactctcttcctgtcagaaacctcttggtatgttccttcaggccgatgtctggctctctcagcgtgtaccagggtcctgaggcagtgcctcatattagccctcgattcctctttcagggatattgctgtccggaacatcctggtggcctctcctgagtgtgtgaagctgggggactttgggctctcccggtacattgaggacgaagactattacaaaggtgagggcttcccagtggccagtatggtttatagagctcaaaattccagagcaaggaagttgggttcaggcagcctcggccagtggtctctgaagagtaggaatacaattctagatcttatatccctaaataatcccttaaacctctttgtcaaagcctctgtgacacgtctacccatcaaatggatgtcccccgagtccatcaacttccgccgcttcacaaccgccagtgatgtctggatgtttggtgagtggtgattagaatcgggtgggcctgggaaagtgctgattctcatgtctgtggcctgagcaggagggcagaagagagaacaagggtcttacgtgtgcccctcaggtcccagtgtcactgagaagtcccaaaggttcagagagtcagagcagccatgacatgggcaagggcccggttgggataaactgggctcactccctcgtaaagactcttgtcaaaagcttggactacatcagccatccccagggactgtgtgggaaaggcttcatggagaccttaaagaaagctggccagcttcttttgatgaggaggctcaagaagagagagaagccagctgatgtgatggacatttccgcctgcagctatgtctgggaaacaacatcactgctccccctgagcattctccacttgaggaaatgaaggctcagaggagccaggaccttggccaaggacacaggcaacaagtgtcagtactagtattagaactccttaacccttgaagaagaggttttgtgtcctacctgcccatgaggaagttctgatcatacagataatagcctcctctggatccccagcatcttagtagctctacagggagggttctaaggagcagattgtagttcatgtactataggtataggctgtagttgtcttggcctggaccattgtgatgggcaggacctcaagggagattgtgcctcctccatttgggacccaccagtggccacagttatcgctagggagagcaagctggtccctcccctgagtcttccctctctgctctcagctgtatgcatgtgggagatcctcagctttgggaagcagcctttcttctggctcgaaaataaggatgtcatcggagtgctggagaaaggggacaggctgcccaagcccgaactctgtccgcctgtcctttacacactcatgactcgctgctgggactacgaccccagtgaccggccccgcttcacggagcttgtgtgcagcctcaggtgagcataaggtggggaactctaagtagaggatgacgctgcagatgctgtgggggtctccagccctgtgcagtgggtatctttgttcccctttgtcaggagagttcgggttaaagttggtgacttgatgcctaatagtgacaggtaaaatggcacttataccagaacttccttctgatcagcaagaggaaggtgccctctcttccagtagaagcacactgggtggcagtgttggaagacagaaagttgagaccaggttcactgttccatgcaagctcagaggtgagggcaggcagcctggggaagccttgtttgatctgatgcctcatggaacaactacttatgcctgggaccttctctactttcctgctccacttgacagtccttctcagttatggaagaatgggggagactgtgccccacaggttacctgtctgttcagtctgtttggggaccagtagcctacggcttagatccttcgcaatgcccagctgctggttctccagtgtcaggaggccactggcaggactgttgtctatcttaaggattcagggtccccatctgcctgcctaccactcatgagtcatcaacttcttttggtttcctttagggtagggatccgcaaacttctgttaagggcccaggtagtaaatacttggagctttgcggtctatgtaaatctctcttgcaaacacttggctctaccattgtagccagaggtgctgataaaggaaaaggctggctgtgtttgataaagttccatctgcgtatgccaaaacctagcattattttgatgtcataaatatttttaaaaaatcaatcgtgaaaaaacatgatgaccattcttaatgtgaaactattaaaaaaaaaaaaaggttgggagggtgggcttagcctgtggctgccatttgctgacctctgtcttagggaaatttagataatgtattaatgtagagagcttagataacgtagcaaactctgtgtgtgtgtgtgtgtgtgtgtgtgtgtgtgtgtgtgtgtgtgtgtgtgtgtgtgtataaatacactgtggaacaagcccagggcttagggaacgttaggcaagtgtattaccactgagctacactcctgactctattattcgagggcaagaaaataggctctagggaagacatggcatcacatgcttataatctcagcatgtgaaaggtacagacaacaggatcatgagttcaagaccatcctcaacacaaatttttttaaaaggttaatggggggcccaagggagaagctaagaaagcccaggtaaagatgaccctgcatttgttttttggcttagagtctcgaacacattcagaaaaactgtagttttacaatgcctatctgctcctgacttccctccgtgactcttctgaccaattccgcaccatctgttggtccttcatctggaagccagaaagttctaggataaaatgtaattgaaagatacaaccagagaggataaaagctctggggtgaaaatggaagggtcttgagaaccccagggagccttggtagttgactatctctgggctgacacccactcctatcccctaaagagactctgacgcctccttcaggcacagcctggcagtccttctaccatgcttaagaaaggatccaactaaccctccccatccttgtgtcgtcaaactttgagaacttaaacaaaatactagcgaactttcagaatccttttgattgacaaaacatagtaggctatggacacagtgtgtgtgtgtgtgtgtgtgtgtgtgtgtgtgtgtgtgtatacacaaacatatatgtacatgaatatgtatatgtgtgtgtgtatatatatatatatatatatatatatatatttgaagggacagtaccatttgatagtgcataatgtttagtattcctttgaacaaacggacttaaagactctgcagtaattacaagggcctctggactgagaagtactgcacagagagagaaagtcaagacctcattatgagagtagacagtagccccagagaaagctatggagtgagaaggggagtatctaatgtcatggtgaatctgggccccagacatgaacttggatgggacactggagacataaacagggctttgttgccaatagctggtacagaaagcctgggggtgatgggggcagagctgccagccagctcctgccacccatgggactggctttctaagggcttctaccaattgaatccattcgtgtggccctctcaaaccttgatgtccttactttcaagatctatatcctaatctgtctcagaggcacctcccaagtcactctgtagggaaaatggaggcagaaatgggatcggtgggggccctcattcaggccgcccctgacttcagtctgttcccctttgacctggtttctctctctacctgacctgactcctcaaagtgacatttatcagatggagaaggacattgccatagagcaagaaaggaatgctcgctaccgaccccctaaaatattggagcctactacctttcaggaacccccacccaaggtaagctcggtcccctggccacagcaaagccaggtttctttgtggcccactgccttctcagaccacaaagagctgctttcttacaatcctctctctgtcctgaacccaacccctaaccacccatgggggtgtcccatcaggagaaatctgtggccagcacatagcctgtggggggcagggggaattggagcaagaactgtccttcagcgttacccatgaaaaccaatgtgcttcttgggatggcacatcgggcatccattatgataagaaaggagaatgtcccaagcccctgagattcaggctctatgtccatgactgcaatgacagccttggtctcaggatctaggaccctgtggctccaccagaaggtggttacatttctaagaaccagggctgtattaactagagctgacaaaacaaaataccacaggcagaatgacttaaacaacaatttcagaaaatgggaagtccacagtccagaaaacatcaaatttggtctctggtgatggtctgtggtcactacttttctcatcattataataaaacaccagatgaaagtaacttaaagagggaagagtttatttggactgtacatttaagagtatagtccatcagagcaggaaggcatgaggtcacaaacatctgccgtcaggaagcagagaggtggatgcctcttctaagtaaggtagctttgccttattatatggtccaggatcccagccctaggaatgatgaccccacatctggagtgaatcttctctcagttaatttaatatagaaaacccctcaaagacatgctcagagtcttgtctctttggtgattctagaactgtcaattatcaatcaatattaactgtcatggggccccttcctagtttttagatggcctctccttgctatatccttgtgtgtgttagggaaaatgagaaggaccctctcagtctcctgtgctattctcatcagggcattgatctcatcatgggatgacatcacccaactccattcctctctcagagaccacacctcataataccatcactttggttgtagcatgccagtatatgaacaggtgttggaactaggcacaaaagatgaatccatagcaatgtctagtctggtccaaggtcttcgcttctagtctctcttgcatgttctcctcccatcccctcccatcactagccatgtaactagtgctcaatgagtggctgcagaatgaatccaatgataattctgttcttatctctccactgtaaataaacagaactgcctctgactttggtgtatcccctttgcagaagtggagagtcagactgagatagccctgtgttctctttctagcccagccggcccaagtacagacctcctccacagaccaacctgctggctcctaagctgcagttccaggtaaatgtgtagccagatgatggggaaagttgactccatccctcctcaaggtcttttctgaaatgtcatgcctacacctttgaggtgcagcagcaaacatctgcttaggggatgcccggattggctctttcttggtagacaagaaagaatttcaagttatatcaaaagaacagaaattcagttcttccagaagttctgcctgcagcccagtccacccgtctgcagtgtctgctgcttcctgcgcctgcctgcagctgtctttctgtgtccctggcttctctgacctcccacactgagcagagccttctgagaaggaattccagagctctagggatggatgagggtcctatggacttgagcgccacccaaggctctgtgcagaggctctggttaggacctaggtggtcagtgaagagggagcaggggcccatctgagctgtctgcatccatcattgccagccttgaacctctccaaggctgtagcctgtgactcacaattccctgtgccactctcttgcatctgagtgggagctagcccagcctcctgcctttccttcccctccattcccttgaacggagttgtggcttgaaaatagaatatttcaaaagacaagaaccaatgttagctttgctggtcctccagacaggaagagaaagcctcccaaccacactttccttgtcagggagatggccctgtgtcaaaaatcaagcccagccaagaatggacgacaaattctctccacataaagaaaatgtcctgcaggaggtgacaataatgcctttaaaaagagatatgtaggctgccacaatagtttagtgggtaaaggcacttattgcctgagttcgatccctggaccccacatggtggaaggagaagaccaatgtccagaatttgttctctgacctccacaatcactatatggcatgcacccattcacacacacacacacatgcacactaacaaaggttttttaaaaaacatgtaaaataacattgttagactggagagattaaaacacctgctgtaaaagtatgccagctgaagtttggagccctgggacccacataaatgccaggtgagcatggtggctgtctggaaccacagccttagaaggtggagacaaggaaccccccagagagaactggtgaatgttgacacaagctctcggtttgacattgagaccatgctttggtgaataaggtaggatagtgataaaggatgactcctgacatcaatccagatcccatgtgtactcacacacacatgcacacaacatacacacatacacacacacacacacacacacacacacacacacacacacacactaatgtacagcaaacacacacaaaaatggaataagttttaatcaaggtgattacaccccagacacacatatacatatatatatacatacctacacatgtacacatatacttacacacacagacacacacacacatatgagagagagagatctattttttctgttgtggattcaaccgaccaataatgataaatatgaaaaaaagaaaagaacaaagccgatatccgccatgaaataggtacagattgttcttgtcattatcccctaaacaatatattacaccacttatatcaccttcacatactattcaatgtaaatgatctagagatgctttatatcacatgatagctatagatatacaaatataacaccattttatgtaaggaattccatatctatggtgcattctgtaaccacacacccctgggccactgagggataactctgtgtatatgtctgcattcattatctgcaagcttattgtaacccatgtcacaactatgacacataacccttttcccaagggtcctgaggtcccctagtctcgggagatgagctgtctgtgagcatctacccatgtgaagagcattgtgtaggaggtgtgtctggcagaggagaggccacgctgttctgccacacctcttcggcagggaaatgatacaacccatgttttatgtgccacagtagagcaagtctgcacccccatggtgtgctctcgccctttttgtgtgctcctgtttgtagcagctaattgtcatcctctcgccgtgtccctgtgccttgtgcttctttgcttctcatgaataggtccctgagggtctgtgtgccagctctcctacgcttaccagccctatggagtatccatctccagttaactcgctgcacaccccacctctccaccggcacaatgtcttcaagcgccacagcatgcgggtaagaggactctgcatgctgggtgtcagcctcaccgcggaggctgctggagggaggtggcctgggaagtgctccgtggttccgtgtgccagtcagactcctgagaacctctgtggccctcttccctttgcaaacatatcagctggaccgacccggtttttttgtccagactggtgctgtggccaaggatggcagattctcttcctttcctgggtctcaggagtcaggtacaataggcagtgtagaggcttgtggacagagggcctggggttgctatggaataagggatgctggaggtgcctccctgtgctgcctttctgactggtggctttggttgctaaatctatccctggaggaaagacttcctcatggtggctttccctgctgcttttgtgatttgggattctgggtatgaagaatagagactggtaagaaaacaggctcatgaaccagctcactgcagcctctttgtctccagtgaagccctggaggcttcctgggccagaatgtcaggtcttctgcgctgagcacttggcttgtgagcaggtgtccacccccaacatcaagttgctgtaagcacttgatatattttactaagttatgaaacagactgaaatactcaccgtttcctctcttgctctatatgtatatacgtttcagcctcaagatccataactctaaagctttttgtggggaaaaaaaaatacatgttcgttagaacacatttgagaaatgtaggcaattatttgaatatgcttctgtgctattattcttaatttagcaaaaatttgaaatgagcataatttagaattccaggcagctgaggtctgttatgaagtcaaatttcttcaaactcactctgtttttctctcttacattaatttcaccaatttcggtcttcatgtatgattaaccataattaacccacagttttaaacatgtgctctaatttaggcaatgctcaccaccacccctgccctggactctttattcatagttattaagttttggagagcttttttaaaaaattgcattcgttctttcagaaagaggctgcttagtgcctgtggggggcagcactgccattgtctgggctgtgtttcactgccaggacttttttcagttccataaagacaggctgtgcaggtcttttgtggcaggcgtttagaagtgattgtcataaaggaactctgaaagaacatgaagagttcttctttaaatacataaaaaagaaaaagtataaactccattttatggtgtacgtgagacagtcgcttgccagtgccatgctcacgagataacagctttcccacgaagcatctgaaagcatttaacaaaaattcggagatggcaaaatcatttcctgtatagtgtggctcctctgggagtccggtggaacgtcgcacaaggatgatgatagtcatccccccaccccatatcccaattccataacgaggtgcagcagggtgctgtcctaggtgctgaaggaggaaccaggaggctttgccttcagggcacaggtgcacactcacctgtatcacctagggaaacgttggaaagggacaaaactggaatgtgggagatgtacaaagaagaggctgctataggagccaagactaagtggcagaaagctatagggtaaggggtggggccactgctttgctatgaggcaagggggcgggactatggttttgctagaacaaggaaggttttatgcggaggtgtaaatgaggcaggaaggatgagcggcagcagttactgaaaacaactcaggagcaccattctgtaacgcaaatccccgattccttccaagaagtgtgggtgtcggttgcctagggagaataccagaatgtaaagaagttcaaggtttaaacgttattattgaaattactggagctgggacaatggctccaaggatgaggcacttgctgtgcaagcatgaagaccagagtttggatcctcccactcacctaaacgctgggtcagcatgctggttcacctgtaattccagttcctaggaaccgagaattctgggagcgaggtggccaggttgattaatccgtaccagtgagttgtcagttcagctgagggagataccatgctccaagggcgtgaaaaacagttgaggaagatgcctgtctcagcctccagctgccacacacacatgctcccacaacacacaccaacacacatacatgcacgtgtgcacatacatacacagattaagaataaagcagaaagcctctacctttatcctttagttttattatgtaattagaagtcatcagaacaagctttctagcatttgtttgctaataaatatttgccaaggtcaagcctggggtatacatcacgtataacctgtggcaatctcttatgacaaaactatatagaagattttggagtccagtaacttgtcctatcagtatttaatattcctcggtctctatattttcttttatatttctgaccctgaattgaaaacttttgacacttagttctaccatttattaaaagcccaaggtgaccatagacctgcattgagtttaactggggatatttttaactttaaaatgcttaccttcattttttgggacatttgtgtcttagtctgttattttgcttctataacaaaatacctgtggctaagtgcttcacacagaaaagaggtttagtgagtttagtttttagtgctaagaacatggacaggcacccactgggctccactgaagacctcctggcccatcataccattgtagatagcattgtgttaggggcataaataactctttatattagtcatttagccctatgaaaacagaaacacgtggtttttaaaactgctgttcttccagcatccagctttatgcctaccacacagtagctgcttaaccaatagttgctgaatggattggatgaagaatattataagaaataaacaccgagacttgaatctatattaatgatgggcagtgtactccaattcaactattttaaagctatagtgtaatgatcaagcctgttttatggagcttagtgggaaacttttcagaggcctggcagagacatgacttgttaaaagtagatatgacttttttttaacattttctttgagcaccctataaactagcacataaaagggaagggaccatgttgacttgttgtgtgcttctgtaatgggatacctgaggctgggtgctttttactggacagaaggtcattacttccagtttgggggactgagaaggccacgatcaagggccacctctagcaagggccttcctgctgtttcctaacttggcagaagacaccatgtggttaagggagaacacagaatgacaacagagaggcaaactctcccttctttcaggagtccacatgtttgttaacttgttcatgaagtcagtgcctccatgacctccaagtcaccccacctctcaacactgttgccctggaagtcaaattcccgacacacaaatcttagggggccacactcaagccaaacaggacttcacaagaggactctgtcactgacaaatgtttcccaatcaagaagatacacacaactttcttcctccagtcaacccaaggcaaggtgatccatcacagtagatgaaaggcaagggtttaggggggactgagaaaataattttgtaaatgcaccctggaaagactgaggtaaataggaaaacaccaacacccacttaagaaacaaaactaagaataaagtccaaagcctcactggtatgtaaagaccagggttagggctatctaggaggaaggaaccttcttcttatgtctgtagagttaagcttctgagagtttaattatttgtctcctttcttagctccttcatttcttttaacctccttctgtatcattgaagctgttctcctaaccaagcatgcatgatcgatgggcacaaataatcctgtacacctggagctcagaggtagcctcactgtagatgtttccagatctgtcaccatagtgcgtaggtgaaaacgagttccaaaggttaggagccagctttgcatttctgagcctgataagtgtcagccgccatcacaaatgccagcagagaaaaatgggtagatagttgaaaatatatcattggcagactgtgtgacagtttgaacccagtgctctggggtttggcatctggttacagccaaccatgtggttgaggctgagaccagagctgtctgcatttgtgcctctggctttagaaatagcctagagaagagcagcaggtgatgccaaggtttggctccttggggcttttcagctaatcctccccagtccaggcctgaggatggggctcactgcggctgttgtcctcacaggaggaggacttcatccggcccagtagccgagaagaggcccagcagctctgggaggcagagaagatcaagatgaagcaggtcctagaaagacagcagaagcagatggtggaagattcccagtggctgaggcgagaggaaagatgcttggtgagtggctcccctctgtccctactcactagagtggatgcttaccatgtatatcatagcccatacttcctattctggtctctgagtcctttgctttggtctcctctacaggaccctatggtttatatgaatgacaagtccccactggtaagtcacaaagaaaggccactcagagccacagcctgaaagagccctatttactcatgtgttggacccctggctgtgcctgtctctgccctttaggctcaccccatgcatctcctcacctgaaagaagatgggagtcatattgttagtgctggcttgggcctctagaaaggtcacttggagtcaggagctctcaggtctccttgttcatgactgcagtgtgtctaaaccagaaggggatgggcaagaagaggaataggatgttctctggaggcagagtagtgactcctttctcccttcctttccttacagactccagagaaggaggccggctacagtgagtgcttccttgggacagtttctgcccggggtgtgttggggggtgtgatgcgattgtagctcacagtcctgcaagaagcagacggttgtctttgactttaagaaggaaaaagtaccatctgccttgttttatcctgaatgtgtgtttggattttggaaggagcctcccctttagctctgcccagtgctccccccccccccccccgacaactctccatctgccgaggtcctttctactcttcaggagatggcaacttcacttcttagaccttctttcctctttatctttcatcttcatttcttaagcgaacctggaacgctctctccgtttctggtttctgagctcatgatctcattctccagataagaactagggctgggggtgtaagcatctgccttggatgagcaagctcctgtgtggtggtgagatcagaggcaagcttgctggcttgcatcttggttcactcttacagcagctccacccaggctctcatgtactattgctcatcagagtcgagtcgatagtatgaaaaatcatcttcggttttaaagtttactctccccgaagctgccactgtaccatggtggctcttgaagactgccacctgcagactgtggctttctttcccatggatgcacaaagccagtattgctgctcctcaggaacttgcccatcttagagggcatggagtccccatacttgctgtgttcatgcagtcctgccttggctcttctttgaaagccttggacagatcttgtctctggctactgggaaagcaggaagaccaagatcctatttccttggtcatcttcccagaatttgggggttacactcttggggtctcctgatggtcgagatgggacactggcttgattacaagaaggtagaaagagagaccaggtactgagaccttcacccactccctgtccttcctattacagcggagttcacagggcccccacagaaaccacctcggctcggtgcacaggtatgtattggggttatgactgtcaaaaactgtaggcctgacgtgttcagaggccctcagagataatccagtccaatgccattattgtagagatgagccccagaaaacacatgcatccagtttcaggtcaggcttcatcgctaattcacaacaaaataggagacgggccagttttttttttctcttctgggtctcttccctgactagaagaaaggtctcattggtttagcctaggattgaaaggtgtgggtttcttctcttccggagccttcccccaggtaccaacattctactgtccatcagttttcttggttctagaatgtgtattctcagtatcagcttcacacataaaaatcactggagagatgttaagacaatgtggactccaagactagatgctgtctaccctgggctggcttgataacacactaacattttatttgggctccgaagttggggaatgtgaccccaaaggcagaaggcatggctctacccctggggcagagtgctgctgttgcaaagcagaggcccgtttcctggttgatatctgtgcattcccaggaatgaataatagtggtagagaggtcctcctggctcccatgagccactaaccatccacccctctctttccagtccattcagcccacagccaacctggacaggaccgatgacctcgtgtaccacaatgtcatgaccctggtggaggctgtgctggaactcaagaacaagcttggccagttgccccctgaggactatgtggtggtggtgaaggtgactgacagggctggactgggtcagggagataggggcttcctagactgaccctagaaggaaaaccactatgtccctctcattgaccagccctgtagaccccagaggagcaaggggaccctaggaagttcaatcccaggcagtctcagagggcagatgctatcatagagagcagtcccaggagtggcagcttttcaccaagcaggtggaatagctgccttgctcttgctctcttagaacgtggggctgaacctgcggaagctcatcggcagtgtggacgatctcttgccctccttgccggcatcttcgaggacagaggtgagtgtcctcattctcggccatgcctgctgtacctccccctgtccctggctgtaatttccaccagtgccatctgggcagccttaattctcccaacaaatgtctctgcagagcatcagagctgttggcatcacagggctgagcctgagtaaaaaaaatcacagtctagatctcaaatagtctcaatgggtttatgcaagtaaatgcatacctccccccacccagtaaccctctgcattcagattatcttattgagataagaatctattattgaaatcaaggtggagtcctggtgctttggtggaatgatgcacggtgatgtctccaaaagctgtgacctacatgtaaggtactctgcagagtaccttacatgtcaaaagaaactttattgggctgataaagttaagggtccaagaaggagaggtgataatggagtatccaggggcaaggggtcaaagtcagagacacgggaatgtgagggcagcatttaagtcagagggatgcctctgctggaagggaccacaaggaaagagataacctcaaagctgggtaaaacaaagaacagactctcccctggactcattaacaggggtactgctccactgatgcccttagctcactgtgggacttattccagaattctggcctctaggactgttcaagaatgaacatgcaaagtttgcactgctgtgttcccatggccaaggcagacagatctgtttcttgtctggaatatgcagtgctttgaagccttgccttccagtggtcatctatgctatgatatgatctctgctgcccgtggttgcccaaggcaagacagaacaagggcagagctggctaccttctgggtaacagcagtggcctcccaaggagtgccagctgggcaggtgccaccagagggctgagactgctcccgagaacctggacagctcactgggtgaatttcacagtgcagagctgatgggaaggtttggcacagccaattgatttactcattcattgcattatacagtagctttcgtgctgtgtattcatgatgctaagcactagcaatgcgatgcttaaatagatatgggatctgatctctgtactcgaccacagacagctaaagaatcagtgtgttacttttcttatggttggagtaaaacacttcaggaaaatgtccaaagaaaggtttgctttggcttcattgtttgaaggtgtggtcccttacagcagggaaagtatggtgggaggggcgggaggtgactgttcacatttcgtctacagttaggaagtgggaaaatgataaatactttctcctatttgctcattccaagacctcagcccatggagtgctgtcaccacattttgggagggtcttcccaccttaattaaccccatctagaaactcccttacacacacgcccagaggtttgtttccatggtcactctaaatgccatcagtatgacaatcaagatcacccatcgaagtaggtgaatgtggttgacctctggtcagcatgcagggattgctgctgtgcaggaggccactggagtgcctactgcattgatctttgtggaccagctccagtctgtgcagaagggtggattcagcccaggtttgagattagtttgtccccagggaacttctgatgtcttagccaatgctttctcccctgagcatttctcattcagcttctcatgtgtgcttgcccaccagattgaagggacccagaaactgctcaacaaagacctggcagagctcatcaacaagatgaagttggctcagcagaacgccgtgacgtccctgagtgaggactgcaagcggcagatgctcacagcgtcccataccctggctgtggatgccaagaacctgctggatgctgtggaccaagccaaggttgtggctaatctggcccacccgcctgcagagtgatcaagagaggggccacctgcctgcatcttctgcccccacctgtcttggcatacctttcctgccttgcctttggttattggtcttccagggaaagctgagaagagtccatcccccttgccactttgcacgacgccccctcttcccccaacccatcccagactgtgctactcaggctgcatctggacagaaaggactctgggcacagacacggggtggggtgacatagttcataggggtactactgccagccactccctcttaccccagcctgggttgctggagcatcattggggtcatgagtgtacccctaacggccaagatggctttctgcatggacatttgagagccagtattcctccttcctcttcagccctcagggacccctgatacagaggggacagagaggggttttatttgtagagaagctggtgagatgagggctggacctggctctcttgtacagtgtacattggaatttatttaatgtgagtttgacctggatggacagccaagggccatagtccaggagcaaaccaatccagtcacaggactctgtgtttttatggaactgagtgccacagggaagaagcagagagtcggaggtcagaatgggactttgtgcccttcctgcgtttctcttctccctctttccttctcccctcttttcttacgtctcctttttctcctcccccttttcacatctgctcccctcctctctcatgtctgtggagaacatttaccttccttctttttgatcggtggttgaattaaaattattaccatttgctttgtggttagcttgactgtgtcggttatttgacctgatctctgtgggaggaagcagacctgaaaacacagccctgggagaatcagctacgttcctgtccagtacagagcaggagctgactgacgccaatgagaagtatgtagtggcctcatgccttttgtctcatgtgggcagtagtgacacctcatctcgaggcagctctccaggaagacactttgggacatacctctcttgactgtccttgagccacctaggctctggaggggacgagttaatgccagtgacagctgaggtagctggcatgaaggcatgacactcttgacggcagacattttagctttattttgacatttcactcacatgcaaggaggatggggggtagggatcatccaacaagcatctctgcatcaggaaatcatgtcttggggtttgacacagagaaaagaggtgccggctgcattcagtggagaaagggggagccaaggcctgagactgagtgggtatcattagaactggtaacaggaagtctgggtaaggcctccgacaagcagatctcctaggtctgtcgaggtgctgtgtgtggggttcggaaggagagcaccccaagacagagaacaaacttggtctctatatctcttagtgaccctgaatctcattgctgttagcgtctgggacctaattccttggggactgcagaatgttctgaaaggcccaatccgctgggcttctatgcaatgaagggtcgtggaatattacaagtaaaagaacaagctacacaggacagttcagagcaggttagtcacctgatggggccctgggaagactggggaagagtcctcccccaaagctttggtattatgtagcagttctggagcctaaagctaccaggttggtttctctccactactcacgatggagggtccagctactgagctctctcacccagctcaggatgagtgaaagcaacaagagcagagactctgccctgaaggagcacacaattgaaagagcttgatgcaaagatctcagttcctatgtgaggcatgctgacagagccaggaattgaggaccaggtccctgtggacagcaagaagggtgccaacattggagactgccttcttactttgtcctcttgatttgaaggtagccctgatcccttgtagaaattgctatacctctttttttgtagcatagaacagtgagacatgacactgaggggaacttgaaggctccaaagtgcttttggttgaataatggcccagcaacttatacccaatgttgctattctgcctcaagcatccaccagggcacctagatcagtggttctcaaccttcctaatgctatgaccctttacagttcctcatgttgtgaccccaaccacaaaattgttttcatttcaacttcataacagtaattttgatattgttatggactgtcatgtaaaacatctgatatgcaggatatctgatatgtgacccctgtgaaagggtcgtttgactccctgaagggttgcaacccacgacacaggttgaaagccactgctctagaactttctttgtgccccactcctttgggaagtacccctgtccctctgacatttcctgcaaagtgcatagagacaggttcagtgcagactctgagcttcttcttgggcctgggtcaaaaatatcccaacttgcctcccagcctccccaccccagctggctgtcctctctgacattctgaatccacagtgttgtgcagaactcttccacaccaggcactcccattgtccccttgtgcccatctttgggccagtgttctatttccctttgtcctggtctgacccctccatccctttgtttgacccttttgccatagacaactcctatatgctctttcagaactatcttgctctccccccatatcaccaccatgttgtcatcacctacagagcagccttcacctcttctagttcctcagcatccctaaatagttgtcatgttgagtggtctcagtgcttgtcaccgcaatggcaccatgaactgttgacaaggaggatatgaagtccaggctagatcaggggcctcgtagaaacatcgcaggcaggtggcattaagtcaaaagaatattctagagatggctccagtcacagaagagcagaagatggttgtccaggccaccttggagccaacatgagggacatcaagtcagatcattccagccaggaacggagggaggaagagcccgatggtccccaggaagcagacgataatgaacagccagaggaagatccggtctaccaccatggccacatacttccaatcttccttcacctggagttagaattgggcttacagtgacaagagccaggctttgagaagatgtccctcccacatccagcctcatggaggcagtagtcaccaggccaccgaaggcttgcaaagccaaggttatcccacacatagagatgggtggagagagaaacaggcttagctcagggctgatacatccctgggaatcccattttatcttttcccatttccacatactgctaggctcaggagtccagagggacatgaggagacactaggcacaggccatcaaaatcaggaaattttaaatgtagctcatagtagtccccaataatgtgctgtcccatgctacttccccacacacctgaaggggacagaaagaggcaggttgtagcccagggcaagccagtgtggaagagctggagctttgtagctcttcagctcacaggccaagccagaggatctacattcttagaaatttccaaattaatgatcaatgttcttatctactcaataagattgtcccatagtaacctttcactcctcctttggttggtaaggggacagccaggttctgaacactaagtacttactatatgcagccctgggggaggggagcctaccctggttcagctgagaatctgcagggtttgagagtgactagggaacgtcacagactgcccagagcccagatggaggagaccctctaccacagggtagtgcagcggccagccatgcactgagtggatgcgtttgtatttggtttctgtaccttctcagagcagtctatctccctgccctgccccgccccaccccgcccctctcatagagggactgcccagacaaagacaaagcagatggagaccagcatctgagctccccaatttcctcactctcccccacttaggttgaagagagggggatggaccctgtggtattctgccatcggccaggaagtaaccagaggacttctagctagtgtttccctttcatgatcaagtccagactctttggacatgactgagggtgactggtccttacaagaagaagggaaagggttgcccaagggcatgccctgggcttggatttttccctgctaagctggcagagtcacccacggggtggggaggggctttcctcatcccaactcaccgaagagtcagcatcctcagacctcaggtggtcagcaatgtagtgtacaccttctagtgctttctgtatttgaggtgacagcaggatctcactagcctgggatggagtcttggcctcaggccccatggccctcagatgcaggctgccatggccatagaggacacccatggaagagtctgggaggcctgcacacatacatatgttttcatcttcttcctcctcctcctcttcctctgtctcctccctttcttcagcatccatgttggtctccagccaatgataagtggggctgagcttcagacctggagagccatggagctccatgggcggcaggggccgattcatcatcagccaccggggcacccggcctagcagggccaccctcacccagttgggcatgttgtgcgtgctaggggaacggtggtggacattgagcacgaagactgtgatcacaatagagagggtgacgaagatcatggtgaagagcaggtactcgccgatgagtgggatgaccagtgaggtggatgggataatttctgtgatgagcagcaggaagacagtgagggagagcagcaccgagatgcacagcgtgatcttctctccacactcagagggcaagtagaacacgagcacggtgaggcaggagatgagcaggcacgggataatgaggttgatggtgtagaacagcggcagccggcggataacgaagtagtaggtgacgtcggggtagatctccgcgcagcagtcgtacttcttgctgttataggttccggtggcgttgataatggcccactcgccgctctcccagtagtccttcaggtccaccgtccgctccatctgctccaggtcgatcttggccttgtcgtatgtccaggagccaaacttcatcttgcagttctgctggtcgaaggggaagaaagtcacgtcgatgctgcaggagctcttgtagatggctgggggcacccagtgcacagtgcccgtgaagaagaggtgggccttggtcatgtgggtcaccgcaaactccccgtctgcactgggaagaggagacaagctgggatcctgcatatctgcctcttccgtgaagcagggcaactgagtaaacaaactcactattgactggctaagtagagtcatccaagcaagggcaagataaatctctcctacagacagacgtatctgagttgccttttcaaataccagtgttttaattgcagaagtaaaaaatttaaataaactaaaaaaaaaaaaaaccacgattgccattttgatgtcataattatatatctgactgtcataaagactattccttaatttttcatatttcaaatcatgggacatttatagtctgatcctgttattatccatttagtatgttgaagtttttgtggttgttttatgagacagggatcttactatgtggccccagctggcccccaacttgctggctggatttaaacttgtgatcctcctgcctcagtatcttgagttctggaataacaggtattctccaccatacctgactagagtaaaggtttttgagtgttttgatctccctcacgattaaatgggaactcagttccagaggaggaggatcctagatcttgtacccagatctttttcgttcctttccagacgagactaacattttggctggtgaggaaactccctgtactctgtgcatttagcacagtatttggggccagtttcatctaccagggcctgtacctgagggatgtgagatgtggttcctgcccttggggaaccacatggaaatgaaatatagtcacatgacatcaccatgcaactgggcatttggaatgcttctgagatcaggagggacttctggctgggctcaacaggattactgtgaaagcttaattagttcttgacctgggaggtgagacaagagcataaaaacaggaagcctcacaagaacaaggaagaaatcggcaggcaggactccataggactctgggtttccctgggtagaaatagtctttaaactccacccccaattcctacattcaacccaaaccggtagtgataatttcggtcatttcacataactaccactagatggcagcaggcccccattcgggggaagaggccatgtgacttcactgaccctttgcctattaacctgcaggagggtgtcgttcacacaccccttaaatgcagctgttctgactagcctttgtcctaccagaagaacttgatgcaatcaggtattagcaaccagctgtcttattgacaatttaaaaactcagataaatctgctgctgggactttgttcctgatctgtcagagagaaccagaaactggaaggatcctaggtgccacctcagggcacagagatggggcctggggaactcggggcatatgactcctgcagaagcaaacaacaggtgtttaaggcttagaccaccagggggtgactatgctatccaaaattatgtcacatgccaacccccccccccacacaccaccaccaagaaccttccatgcctattcatatctcaagaaggtagcagtgtcccccagagacctgctttagaaaatgttagcaagagacactgccatcatttaagtattaacgtctggatttctctgtgaaaccttacccaagccaaaaaggaaagaataagttttagtttcttttatgagaaagtgtgtgtgtgtgtgtgtgtgtgtgtgtgtgtgagagagagagagagagagagggagagagagagagagagagagatgccagtgcacatgagtatgtgtctgtgtatatatatgcatgcatgtttgtgtatgtgtgtatgtatgtatgtatgtattagagagagagtgtgtgctggcacacatgtgtgaataaatgtgtgtatgtgtgtggtgtgtgcacatgtgtgggtagtgcttgtgcatatttgagtgtgtataggcctaaggctgccatcannnnnnnnnnnnnnnnnnnntaggcctaaggctgccatcaagtatctttccttgacctgctccatctttacttcttgagacaggtcctcaagaatcgaaggcttgtctggctaaactgactggccagtgaacttctaggatctacctgtctcccctatccccagtgctaaagtgctctctctctctctctctctctctctctctctcatacacacacacactcacagaaacagacagacagacagacagacagacagacagacagacagagcgagccagagtaccactcccagcttttatgtgaccactgaggattcaaacagattttcttgctagcccagcaagagctcttgctcgcctagttctctcccctcccagatgcactttaattagtaactggcttcttacttgttgtagagaacaatgtctgggatccagatcatctctgaggggacgcggagggaggtgatgttgccaaactcagccgggtcccagcgcagcttgtagtcattccattcctgctcaggggagtggtcacatcagagcactgccccaccgggacctttaggtgatctgaggagctgtgggactgtagcacccctgtgtccctctcctagcccccacagaatccacagagtctatggcacgaggaaaaggctgctatgggaatagggcaaaccatttctgataagcagcccattttgttccgactctggtagtgaaaatcccaggcagccagtgccagcacacttggccctctagctgtgcctctggcccttgttctgatgctccccacttagtgaatctgttatgcagtcactccttctccaggcagggcttgccagagacagccaggagagttacccatgaccttccaactatgctctggagacctcctgatccagggagtcccagcaggaagaggatgctctaggtcccaactgtgttccaccagagcaggtccaagtgcattttaaaaccagattttgttattgtttatttgtttgtttcatgcacaagctggcctccaacttactgtaaaggtaaaaaacgaccttaaacatttgcttcttctcagcccctcttcccaggctctggatggagttcatgagccccatgcccagtgcctgcggtgttggggagtcaaacccaggcaagcactgtatgaaacggagctttaccctttagttcccaataccgagctcttattccctctctggtatatcctttaggatttcaggttcatatatttggggacacttacatcaaatgggggcatctgacggccataggtctaagacagatgagccaccccttcacagatggggagaaaggagcttccagagggttaataacttctccagcatttcaggctagtcctgggcagctgcagaaggcctggttccaccactgtgccctttcctctcctcctccacaaccctggcatgagtgaccaggacaatcgtggtgatcgaggatctaggaccacaccaccccccatgacatgactgcacacaccttttaaagcttccccctcactctggttcccattggttcatccatagagatgaggctcagaccctccaatgactccagaataagcaatagcagaagcaattggctcagagcagcccctgacccaagtagctatcacgcatccagaacccagtgagtcgggggttgtgtgtagaacccctacagtgagcaaggaacctatttgaaagactctgaaatggcattgccttggtgggtttctgcctgctggcctctgagtcagggccagtcaggtacccaaggggccagagtagaaagctgagggcaggggttagctttcctttcccatgtccctttgtcatctccactttaaggccttgggattttctgggatgacagaatgagcctgcccaacagtggcccatcccagaactccacacacactctccttccatggagaaatggtatctttgtctcttcccgactctagattctttactgactgtgcctatagaatgaagtaagatggaggctagattgctatagatccataagtggctttcagcttctactttctgtctcttgtcactcagggagacttgaagacaccaagtgagaatccatcaaatcaactgccaaagagaccctagtgaaggaacctgagagtgcgcatggaggaccccagcctttcagaatcttccagagctttccaaatatccatgtaaaagacagacatgtaaggcagtggccctcaaccttcctaatgctgcagtgctttaatacagttcctcgtgctgtgatgacccccgagcagaaagctatgtcattgctatttcataactgtacttttgctactgttatgagaataatgtaaatatttttggagatagaggtttgccaacaggctgtgacccagagattgaaaactgctgatgtaagggaagccattttagacagtaacacactaaccacagctggccaggtgccgccaagtaccttagtcaccatttgaagcagagaaagccatctgaccaccagaccacaaatgtgtgataaatgggtcattgctttatgcttgtgagctctggggtcatttgccaggtagcacagactctaagccactcctaggagatggaccttggagctgggcatacctgggtacccccttgtcctatgatgaagggagccgattcagtgagctgtcttgtaaacctgggactatgagatgcttgttcctagaaaggcatcccttggtgctgtgggtgaaaagaacagttgagtaagagactggccaaacaaaagccagcccccggagagagcagcctgcagtaccacagctgcctcacctcttaggtgactactgatcatgacccatgaatttagcatcttgccgatagataatgagggtcctagaagggtctggagactgcacaagtctgccaattcctactatggaagactcacctgctttagccagacattggtggtcatcatttgattcttctcatcctggggtagcagagatagaaagtaaaatagttggggtatctgatgaaccatcccagaagacagagtgtataggaggcactttgaggatctactcataggacactcaaagcccagccacccttcctgtcaccagtactctgattcctcagggtcacccaatcacagaggaggggagttgaacatgtgttttagacaacctatgctcttgggggctccaaggaatgggaacaaagggaccatggcaacacaacaaggtagctgcatgctgtgtccagggtgggctttgagggctggtgggagaagggctgagctgaatccaaggaggaccaagagagagatcgtgtgggctgggggcggggggggggtggggtgggcgctgattaagggagtgcagcatgaaaaggcaggcccaccacatctatgagctgtgcaatggatagtccaaagcgcacgatgaccacatcggaagtgttgggcactggccgtgcccagcgattgtagcctccaaagaggtgtttgaacaggcggtcctcggcatgggtgtgcgagccttgctgggccaacactgtgagatagggacagaaaagaaagagtgagtctgcatgaagtcaa

SEQ ID NO: 504 - DNA, 3944 bp, Mus musculus
ctgtcagcctcttactcagcctctgcaggcagagccgcgcgtcctacctgcggcggctgcgctcacctggcccagcccggagccctggcccgagtccgcgcctcgcccgagggactgcaatgtgccggtcctagctgcagtctgagaggatgtccggggtgtctgagcccttgagccgtgtaaaagtgggcactttacgccggcctgagggccccccagagcccatggtggtggtaccagtggatgtggagaaggaagacgtgcgcatcctcaaggtctgcttctacagcaacagcttcaacccagggaagaacttcaagcttgtcaaatgcacagtgcagacagagatccaggagatcatcacctccatcctcctgagtgggcgaatagggcccaacatccagctggctgaatgctatgggctgaggctgaagcacatgaagtcagacgagatccactggctgcacccacagatgaccgtgggcgaagtgcaggacaagtatgaatgtctacacgtggaagctgagtggaggtatgaccttcaaatccgctacttgccggaagacttcatggagagcctgaaagaagacaggaccacattgctgtacttttatcaacagctccggaatgactacatgcaacgctacgccagcaaggtcagtgaaggcatggctctgcagctgggctgtctggagctcaggagattcttcaaggacatgccccacaatgcactggacaaaaagtccaactttgaactcctggaaaaagaagtcggtctggacctgtttttcccaaagcagatgcaggaaaacttaaagcccaagcagttccggaagatgatccagcagaccttccagcagtatgcatcactccgggaggaagagtgtgtcatgaaattcttcaataccctagcgggctttgccaacattgaccaggagacctaccgctgcgaactcattcaaggatggaacattactgtggacctggtcatcggccctaaaggcatccgtcagctgacaagtcaagatacaaagcccacctgcctggccgagtttaagcagatcaaatccatcaggtgcctcccattggaagagacccaggcagtcctgcagctgggcatcgagggtgccccccagtccttgtctatcaaaacgtcgtccctggcagaggctgagaacatggctgatctcatagatggctactgcaggctgcaaggagaacataagggctctctcatcatgcatgccaagaaagatggtgagaagaggaacagcctgcctcagatccccacactaaacctggaggctcggcggtcgcacctctcagaaagctgcagcatagagtcagacatctatgcggagattcccgatgagaccctgcgaagaccaggaggtccacagtacggtgttgcccgtgaagaagtagttcttaaccgcattctgggtgaaggcttctttggggaggtctatgaaggtgtctacacgaaccacaaaggggaaaaaattaatgtggccgtcaagacctgtaagaaagactgtacccaggacaacaaggagaagttcatgagtgaggcagtgatcatgaagaatcttgaccaccctcacatcgtgaagctgattggcatcattgaagaggaacccacctggattatcatggaactgtatccttatggggagctgggacactacctggaacgaaataaaaactccctgaaggtacccactctggtcctgtacaccctacagatatgcaaagccatggcctatctggagagcatcaactgtgtgcacagggatattgctgtccggaacatcctggtggcctctcctgagtgtgtgaagctgggggactttgggctctcccggtacattgaggacgaagactattacaaagcctctgtgacacgtctacccatcaaatggatgtcccccgagtccatcaacttccgccgcttcacaaccgccagtgatgtctggatgtttgctgtatgcatgtgggagatcctcagctttgggaagcagcctttcttctggctcgaaaataaggatgtcatcggagtgctggagaaaggggacaggctgcccaagcccgaactctgtccgcctgtcctttacacactcatgactcgctgctgggactacgaccccagtgaccggccccgcttcacggagcttgtgtgcagcctcaggagagttcgggttaaagttggtgacttgatgcctaatagtgacagtgacatttatcagatggagaaggacattgccatagagcaagaaaggaatgctcgctaccgaccccctaaaatattggagcctactacctttcaggaacccccacccaagcccagccggcccaagtacagacctcctccacagaccaacctgctggctcctaagctgcagttccaggtccctgagggtctgtgtgccagctctcctacgcttaccagccctatggagtatccatctccagttaactcgctgcacaccccacctctccaccggcacaatgtcttcaagcgccacagcatgcgggaggaggacttcatccggcccagtagccgagaagaggcccagcagctctgggaggcagagaagatcaagatgaagcaggtcctagaaagacagcagaagcagatggtggaagattcccagtggctgaggcgagaggaaagatgcttggaccctatggtttatatgaatgacaagtccccactgtccattcagcccacagccaacctggacaggaccgatgacctcgtgtaccacaatgtcatgaccctggtggaggctgtgctggaactcaagaacaagcttggccagttgccccctgaggactatgtggtggtggtgaagaacgtggggctgaacctgcggaagctcatcggcagtgtggacgatctcttgccctccttgccggcatcttcgaggacagagattgaagggacccagaaactgctcaacaaagacctggcagagctcatcaacaagatgaagttggctcagcagaacgccgtgacgtccctgagtgaggactgcaagcggcagatgctcacagcgtcccataccctggctgtggatgccaagaacctgctggatgctgtggaccaagccaaggttgtggctaatctggcccacccgcctgcagagtgatcaagagaggggccacctgcctgcatcttctgcccccacctgtcttggcatacctttcctgccttgcctttggttattggtcttccagggaaagctgagaagagtccatcccccttgccactttgcacgacgccccctcttcccccaacccatcccagactgtgctactcaggctgcatctggacagaaaggactctgggcacagacacggggtggggtgacatagttcataggggtactactgccagccactccctcttaccccagcctgggttgctggagcatcattggggtcatgagtgtacccctaacggccaagatggctttctgcatggacatttgagagccagtattcctccttcctcttcagccctcagggacccctgatacagaggggacagagaggggttttatttgtagagaagctggtgagatgagggctggacctggctctcttgtacagtgtacattggaatttatttaatgtgagtttgacctggatggacagccaagggccatagtccaggagcaaaccaatccagtcacaggactctgtgtttttatggaactgagtgccacagggaagaagcagagagtcggaggtcagaatgggactttgtgcccttcctgcgtttctcttctccctctttccttctcccctcttttcttacgtctcctttttctcctcccccttttcacatctgctcccctcctctctcatgtctgtggagaacatttaccttccttctttttgatcggtggttgaattaaaattattaccatttgctttgt

SEQ ID NO: 505 - protein, 995 aa, Mus musculus
LQSMSGVSEPLSRVKVGTLRRPEGPPEPMVVVPVDVEKEDVRILKVCFYSNSFNPGKNFKLVKCTVQTEIQEIITSILLSGRIGPNIQLAECYGLRLKHMKSDEIHWLHPQMTVGEVQDKYECLHVEAEWRYDLQIRYLPEDFMESLKEDRTTLLYFYQQLRNDYMQRYASKVSEGMALQLGCLELRRFFKDMPHNALDKKSNFELLEKEVGLDLFFPKQMQENLKPKQFRKMIQQTFQQYASLREEECVMKFFNTLAGFANIDQEYCELIQGWNITVDLVIGPKGIRQLTSQDTKPTCLAEFKQIKSIRCLPLEETQAVLQLGIEGAPQSLSIKTSSLAEAENMADLIDGYCRLQGEHKGSLIMHAKKDGEKRNSLPQIPTLNLEARRSHLSESCSIESDIYAEIPDETLRRPGGPQYGVAREEVVLNRILGEGFFGEVYEGVYTNHKGEKINVAVKTCKKDCTQDNKEKFMSEAVIMKNLDHPHIVKLIGIIEEEPTWIIMELYPYGELGHYLERNKNSLKVPTLVLYTLQICKAMAYLESINCVHRDIAVRNILVDECVKLGDFGLSRYIEDEDYYKASVTRLPIKWMSPESINFRRFTTASDVWMFAVCMWEILSFGKQPFFWLENKDVIGVLEKGDRLPKPELCPPVLYTLMTRCWDYDPSDRPRFTELVCSLRRVRVKVGDLMPNSDSDIYQMEKDIAIEQERNARYRPPKIPTTFQEPPPKPSRPKYRPPPQTNLLAPKLQFQVPEGLCASSPTLTSPMEYPSPVNSLHTPPLHRHNVFKRHSMREEDFIRPSSREEAQQLWEAEKIKMKQVLERQQKQMVEDSQWLRREERCLDPMVYMNDKSPLSIQPTANLDRTDDLVYHNVMTLVEAVLELKNKLGQLPPEDYVVVVKNVQLRKLIGSVDDLLPSLPASSRTEIEGTQKLLNKDLAELINKMKLAQQNAVTSLSEDCKRQMLTASHTLAVDAKNLLDAVDQAKVVANLAHPPAE

SEQ ID NO: 506 - DNA, 3899 bp, Mus musculus
ctgtcagcctcttactcagcctctgcaggcagagccgcgcgtcctacctgcggcggctgcgctcacctggcccagcccggagccctggcccgagtccgcgcctcgcccgagggactgcaatgtgccggtcctagctgcagtctgagaggatgtccggggtgtctgagcccttgagccgtgtaaaagtgggcactttacgccggcctgagggccccccagagcccatggtggtggtaccagtggatgtggagaaggaagacgtgcgcatcctcaaggtctgcttctacagcaacagcttcaacccagggaagaacttcaagcttgtcaaatgcacagtgcagacagagatccaggagatcatcacctccatcctcctgagtgggcgaatagggcccaacatccagctggctgaatgctatgggctgaggctgaagcacatgaagtcagacgagatccactggctgcacccacagatgaccgtgggcgaagtgcaggacaagtatgaatgtctacacgtggaagctgagtggaggtatgaccttcaaatccgctacttgccggaagacttcatggagagcctgaaagaagacaggaccacattgctgtacttttatcaacagctccggaatgactacatgcaacgctacgccagcaaggtcagtgaaggcatggctctgcagctgggctgtctggagctcaggagattcttcaaggacatgccccacaatgcactggacaaaaagtccaactttgaactcctggaaaaagaagtcggtctggacctgtttttcccaaagcagatgcaggaaaacttaaagcccaagcagttccggaagatgatccagcagaccttccagcagtatgcatcactccgggaggaagagtgtgtcatgaaattcttcaataccctagcgggctttgccaacattgaccaggagacctaccgctgcgaactcattcaaggatggaacattactgtggacctggtcatcggccctaaaggcatccgtcagctgacaagtcaagatacaaagcccacctgcctggccgagtttaagcagatcaaatccatcaggtgcctcccattggaagagacccaggcagtcctgcagctgggcatcgagggtgccccccagtccttgtctatcaaaacgtcgtccctggcagaggctgagaacatggctgatctcatagatggctactgcaggctgcaaggagaacataagggctctctcatcatgcatgccaagaaagatggtgagaagaggaacagcctgcctcagatccccacactaaacctggaggctcggcggtcgcacctctcagaaagctgcagcatagagtcagacatctatgcggagattcccgatgagaccctgcgaagaccaggaggtccacagtacggtgttgcccgtgaagaagtagttcttaaccgcattctgggtgaaggcttctttggggaggtctatgaaggtgtctacacgaaccacaaaggggaaaaaattaatgtggccgtcaagacctgtaagaaagactgtacccaggacaacaaggagaagttcatgagtgaggcagtgatcatgaagaatcttgaccaccctcacatcgtgaagctgattggcatcattgaagaggaacccacctggattatcatggaactgtatccttatggggagctgggacactacctggaacgaaataaaaactccctgaaggtacccactctggtcctgtacaccctacagatatgcaaagccatggcctatctggagagcatcaactgtgtgcacagggatattgctgtccggaacatcctggtggcctctcctgagtgtgtgaagctgggggactttgggctctcccggtacattgaggacgaagactattacaaagcctctgtgacacgtctacccatcaaatggatgtcccccgagtccatcaacttccgccgcttcacaaccgccagtgatgtctggatgtttgctgtatgcatgtgggagatcctcagctttgggaagcagcctttcttctggctcgaaaataaggatgtcatcggagtgctggagaaaggggacaggctgcccaagcccgaactctgtccgcctgtcctttacacactcatgactcgctgctgggactacgaccccagtgaccggccccgcttcacggagcttgtgtgcagcctcagtgacatttatcagatggagaaggacattgccatagagcaagaaaggaatgctcgctaccgaccccctaaaatattggagcctactacctttcaggaacccccacccaagcccagccggcccaagtacagacctcctccacagaccaacctgctggctcctaagctgcagttccaggtccctgagggtctgtgtgccagctctcctacgcttaccagccctatggagtatccatctccagttaactcgctgcacaccccacctctccaccggcacaatgtcttcaagcgccacagcatgcgggaggaggacttcatccggcccagtagccgagaagaggcccagcagctctgggaggcagagaagatcaagatgaagcaggtcctagaaagacagcagaagcagatggtggaagattcccagtggctgaggcgagaggaaagatgcttggaccctatggtttatatgaatgacaagtccccactgtccattcagcccacagccaacctggacaggaccgatgacctcgtgtaccacaatgtcatgaccctggtggaggctgtgctggaactcaagaacaagcttggccagttgccccctgaggactatgtggtggtggtgaagaacgtggggctgaacctgcggaagctcatcggcagtgtggacgatctcttgccctccttgccggcatcttcgaggacagagattgaagggacccagaaactgctcaacaaagacctggcagagctcatcaacaagatgaagttggctcagcagaacgccgtgacgtccctgagtgaggactgcaagcggcagatgctcacagcgtcccataccctggctgtggatgccaagaacctgctggatgctgtggaccaagccaaggttgtggctaatctggcccacccgcctgcagagtgatcaagagaggggccacctgcctgcatcttctgcccccacctgtcttggcatacctttcctgccttgcctttggttattggtcttccagggaaagctgagaagagtccatcccccttgccactttgcacgacgccccctcttcccccaacccatcccagactgtgctactcaggctgcatctggacagaaaggactctgggcacagacacggggtggggtgacatagttcataggggtactactgccagccactccctcttaccccagcctgggttgctggagcatcattggggtcatgagtgtacccctaacggccaagatggctttctgcatggacatttgagagccagtattcctccttcctcttcagccctcagggacccctgatacagaggggacagagaggggttttatttgtagagaagctggtgagatgagggctggacctggctctcttgtacagtgtacattggaatttatttaatgtgagtttgacctggatggacagccaagggccatagtccaggagcaaaccaatccagtcacaggactctgtgtttttatggaactgagtgccacagggaagaagcagagagtcggaggtcagaatgggactttgtgcccttcctgcgtttctcttctccctctttccttctcccctcttttcttacgtctcctttttctcctcccccttttcacatctgctcccctcctctctcatgtctgtggagaacatttaccttccttctttttgatcggtggttgaattaaaattattaccatttgctttgt

SEQ ID NO: 507 - protein, 980 aa, Mus musculus
LQSMSGVSEPLSRVKVGTLRRPEGPPEPMVVVPVDVEKEDVRILKVCFYSNSFNPGKNFKLVKCTVQTEIQEIITSILLSGRIGPNIQLAECYGLRLKHMKSDEIHWLHPQMTVGEVQDKYECLHVEAEWRYDLQIRYLPEDFMESLKEDRTTLLYFYQQLRNDYMQRYASKVSEGMALQLGCLELRRFFKDMPHNALDKKSNFELLEKEVGLDLFFPKQMQENLKPKQFRKMIQQTFQQYASLREEECVMKFFNTLAGFANIDQEYCELIQGWNITVDLVIGPKGIRQLTSQDTKPTCLAEFKQIKSIRCLPLEETQAVLQLGIEGAPQSLSIKTSSLAEAENMADLIDGYCRLQGEHKGSLIMHAKKDGEKRNSLPQIPTLNLEARRSHLSESCSIESDIYAEIPDETLRRPGGPQYGVAREEVVLNRILGEGFFGEVYEGVYTNHKGEKINVAVKTCKKDCTQDNKEKFMSEAVIMKNLDHPHIVKLIGIIEEEPTWIIMELYPYGELGHYLERNKNSLKVPTLVLYTLQICKAMAYLESINCVHRDIAVRNILVDECVKLGDFGLSRYIEDEDYYKASVTRLPIKWMSPESINFRRFTTASDVWMFAVCMWEILSFGKQPFFWLENKDVIGVLEKGDRLPKPELCPPVLYTLMTRCWDYDPSDRPRFTELVCSLSDIYQMEKDIAIEQERNARYRPPKIPTTFQEPPPKPSRPKYRPPPQTNLLAPKLQFQVPEGLCASSPTLTSPMEYPSPVNSLHTPPLHRHNVFKRHSMREEDFIRPSSREEAQQLWEAEKIKMKQVLERQQKQMVEDSQWLRREERCLDPMVYMNDKSPLSIQPTANLDRTDDLVYHNVMTLVEAVLELKNKLGQLPPEDYVVVVKNVQLRKLIGSVDDLLPSLPASSRTEIEGTQKLLNKDLAELINKMKLAQQNAVTSLSEDCKRQMLTASHTLAVDAKNLLDAVDQAKVVANLAHPPAE

SEQ ID NO: 508 - DNA, 153752 bp, Homo sapiens
  misc_feature (1)...(153752): n = A,T,C or G
agtgaggcccaggaatcttcattttcacttgcatgctaggtgattctgaggtgcaagaaagtttgaaagcaattatcctagatctattcacccaacaagttgttgggtctccagctatggttggttagtggttcaaaaattaaccttagaggcaatatccaaaaaagccacaagatggggctaacaacgctacactccagatagccctctcccctccccccaacgcagagactcttacgtcgtctcattctctttcactgtgttctcttatctctgtgtcccagttgtgttgtgaatcgatatgtgttgctgtctatgtgtttcattctgttcttacctgatcttccttattttgttgggtcttttttttttctcatattctgaatggggccacaaatcaaaaacaagaaggaagagtagaaattgtatcttttaaactacaatacaaaggttaacattaaaccaataaggctcttcaatcattctggaaatccagaaaggacttagttctagtccaagctctaccactacccaggggcaggacctggggcatattatttcacttttctaacttgcttttcctccactataaaagaaaagatggaactaattgctccaagttctgaccaacttagatgctctgaaattgttttattctttgcatatggtgggggggtgggtaagggtgactaagacttagccagagaccaggaaagagaaatcttggtgactagaaccaatctgtcaccaatttatatttctcctttcaatacaaaggaccttattcagaggtccttattgatgttcaagtcctatgtatactagctaatcttctgcaagagcttactcaaaagttctcataatctctaatttcctgcatcccacctcccaaatgccctgccaagcactgccagatttccaaaccccttgccatcaccatgtaaatttgtgtaaggaataactttttaaattgttaagaaaataaattcccaggtgcagagagtaaaggaggaaattgccttgtttttttttttttctgaaacagtgaactagaaagtggctactgcaaataaaggcagagattgttagattatataaaaaggcaagactcaactatatgctggctataaggaacttaactttaaatgtaagcatacagattgaactaacaggatggaagaagatataccacactaatgctaataaaaacaaagctggtttgactatgttaatatcagacaaagcagatttcagataacaaaatattgggataaggacaacagttgctaaataaagtcagccacagggctggcagcagcatcttcggaaacaggcatcctggcactgcagacataatcgaccttgttcatcagagttaccaagtaaatctttgaggaaatcactgtagtccgatgtacctttactgaggcctaaactacagaaacaaggagggtgggagctctcagttgatctgaataatgcagggagaacttctgtgagaaatagtgtttaatccaagtaactagggaaacactgagggtggtaaactgcctgcctctgggtcatatttgactgcaaacatcttttatttgacctatacttttttctgtctgtatcatttatgatcttttaagctacatatagataaaatgcaacataaaatgatttaagccataagggggtgtattatctcacataccaggaaatctggaggcaaaaggcatccactgttggttatgtcagtgactttagattcatcctctctctggtcagcctatggcttccttttggttggaaaatgactgcagcaactccagcatcttatcctgatatgaaccaatgtccagaaatgaaataaggccatttctccctgtatgtctcattttcagagctaagaaacctttcttaaaaccttccagaatactcccttgcatcttattggccagaactgggtcacatgttcacttctaaattcatcactggcaaggggaataagaccatcatgattgatttgagctaatcagaatttacctgaatcatgtgatgaaggtgattacctgagatacattaggggctctgctatttattataaaagggagaaaattttccatttgataggcagtgacctaggcaatattatgtcttccaatccatgaacacaggatgtcttttccatttccttatgccttctattatttcaccaatgttttgtagttctcatcatgcaggacttttgcctccttggttaagcgtatttccaagtatcttatttttgctgtcattgtaaatggaattgttttttcttaacttcctttgcagatagttcactgtctgcctttgcgttttgaaaaaaggaggatctggcttcattaagcttacttttctgcatggcaatagacttttgagctgaatagcagctgctccctgtaggagggacatttgttctcccatttgccacagttcctatccagccagcttccctcacattccctgctcggcccctgtaggcatttcggctttcgacctcttgtttagatcatccacatgaagttacacattgctgcaattcattataaagacactggagtggtacaggaatagacagccaacttggcaactggacacaacacaaagctgattttccatgttcctgaaatttatattgaagcactcaattattttattggaaacattttgaatgggaatatttcagaaatatattttgtggttttttttctctaaagcatgcagaacgtaatataaatcatacctcatgatgcaccaaaatagacaataatactctactgtgctggctaataaagtaataggagttaatgaagtatgcagggttatttgtctctgtcctgtaaatggccacagatgcttggttttgagggctcttgcacatgctaggcatttttttcctgtctagaagttcttcttgttcctaacaatgcatttgcctgcagcaatctgctttcacttcctagttgatgtttcctgcacacggtgggctgggaccagatcaccacgtttgttaaaattatggaattcgacactggcaagcaaggtttgggcagtcactcaatgcttcagagcttatccatgggatgttggggaccagatgagcccactcacaggtgggggttaggggttcagagccaagaagaccaaagtcatagagctgattcagagtcggcagggcatcagggaagtctccttttccaggcagccactctttctaggagcagcctgcaggccagccctgcagcaacctggggagttatggaaatcctgaagcgtgcccaatagctgcggaaaccatgtgtcctctgtggcaaccatgtgtcctctgtggcattgaggctttctctgcatggttttgtttgtttgtttttnnnnnnnnnnnnnnnnnnnnnnnnnnnnnnnnnnnnnnnnnnnnnnnnnnnnnnnnnnnnnnnnnnnnnnnnnnnnnnnnnnnnnnnnnnnnnnnnnnnnnnnnnnnnnnnnnnnnnnnnnnnnnnnnnnnnnnnnnnnnnnnnnnnnnnnnnnnnnnnnnnnnnnnnnnnnnnnnnnnnnnnnnnnnnnnnnnnnnnnnnnnnnnnnnnnnnnnnnnnnnnnnnnnnnnnnnnnnnnnnnnnnnnnnnnnnnnnnnnnnnnnnnnnnnnnnnnnnnnnnnnnnnnnnnnnnnnnnnnnnnnnnnnnnnnnnnnnnnnnnnnnnnnnnnnnnnnnnnnnnnnnnnnnnnnnnnnnnnnnnnnnnnnnnnnnnnnnnnnnnnnnnnnnnnnnnnnnnnnnnnnnnnnnnnnnnnnnnnnnnnnnnnnnnnnnnnnnnnnnnnnnnnnnnnnnnnnnnnnnnnnnnnnnnnnnnnnnnnnnnnnnnnnnnnnnnnnnnnnnnnnnnnnnnnnnnnnnnnnnnnnnnnnnnnnnnnnnnnnnnnnnnnnnnnnnnnnnnnnnnnnnnnnnnnnnnnnnnnnnnnnnnnnnnnnnnnnnnnnnnnnnnnnnnnnnnnnnnnnnnnnnnnnnnnnnnnnnnnnnnnnnnnnnnnnnnnnnnnnnnnnnnnnnnnnnnnnnnnnnnnnnnnnnnnnnnnnnnnnnnnnnnnnnnnnnnnnnnnnnnnnnnnnnnnnnnnnnnnnnnnnnnnnnnnnnnnnnnnnnnnnnnnnnnnnnnnnnnnnnnnnnnnnnnnnnnnnnnnnnnnnnnnnnnnnnnnnnnnnnnnnnnnnnnnnnnnnnnnnnnnnnnnnnnnnnnnnnnnnnnnnnnnnnnnnnnnnnnnnnnnnnnnnnnnnnnnnnnnnnnnnnnnnnnnnnnnnnnnnnnnnnnnnnnnnnnnnnnnnnnnnnnnnnnnnnnnnnnnnnnnnnnnnnnnnnnnnnnnnnnnnnnnnnnnnnnnnnnnnnnnnnnnnnnnnnnnnnnnnnnnnnnnnnnnnnnnnnnnnnnnnnnnnnnnnnnnnnnnnnnnnnnnnnnnnnnnnnnnnnnnnnnnnnnnnnnnnnnnnnnnnnnnnnnnnnnnnnnnnnnnnnnnnnnnnnnnnnnnnnnnnnnnnnnnnnnnnnnnnnnnnnnnnnnnnnnnnnnnnnnnnnnnnnnnnnnnnnnnnnnnnnnnnnnnnnnnnnnnnnnnnnnnnnnnnnnnnnnnnnnnnnnnnnnnnnnnnnnnnnnnnnnnnnnnnnnnnnnnnnnnnnnnnnnnnnnnnnnnnnnnnnnnnnnnnnnnnnnnnnnnnnnnnnnnnnnnnnnnnnnnnnnnnnnnnnnnnnnnnnnnnnnnnnnnnnnnnnnnnnnnnnnnnnnnnnnnnnnnnnnnnnnnnnnnnnnnnnnnnnnnnnnnnnnnnnnnnnnnnnnnnnnnnnnnnnnnnnnnnnnnnnnnnnnnnnnnnnnnnnnnnnnnnnnnnnnnnnnnnnnnnnnnnnnnnnnnnnnnnnnnnnnnnnnnnnnnnnnnnnnnnnnnnnnnnnnnnnnnnnnnnnnnnnnnnnnnnnnnnnnnnnnnnnnnnnnnnnnnnnnnnnnnnnnnnnnnnnnnnnnnnnnnnnnnnnnnnnnnnnnnnnnnnnnnnnnnnnnnnnnnnnnnnnnnnnnnnnnnnnnnnnnnnnnnnnnnnnnnnnnnnnnnnnnnnnnnnnnnnnnnnnnnnnnnnnnnnnnnnnnnnnnnnnnnnnnnnnnnnnnnnnnnnnnnnnnnnnnnnnnnnnnnnnnnnnnnnnnnnnnnnnnnnnnnnnnnnnnnnnnnnnnnnnnnnnnnnnnnnnnnnnnnnnnnnnnnnnnnnnnnnnnnnnnnnnnnnnnnnnnnnnnnnnnnnnnnnnnnnnnnnnnnnnnnnnnnnnnnnnnnnnnnnnnnnnnnnnnnnnnnnnnnnnnnnnnnnnnnnnnnnnnnnnnnnnnnnnnnnnnnnnnnnnnnnnnnnnnnnnnnnnnnnnnnnnnnnnnnnnnnnnnnnnnnnnnnnnnnnnnnnnnnnnnnnnnnnnnnnnnnnnnnnnnnnnnnnnnnnnnnnnnnnnnnnnnnnnnnnnnnnnnnnnnnnnnnnnnnnnnnnnnnnnnnnnnnnnnnnnnnnnnnnnnnnnnnnnnnnnnnnnnnnnnnnnnnnnnnnnnnnnnnnnnnnnnnnnnnnnnnnnnnnnnnnnnnnnnnnnnnnnnnnnnnnnnnnnnnnnnnnnnnnnnnnnnnnnnnnnnnnnnnnnnnnnnnnnnnnnnnnnnnnnnnnnnnnnnnnnnnnnnnnnnnnnnnnnnnnnnnnnnnnnnnnnnnnnnnnnnnnnnnnnnnnnnnnnnnnnnnnnnnnnnnnnnnnnnnnnnnnnnnnnnnnnnnnnnnnnnnnnnnnnnnnnnnnnnnnnnnnnnnnnnnnnnnnnnnnnnnnnnnnnnnnnnnnnnnnnnnnnnnnnnnnnnnnnnnnnnnnnnnnnnnnnnnnnnnnnnnnnnnnnnnnnnnnnnnnnnnnnnnnnnnnnnnnnnnnnnnnnnnnnnnnnnnnnnnnnnnnnnnnnnnnnnnnnnnnnnnnnnnnnnnnnnnnnnnnnnnnnnnnnnnnnnnnnnnnnnnnnnnnnnnnnnnnnnnnnnnnnnnnnnnnnnnnnnnnnnnnnnnnnnnnnnnnnnnnnnnnnnnnnnnnnnnnnnnnnnnnnnnnnnnnnnnnnnnnnnnnnnnnnnnnnnnnnnnnnnnnnnnnnnnnnnnnnnnnnnnnnnnnnnnnnnnnnnnnnnnnnnnnnnnnnnnnnnnnnnnnnnnnnnnnnnnnnnnnnnnnnnnnnnnnnnnnnnnnnnnnnnnnnnnnnnnnnnnnnnnnnnnnnnnnnnnnnnnnnnnnnnnnnnnnnnnnnnnnnnnnnnnnnnnnnnnnnnnnnnnnnnnnnnnnnnnnnnnnnnnnnnnggttaaattagaggtagacatcccttggtgatgaagtacttttttcagtacttgtacccataagtttttctttgtccctttttttttttaaatggactatcactctgtcacccaggctggagtgcagtggcatgattatagctcactgtaacctctgcctcccaggttcaagcgattctcctgcctcagccccaccaaggagctgggactacaggcatacaccactatgcccagctagtttttgtatttatccattttttttgttagaatacttataaccatactgttcttttaaaataaaatttattctacataatagtaaatttacatgatgtaatttaaattccatcatttacaatggagagatgccagttacataatgtcgcagccctgccaatgatgggttttgctctttaccacctgggagcctgtgaataatttatttaccttatccaagcttccttttcctttctgcaaaccaggaataggactagcaacttcatagacggttgtgaagacaagctagacggcagatgaaagttcttggcacagagtgaacacttgataaactatatggcaggtatgtatgtactatctccccataaagcttactttaattgctatcatttctaaaaattatagctatagaatttttcatagcatttgtacacctatcacttaatttgggcttcacaataccctgggaaacaggtagaacagataatacttatttttctacttttctagattaggaaataaaagctcagaaagatggattcgcatgtccaaagtcacaacctcttccctcttgactggatccttcctgtgagcattgaaacctgctctactggctatcatcctaaatgacaaatcagtcctctttcaacccacgaccccctccaatatcccctggtctcaattgcccttggcagtcaagctttccaggactcatcagcgcgtgccgcctctgtgtcttcactttcagtttacttatcagcccaccccacttgacctttggctcttcattcatttgctcctggtaagagcttcacttgaagtcctctgctgtctctgactcttgccttagacaagtttatccattcttgtggtttcaaatgccatcccaaaagttaatcaccagctcaaccacctttgtgatctccagttagtgaaaagataagaaaagagaacctgaaccaggatgggtcaataggacaggaaagaaaacgaggaataggaaaaaagtttgtgggactcccaggacttagagattggagattgcatggctgcagggtaaggagggagagggagagtcaaaggtgacttctcttttgttgacattcacagggagggctggaacggggcttgtttgaagagcaatatgagccagggttatagacctgagtttggggtaagagtggaacatccaaatggaagagtccagcagctgaaaggacatttgttcaaaggcctttttcattacagttttctccttcttctgatccaggtatgcatccccccaacacccccacaattagggcctcccacatggcacttggtcagcttgagatacagaagtagaagggaaatatttttcttctctaactggggtagatcattattgcaacttatgccatatggagagcatcgccatggatagtgtcttttagggatttccatggaatttgagggctcctgaggcatttctgatgggtttttttaaaaggcagtaacaggcagaaatgcatgaccttgtcacctgagttgcttgtacatgacactggacagaacctagggagacctgatggcggagttggccaccccagagagtttctcaatgtctttttcatttaaaaagctatgggtttatgattctgtgaggtagatttgggagattctttttttaaagtgctgaagaattcaacaacctctgaaaactcacctttcccagaattggtcccagcaagataagattgtagttcatttatgtggccacacaggggcagcacacacaaactctccttttcttaaacaggtcttgattgtctttgcttttagttcccactgccacctcctagtacagactctcaacaactcacccaggtatctaacttttgtgccactcagccttcatcacttcatttccaagcgcaagaatacggaggggacacccactgtcagatgccctctgaccatgtccttgccatgtagtcaattacctgcctcctcatccccacaccttccctgctaacttcagtgtacctctgtctgacttgcctctccatccctggccaagttctcccacctgaccaccttctgacctgctgaccgctgtgtagtcaccaagattacctccaaaatgctgagtgctgggaacgtgacaaatctgtgaatagcacaaatgggaaggggtgggggggctccagctgtcaaggctggcagtgcccatcaatgggttgtgagccccatgctgggcaggtgggccctagctgcagagagtctgatcttcatcggacccagagtgacatccagccaatagctatgggtagtccactaattatactttgagaaacattgacttcctagctttgttaacttatctaagtctccagtttcttttcagaaatgggaaggagtcagtgcaatcttggaaactgagtgcttcctcagcacaactccagggggcgccattctcagaaagtacattgtgaatagcatcctctagaattgtgcaacagggcagctctgggaatcagattccaatcctgcacaggacacagaataaagaagcttgggacaggggctctggagaggacattgtaggatgaggatgatgctgcgtacactccacttttttcactttatgccaagtccaggtcacttcctcctcctactcaggagcaagtctggagttttcctagggatagggaagaagtgttgctaagtgcccttgagtgcctgctcacatatcaccggcctgaggaaagaggggaccagcctctgggcggggcccctggaaggggctgtccagcatctctaactattcttgtgctgtcctcagaccctacttagtcacagctcagggacctggtcttctgtgttcagggacctggaccggttctgccaaaatccctagtggtatttatgatttttcatgcctgcaaagggactggggccactttaggacatggagagattaggacacaagtgctcagtaccatgtagatataacatctcccactgcggggggtcttgggagaaccagcctgagaagttggtttcctccgcccgccctgcgcccccacccacctcacacacaccttttggcctccaaaaggctgcaggtggagtggacagaggatggaggggtgttaggaattggggagttaactgctcacaaggggcacataacatccgaggatcccatttgcggccgggggaatggcagagatcgccccccaggtctgcccggcgctcagggaattggtggcagcgtctatttcagagtttatggtaagaggctggagccggcacacacagacaacacaccccaccctttaaggaagtggggaggagagcagcaggggtgtggttaacaactcagaggaggagggagaatctaacctgtcagcccttttactcagccacagcctccggagccgttgcacacctacctgcccggccgacttacctgtacttgccgccgtcccggctcacctggcggtgcccgaggagtagtcgctggagtccgcgcctccctgggtgagtccctcccgcgagccagggctgagcgctgcgcccggcagaagttggaggcttgaccgggtggcaggggttggggacaattccgggatcctgggcacctgagctgggagttcccggagaaacggccagacccaggaaatcggagccgtgggtgctgtgcacatgcccggagctcgccagccttccgcggggaagaggggttctatttttggagtaaatttgacactatagggtgtttctccctctttgtcctctcaacatattcagacaggggaggctgggggaggctaggggtgacggtgtgagggcacagccaggctgctgcctctaaagctcaggttagggagccacggggtttcagctcctgcccccgctccccgctccctcccgggcccttccgcagccccaggggttatagtctcacccccagcccaccctgactctcctgcagccactccttgcacctgagaggtcatcttctgaatcaagccctggctggaggaaagcaagggtgttctggggcacaggggagctcgtgtgtatgtgtgtgtgtgtgtgtgtgtgtgtgtgtgtgtgtagttaacactggccattctggtatcttgagaagccgcctcctgagtgccactcaagggttaagttcagagctgcctctgcctgctgtcaggctgcgcgtgggcaccgctttgggtgggtgagcgtggagcggcatatgggtgatgttctgcaagccctgccacctgccctaagcctcgaccacatgacactggcatctccctataccccaaactgggagcaaaatccaagtccgctcatttaaggagccagcagaaggacaagagcagaaagttgtgcctagaggtggctttagccaggaggaactcggaagctgcgctgtggctgggtctgagcccactggggcagtgcacgtggtgtgatgtggtggtgggtgctgggaggcccctctacgtgggatgctctctgttcaccccaagtgctgttgctgaaggccctgtctttcccaaccactctgggggagggggaggaggacactgatgaaaaagtgactaaagacagaagggaggaaggaagtagtcacactggagagccccagcattggtgggacagtctgcagtcatccattcaggaggcactcactggcttcccacctgcggccaggtgcaaggtgtggggacaaggtgagtgtggcatggcctctgctcaccagggcagtgtgggataccgggtggttgagggagggctgccaggggaaggtgcagggtactatccaaccctgcactagagggctgtggggggagccagtcagcaatggccaggagggcgtcctggcagaagtgactccaaattgagagctgaaggatgactagaaattagcacaagagaagaggggaaagaacagcaagtgcagagactggaggctaaaagcagcaggaggctggaagcagcgggcggcatccaggaaaatgaaagtagctgggcttgttgggaacctagagcgtgcaggggcgaggggaagctgcaggggtgagtggagactgctctagaaggctttggaaggcctgccaggctgccatggcaacttctgttggagcaacacttgggacctggagccaggcaggagacttcccagcaggaagagattgccagatttagccaataaaagcacgggacactcagatttgaatttcagataagcactcaatggttttttttttcactacaaatatgtctcatgaactacatggaacatacttatactcaaacattattcactgtttctctgaaattcacatttaactgggtgtcctgtatttatctggcaaccctactctaggagaagctgaggttggcgcaatgctgtgaagtaaaggctggaaactgcccaggcactctgagaacagtctcaggtctatcttgtaaccattcctcctggattttattatgagctcatttaaaaaacaaaaaatcaattccttggtcagtttattcatctatacaggtgaaggagtatggtacctcagaaaaaacgacattaaatccagacagatctgggttcaaatccatgtagaccggtgagcttctctgaccctcagaatcctcttttctgaaatgagggcaggagtatctgtttgtgcaggtggttgggaggatccctgataatgtatgtaaattgcctagtgagtactaaaggaaacatggtacatattgaattttgcaacaccttcacagggttgagcaaagcaacagccacagagtgcttgggttcatttacttccacaagtgagcacttggaggtctcaggtgaaatacatagtagggttcatgcttccagtgagaactcgtggggttagcccttgggttggggacagagtctgcattatgtttttagctttgctactcccttcccatatgacctgcttcaaggggtggagatataacactcttcttgagggatggtgggtgggcagagagtgactcaaagtagaattaactgaagggaaatgtgaatgaattaaagtagagaatccagataaaatattcagcgcagacaaatgcgccatgaaatttggctgtcatgattcccagttttaggatgagttccttattagaaaagtagcgctaagagatagaggaagtgaaggtgccttatgaactggattttgactttaatgggagcatttgtaacaacaaattagggtcctcctaaaagggaacctagaggaagttaagaattcgttaagagaaagaggaaatggaaagtgtgtttcccttgtgggaacggctaggttaaaaatggtccttctttccagtggctaaatctccccatccccctgtgataaacattttgtccccaggcccttggattgtttgcccaggtggtgttgagagagaccctatggcgtgagatggatagaggtgttccactgatgaaacgttcaaatgagcctgcacttggacatgtgtcttgaatatttgcaagatcaaggttatgataagtcctgcataaaaagacacgtgtcattccctgaggatggctgtagagcccatgcacattctcagggaaacagcattccacattgagtgaaccttgatgtgagggcagtttggggaccaagcaggtcgttcagaaggcatagcccttctcataactctagccaggatggacctaattcattctagactaggcagtgtccaacttagagaagatcttcaaggaaggagcccttgcgtgcaacctttttttttttttgagatggagtctcactctgttgcccaggctggagtgcagtggcgcgatctcagctcactgcaacctctgcctcctgggttcaagtgattctcctgcctcagcctcccgagtagctgggattacaggcacgcaccaccacgtccagctaatttttgtatttttagtagagacggggtttcgccatgttggccaggagggtctcaatttcttgacctcatgatctgcctgcctcagcctcccaaagtgctaggattacaggtgtgagccaccgcgtctggctgtatgcaatctttctagcatcatgcatccttcagagacacaaactcccacctgtatcagcctgagtcttcccattgcagatccggccatgtttcatcgtgcagaggaccctggagaaagtccaagtcccttggcacttagctctccatagtgacgacagtagctccatgtaccccaaatactgctaggacaaaggaaactgatggtgaggctagggaggggagggaggctaccctggggctaccctgcatggtaggtcactcagtctctagtttcccctgcctgggacccatatgtctcaggaccatgtgaccctggcctcccaggtaaatggccacattgggggatggagtagaggtgcagagctgcgacgtgcccggggctgaaagtgtggtgatgaagataagttttgctggcttgaggatgaagagtttccttgtagagtacgggtcagttccagggttaaggagaaagagcagggatagtggtgactctgcaacactgatatgccttatctgtccaagcagtcggatggtcaagagctcaggctcagtcagtctgcctgggttccagcccaggtttggtaccccctgagtgacgttaggtaggtgagttagccctagcttcctatttgcaagatggagacaataacagggctttgggtgagggtggcatgagatagtgtacattagagagatattcaaaatacagctactaaaacctgagtacagatcaaacagaacagacaccaccattactctgagcagcgtcagagaggcccccttccatgccaggctcaccccgtcagtgcatcttgtggagtctgggggtggaagaaacaggcctttggagggctgtagcgtggacatatccaacgaggatggactgtttcgatatttcaacaacccagatgcacccgcttaataatagcatcttatgcacccactgaataataatagcgtcgaagtacaataaaacattcagtcccataattaggcagatgatatgcatccaataagtatgagctctctggtatctttacacatatggccatatctgagctggcggggcagcaccatttatttttccagaggttataggtcctcttctgcgaggcatcaggcagcttcccctgagcactctctcacaagcatacatcaggtattcaatgatgtttgtttctgcctaatcccactctcagttcactgtgttttggcaacagccagccctcattaactctttagacagcgaagagactgtctacgaatgcccagccggcactgaagtctagatggtcatttaaagcgttcagagagctgacaggtaggagaaaatggtggcttcactttctgggcctcctaactctgtgtacaaagctgcgagctgtgcaagggggcggcagagggggaggggatagctttttgagtcactctgctatttctcaaggaataattattactcatggtgacagtttattaagaagagcagacttgaggctgcatgttccgacacacttttcacccagatgcagcgggcaggttggtgtgaatgcagagtttaattttcaggagaccctccaggtaggccacagggggcctgcaggggtggacgctgctctgagtttagtggtcttcgtggcctcttaccttttcccagcactaaggtggttgctgcttttatgaggcagccagttagtgtgactaaaaccaagatcagcaatggccaatacctgcgggaggcaagccttcccgtttcctagcttggctgtgttcgctaacatcttccccctctccagttctctctcttccttttatgttctgaaatccacccacacagaatctggtaagatcactcactagagacaggagggctcaaagaatccacctcgcccagggtttagagctcggtaccaggtttaattcacatctcctgcatttgtcttcctttaaattggaccaattctcccaataattgtgggggcagacccccttttaatgccctttctttcttgagggccttgcacctgattctgtgagaacctgccccccacaagccatagcagtcccactggttcatatgggggtgattgatggggaggggtgtactgggaattctgacctgagtttgggttttgctcttctgggggttcccttctcacctttctcacctgggacggaatggcccctgtggtggttctgaccacttggagcaccatcattttctggtttttttttttcttttctttttttgagacaaagtctcacttgggtgcaggggcatgagccaagactacaggcacatgccaccacacctggcttattttctttctacaacctctacctcctgggttcaagagattctcctgcctcagcttcccgagtagctgagattacaggcacccaccaccatccctggctaattcttttatttttagtagaaacggggtttcaccatattagccaggctggtctcgaactcctgacctcaggtgatccactcccctcagcctcccaaagtgctgggattactggtgtgagccaccacaccctaaattaatgtactgatttagggtttctgatttctaaattaatgtactatgtccatcccactgctctgggaacctcaagtgcttttctatgttctctggcagtatttggagtcaaaacccaacccctctcacccagctccatgtacccagtccccgcccccaggtcccaccccaggtaggttatgagagatctgatgctgctgcactttgcacctctgcagaggctcttggcaacatccggtcacatcccctccgctatttaggcagatgtttggtgctggcagacagcggtgccaaccaagacagctgcaagtggctcactgcaagtttgaatcccagcccctagctcattacaggcagaagctcaggcagtttttcagcccgggcaagaggaaagagagtcagagggcaggaggcctgagctttggtgtagattctctcacctgttaactggggtacattggctaaatctctttcctcttcaagccttccttttctcatttgaagatgaagaattggtactgcctccctaatagggtaatggagagaaatacttgactgtgtgaaaatcccccataaaacatcacaggcattgtcccaggaaaagtgatgaatttgggatcagaacgtggtgggtttgactctcgactctgtcatactctgcctgtctgacatcgccaagtgatagaacctctctgagccttactttgctaatttgtaatttgttctaggcacttgttgaatgtttctccccatcaccccctttactctcagggtatagtttttcttcccccaatttttttttttatctcatttcgagacagaatctcactctgttgctcaggctggagtacagtggtgcgatcacacctcacagcaaccttgacctctcaggctcaagcaatcctccggcctcagcctcctgagtagctggggccacaggcacatgccaccacacccggctaatttttaaaatttttgtagagacgatgtcttgctatgttggccaggctggtgttgaacacctgggctcaagcaattctgcttcggcctcccagagtgttgggatcacaggcatgaaccaccacttcttccccctaatttgaggaattatatctgtcctcacaaagtttatagtatggtaggggaggcaatacatgaagataaagaactgtaagatatttatttaactctaagttacttaaaggtaaataatgtgccataaaagaggcacgaagtgctatgagattgcagggcagagattccttctggctatggactctgggaatgcttcctggaggagacggcatttggcaaagctctgaaaggatagacaggatacactgtgggaacttgagatggtggctgtagtcaaagaagagtataaataacagcagagagatggagaggtgtggtttgagtgactcattttgggtggaaccaagagtggcaaaaggcaatcagagttgggggtggaacggaagataaggcttggacagggaggccaatgtgtttgggagttatcctggaagtcccagacagccatggggctttattctgaaggcagtaggagctgttgaccatgctgacttcggtggaggtgcgagggtcagattctggtgtgtagagtggatgagagtgaagagagcttgaattcgcaagggagcagataagagagtgttgtaatatttcaggcctcacacatctgaataaattgcgtaactcagatactttgcggtcctgtggagcatgcaggcatcccctggaggcttctactttctctgagctgaaattggttctttgatgaatttgagagatatataacttatgagaacatccatgagaaacccaccattcctcttcacctctgtcttccatattcttgattcccagcctggccgcttccccctgggcctcccctctgctaggagtgtgttaaatgccaagcctgtctcaacctctatctggcagcaccttgaagtatcaagtcaggaatatgcacttagatccacaggccccttctccatcatgtctccggtgaccatccagatgtgatgattcccaggaccctccctccctcccttagccctcacttctaagagtctgtaagatattcccacttgaggagcttgtcttcttcaatgctgtatctcagaaattaaactcctccttttctcacgccaaaccatctctcctcctggcttctctcctcttcatggggttgttcatctcccacacactcaggtcagaaaccttgctattgcctcccctctttccacgcccccacttttttctgctcatatcttgcccatcactcaatcctgcagattctttcttcatgcctttcattccttccttcccgtttctatggcccctactctgacccaaatcatattacctaatattgcttcatatttttacccaagagcttcgtcctatctctggttcccttggaagctccccaatgcctgcaggcaaatccagcccccttaaatttaccattcagtgcctcccataatccaaccttgatctgctcttctaactaaactttccccatacccaaatgaagccccagccagcctggtgtgctccccagtctctggcaagcctctgctcaagtcctgtgttctgtttggaatgccagccccatgcacttcaccagtcctacttactcctttaaggctcagtcggtgacccacccttttggaggacatctgagctccccatggcagcttctgggcttctttgcatcctgggatctcccagaatctatttttcaacctgatgctacattcctccacagcagggagatgccttttattttgttcttcttccttataccgtcaaattccaaggatagaaaattgcatttccctgggcctgtgaaaagggatccctccctccctgcacactcatgcctggctcacacggagtgagccagacagcgcttcctcattccccgcagtgggtgtcgcaacagccagttgcaactagaataggggccacatcccgagtctcttgaattcttgccctgtggttaggatgcccttcttgcctgtcctgaaggtggagatttcctacagccgagagagagggagtcagcagtctagggcaggaactccatcatttctttattaaaccactcctaactctctctaatctctgtgagtcttgcctttcccttttctctcctcctcctactgttgagtacaactaggccaggctgaatgagaggagaaagatggggaggaggaaagaagttaggcagccttggcagagggtgcaatgctccgggaaaatgggagagatttacaaggcagagattgacagtttttagtaacttgactttgacctccagtgtacacagacatagccttggctgctggactctgagctttctggccctgggaagctcgagatttgcaaacacttgttcgacaatcacctcgtttatctgcattgtcaccagtgcagcctctgagccctctccctgtctttacttgaccctgtatagaaaaatgctttcagggccaattgcagtgactcatgcctgtaatcccagcactctgggaggccaaggcgggcagatcacctgaagttgggagtttgagaccagcctgaccaacatggagaaaccccatctgtactaaaaataaaaaattagccggatattgtggcgcaggcctgtaatcccagctaccagggaagctgaggcaggagaatggcttgaacccagtaggcggaggttgcagtgagccaagatcatgccattacactccagcctagctgggcaaaagagcaaaacactgtctcaaaaaaaaaaaaaaaaaaagagaaaagaaaaatgctttctgcacccaacactgaagactcagccccagcctgtgttcatgccctgggggtccctggaagagggcacaggagctgccctgagcctaggagccctgggctagtcactgcctccttcatatcccaccacatgctatggggtgagtcccctgggtaagcctgttcaagcctcctgttttttatttgtatgtgcaatcagggggtgtggggactttttagcaaagctttcttcaaagcagatcttaggcaagagcccaatataaaccaggcaaaaatattcctatccagggttgaagtgagaaggcgaggtacctaccaggcccttgagtcccctccatggatctcctggggtgcaggtcatctggaattctttccgggtctcaggctcgtgaggtgctcattgtgtatgtgtcatgggagctggagaatggctgtaggtgcaaatggacttggaaaagaacaatgtcaaagtcgtaagtccagcctggggcatggcaggtttatgtatgtgtgagtggcgggaggggctgtagatttgaactccctgaaagaagatatgtgtaattcttaccaaagagtaaatgcatatgtttatgaaagaaagttcattgctatcatctggctctccaaggcacctgtgaccccaaaagattaagaacatctctcataagatattatcatccgttctacaaacctttcataaaaatgacctcaaacttgagctcctttttaattcagacaaactaggccataagccctgttgaggaaagaaccgtatctgtatggagagtcactgttacatcccaaggacacagcctggtacctgacacacagctggcattgagtacgtacaatgtgtgcctgatataaggcagctctgttctcccaataaggagggctgctaaaaaaaaattaaaaagcttattttcatatgtaaactttgtaggataatgttgaatagattattttagcgatacattttcaatcacatgctaataacaatacattaacttaaatactgctttcccccaactctcccagtttaggaaacattgtaactgttcactcccatctctgacatcagtgtccttcttgtcaccagaaccctttctgcatcagctcttcatgttctgtgggcatcatagtccctgtggtctaaagagagttagctgtttcaaattgatccaaaaggagtttatttacttatttattttttatttttgagacggagtctctctctgtcacccaggctggagtgcagtggcacaatctcggctcactgcaccctctgccttctggattcaagcgattctcctgcctcagccccacgtccccaccacccgtcccccctccccccgccactgccagttttttaataaccgctaattaatacttattgatgaatagtagttttttgagatacaattcacataccgtaaaattcaccttttaaaaatgtgcaattcaatgagttttagtacgttcacagagttgtgcaaccatcaccgctttttttctttttttgacaagagtcttgttctgttgcccaggctggagtgaatggcatggtatcagctcactgcaacctctccctcctgggttcaagtgattctcctgcctcagcctcccaagtagctggaattacaggcacctgccatcatgcctggctagtttttgtattttttagtagagatggggtttcaccatgtcggccaggctagtcttgaactcctagctcaagtgatccacccgcgttggcctcctaaagtactgagattacaggcgtgagctactgcgcctggccctccatcactgctatctaattgcagaatattctcgtcactccaaaaagaaacccccgtaccataagcagtcacaccgtgttctccactcccccgtcccctggcaagactaatctactttctatttttatggatctgccttttctggtcattccatataagtggaattgtacaacactgtggcctttcgcgacggctgctttcacttagcacaatgttttgaaacttcctccatgttgtaacatctattagtacttcgtttcgttttgattgatatttattgatgagtaacattttgttgtgtggatatgccatattttgtttatctcttcattagtaaacatttggattgtttccactttttgaccattgtaagtactgctgctataaacattcacatacaagtttttttgtggacatatgttttcatttctctgagctatagacttaagagtggagttgccgggtcctgtgataactctgtttaacattttgaggaactgttgaatggtttttcacagcagctgcctcattttttattcccatcagcagtacttcttggttctaatacctccacgttctcgccaacacttgttgttgtctgtaatttcgttgttagccatcccagtggggatgaagtagtatcttactgtggttttcagttgcgtttccctgataattaatgatggtgaacatcttttcatgttcttgttggccatttgtatgtcttcttgggaaaaaaaatgtctgttcaaatcctttacaaagtatttattttttatgtcaacaatataaccactcagtacactgctttttagacaatgatcttttaaaggtttgtttacaacatttagcacttgaaattttaaggttatgccctcaaaaaaattgctgagggagctaagctatgaagatgcaaaggcataagaattatacaatggactttgggggaatcgagggaaagggtgggaggggggtgagggataaaagacaaattggatgcaatatatactgctccagtggtgtgagtccatcaaaatctcagaaatgaccactaaagaacttatttatgtaaccaaacaccacctgttccccaaaaacctatggaaagaaagaaagaaaaaattttaaaaagaaaaattgctgaatctatattatagtatggtggttgcttttcataaaaaccaattcttttaagtaacctttgtaagcatcccaaactagccttgattgattggagtgctaatacttttcccaaacagtatattgttgttcaaaataagataattgagaaagcaacccataacatgaaagattctgtaagggcttggatataaactttctcctttctgacagataatttgggaaggtagagagctttacctcctattcaagcaaatgtgatatttaaaaataagtagatggatgaatggacaatggactcatgaatgaatgaacaaaagaagaaatgcaagcaagtaaaccaatcaagcaaccacaccaatctttccctctttatttaggattttctaatccccacttagtaaatcagccttggtctttaatttacattttatggaaccatatataaaattgtttaaaaaacaagtttacagttacagattagaaacaagacactgtattttctgtcgcctggaatatctttatcatcttcctttaaaaatgggaagaaactaaggctgcgcagggtcctggaggcagttgagagactcagacatcaagtgatgtgattgcaggccttggtccagagttgtaagtcaccagagtgggacctttaggcttgtgacatgataacaaggattttcttgggtgggccccccagctcttcattgctctttccatcagcacaaaggcttctgggttgctgatgttttgtgtggtggccctggaggtctctccttctaccttctctggggtgagacagtctgatccatctcagaggccacactcaccacctactgcacagagacacagccccctccccatcctttaccattggtcctttcttaagaaaatgtgtcagctggcaaatggtactctggagtttggggtaagagagagaaagaggaagaatactgggcaagaaggtaagaaaggaagctgtggcctgacatgggcacagagacatgggcgaaagcttgagagatgacctttaaaggctcagaccccggaaagggaagaagttgggacaatggaaagactggcagggtggtaacatagcaggcaggctctggcgtagttgactctggattgtgtatggttggagttggggatcagggggtcagggacagtacacagcaatgtggacatacatggcctggactcctttcctttactgatggtggttggcaggttcagaattaggagttcaggtcagcatctttcagagaagcattcagatcccttctgtagaattttagtccattcctgggcaggattccagtgtttccagtgacagtgacacctagtcctttcttctgtgcctgtcggtcaggacggagtctcacctatcctagcaggtggctgttttcctttcggctttaaacatctgcaaggaatgagtctatgtgcttccttgaagccatgtttcctatttttgagaatgtagaattggtggctttgacatggtgaatctaaagcccagctccacatcacttagcacctgctgtgggccaggtaccatgcaaggcatgagtggtttcagaggtgaacaaggggtactattctcaagatgaaacagtaattcaggcagccacagtgagaccagatgttctgcatgacagtggagcagatgccatggaggcaggaaggccagagctaccaactttaccaagaggtggcccaaaaggtggtgctgggaaggattttgaagaagatatgtgtgtgccaggcaaagggtggttgggtgaggtgctttacaggttgagagcacagcatatgcaaagataagaaggcactgaagaaatggggcctgttttggaagctgggaacatctcagggtgtctggatctagcaggagcacggtggagataaggcgagaatgctatagagacccttgatctgggtggcttagtgttggacatcattctccggtgacaggaagcaataggatagataggataggataggcagttgcaagaatttttaagcagggaagagagtcagatttttgtttgaagaggactttggccccaggccacaggagctcttgcaccaagcatggagaagccttggctgggcatgggcagacaggcatttctggggtgtggccagggctgcaggcagggctgagctggtgcagcaagtgggaggtgccagccctccaggggcatggcccaggctgccaactgctgcttgggcattgaagctgtccatgctggccgctggccagcagggctggtgaaggaagaacccacttcctgcctcttgctgctgtttgcgtatgtgcagtggggaggggggcagacagaacagacagggcttggccaggcgggtaagaaccagccagctgtcagcaagaggtgcagtgggagagacggatgaaggggatacctacctggagagcaagggggtggcctggcagctatttttgccccaacaattgggctcagctattccatcgggatgatgacacacagaggatgttcaggagtagaaggcgctgtggtggagggaagggcatcctcatgttctacctccccgggtgcccctcctcccagagctcttggctgtaccatccatttgtgcctggcacatgttttcttgagataaaattatttttcacaagtacatgcattgctaaatgggatgaaggaaaggcgggcccccgtctcgtgcccctttgtctcccaatcataatctagcaaatgtcaggatacggagctcacactccggaaacatttgttcagatgcggagaagttttagggaaaagattatcaaggaaaaagtgcttgttttgggatggtctctgatacctgtggaaatgaggggcatcagagagattcagataagaacaagatgcacaaaagctcatccactcccaaaagagctgagtgagtggaggactccctggccccaggatgcggccacttcagtggagggtgttctgaggggagatgtgtgtcatgaccaaggcgggcagtccttggactcactgcagcccttcagcatagcatggagtcagtggcatcagaatcacttgcagggctgtgggggggttttgtgtgttttttgtttctgacagggtcttgctctgttgcccagcctccagtacaatagcatagttatacctcaatgcagcttctacctcccaggctaagcaatcccctccacctcagcctccctagtagctgggactacaggcacccaccatcacactcagctaattttaaaatattttttgtagagatggagtcttgctctgttgcccaggctggtcttgaacccctggggtcaagtgatcctcctgtcttatcctcccaaagtgctgggattacacaggtatgatccaccccacctggctgcagggctttcaaactgggctccaactccatagtttctgccacagtgcatctggggagagcaagaattgtacttcccacagggttgcaagtgatgtggacgctgctggcctgggaaccccactttgagaaccactgcagtggaggtcccccacagggatgtaccctcaagcacctttgcaattccattccttaggggtgtgtatcagaaccccctactccacgggtgagattttgagacacttctgtgcctgtctgctgttgtgcccaggcagtcatttcttcttctctttggttttgctttactttgttccttttttttttttcttgagacagggtctcactctcttgcccatgccagagtgcagcagtgtaattatagctcacttcagtctcaacctcccaggcccaaatgatcctctcacctcagcctcccgagaagccactgagcccagcctgctttgttcttaatgcttcaaaaatagttttggtgcccaccctggttgaaacaacgactatgtttcctttcctgcccacagcgccctgacgacttggttggcttccccagttttttgtcttcgttcccggtgttctcgaaggcaagactgcctctcccaggcttcctaaattcccacctctcagattccttcgaaccctccccctgtgtcacctctgccatgtgcttctcccagcacccccagttcatcccgtctgtgctcctctgatcccacagtcttcttcctgactctgttaggactttccttctgccttattttatcattcattggacatgtgccttccccacttacactatagtcctgaggatggagtcctggctcctttatcccccctcagtgggtcacatagaagatgtattccatccatatctgctgaattgcagtgagaagggcctgagaaacaaaccaaagcaaaccgagacctgtttacattggcccttgctggacaccagctctcgaaacgcacctaccaaggcctgggtgatggggaggaggaggcgtttgtgaagccacccctgagctgatgtggccgagtgccagggtccgatgtgctcatcaaccttgaaaataatttgattactgatctgtatcgctcagggatctaccacccccagagctgtattaagaatgttttcctcaggcaacaaatatgcgggctttgacatccaagtcagcctcaggaatttcattttatgattgatccttctttgtttgtttgttgtttgtttgtttattttttgctcgttcttgtacatcttccagatccaccttcttcttctggatctctcagttgacatacagccaagccctcccactgctcccttcccctctcaaatcatttccaaacatggttcctcttcctcaagcctgactcaaggtcttgctcttttactttgttacgaaagtcacaaatgactttgaaatgaagccactggtgttttccaggcagatggggtcccctaacctggggaccccatgtagtccccaaagctctggagtgttccagataactgtctgggaatgactgcccttttatgcttttttatacctgtctaatgacatatcaccccggaggggatgcccagctcacagaatgcaccttcagccagtctcagcccaatgccacagaggtgtgcttgacaaccccattcaacctttaccttattcattcactgttaccatgtcgcctgccttctgacctttctcctttaaaaaaatttctttcgccaggcgtgctggctcatgcctgtaatcccagcacttttggaggctgaggcaggtggatcacgaggtccactctcagattgagagcatcctggttaacgtggtgaaaccctgtctctactaaaaatacaaaaaattagccaggtgtggtggtgggcgcctgtagtcccagctacttgggaggctgaggcaggagaatggtgtgaacccaggaggcggagcttgcagtgagccgagatcatgccactgcactccagcctggatgacagagcgagaatccgtctcaaaaaaataaataaataaaaaataaaaaaataaaaattttttcatcagtgctgtaactaaaggaaaatgcactaagtttggagaaaggactcctagactcagttcctgcctatattttactctttagggaaatggcacacccctcagcccatgtatttgtgcgccctctcccacttctctctccccaagacctcccctccccagcatgaggttggaactgatattattgctcttttaaatttggagcaatatgtctccccgtggagaaggacgaatatctggtttgcacacaattattcacactatatcagcaaggcaggtcccaagggttagaagcgagggcttctcaaggtgtggcccctctacttcccagccatgtgacctcagcaccttctgacccctcccatcctcagctttcctgcatgctgaagggtgacaaccccagtgttttccttaagggatattgcaaagattaaaaggagatcatacacatacgtatataaagcacttagcattcattggtgtgctgcatgtaataagtattcaatccatgtagctgttacttgtattgatggcatatattactagaagacagaaatatagataactaaggtcacccaggatcccacccctcgtccgcttgatggcacttggcaggaacttcagcccctcagcctggggctatcttggtctgtctacaccaggtgtaaactcacttccttgtgcttctgccacctctgtactgttgcgtcttgtttggccactttactccaggacacacaactcagccccttcaccaatgatgccaagaagtctcagaccatacagaacacttacaatttttcttggaggaaggaaggagggaggaagaagagtattagggagagaggccgggcatggtggctcatacctgtaatcccagcactttgggaggccaaggcgggtggatcacttgagatcaggagtttgaggccagcatggcaaaacctcgtctctactaaaaatataaaaattagccagacatggtggtgggcacctgtaatcccagctactcaggaggctgaggcaggagaatcgcttgaacccaggagccaaaggttgcactaagccaagatggcgccactgcactccagcctgggagacagtgagactctgtctcaaaaagggttagggagagggtcagatcatgggggcattcccattccactacttctttggcttcctccttgcttttatttctccctcttttcccagagcaatgaacaaattataccaccccagcttcctcgggcctcatcttctaactgcaatgatttagtgagcacatgtttctaaatagttttcttcttaggaggacttctgttaccatctcctcttcatcttttatacatttaaacacatgccacatccttggggcagagctgcccatgttgacatctgggccacagcgaggacctgcctatccctggggaatggtggggctgctctgagtgaggggcttagcagcctggaggacaacccctcttggagaatccccctgattcccctgtaaaggcaagctgagccaggagtggggtgtggatgattctgtttgtgaatcctgggaagtacttgccttccccagcctgcagatatgacatttggatgatgggacccagtaacctatttgtgcagacttctatgctgactttctgatcaaaggaggagatgagaggtaggcagcttctatgacacatgggtgattccaggcatggaaaacatacgaaacctataacattaatgggaaggcgagtcaggtgaaaatgtgtatatgtgccccagatccagtagctgccatggaggaaaccaggacctcatgatcctggaggccacagtgaggggttggggccatggtgaggaacttagaggagcaggagatgctcacaccactggctacaaagtgactgagcctgtctgagacaccagaccaaaggtgtccaaactccttgctccccaaaaaaagattcatgtctcacccctctgccagaagagctgtttctcctactcagatgttcctcattccctcttgcaattttgaagttaaggagaagctgattcagctacaagtctggttgctcaggactatggcatatgttacaggtagtttgccctctttgagctacagttttccatttgcagacagggaagagctcataaaagaggttatgtggattcatgttttcactctgttttcttaaaagtacttgctttctttgcggggtgctgtggctcatgcctgtaatcctagcacttgggaggctgaggtaggcagatcgtttgaaccaggagttcaagactagcctgggcaacatgacgagaccctgcctccacacaaaaaaaatacaaaatacgaaaattagcctggtgtgggggcacacgcctgtagtcccagctactcagggggctgaagtgggagaatttcttgagccctggaggttgaggctacagtgagccgtgattgtgcagctgcactccagcctgggcaacagagccagacactgtcttgaaagagaaataaaagttgctttctgctcttcatgctgctgtgagtgatggaggaagtgacgagcagtctcctttcatcacagaaaaatggaacatcacaaaggaccagaaatatccccattgaacaacaaattatttgagggaaaagtggggcagaccactaaaagtcatccagcccaaactcctcctcatggagaaaggtatcttttccttgagcacctgttgggaatgtttcgtcccaacacctcattccaattgttggataactcatggctggaaagttctttctttcactgagccaaactgtctgaagctcacgctcctttggtgctgaactgcacttggcaatagcccagaatgatgactgttttgcagtttgacagccctcagtgatagggagctacccaccgcattatcccctgatctaggcttaacatcaagagttacttctcctcttctttgcatgaggtgggttttcagatgtcgtgcctttctggctctccacttctggatcaatgattctgttgccatcttaaaaagtcatggctaggctggacactatggcttatgcctgtaatccaagcactttgggaggccaaaacgggtggatcacttgaggacaggagttcgagaccagcctggccaacatggtgaaaccccatctctactaaaaaaaaaaaaaaaattaaccaagcatggtggcatgcgcctgtaatcccagctacttgggaggctgaggcaggagaatcacttgaatccaggaggcagaggttgcagtgagccgagatccacccacctcggcctcccaaaatgttgggattacaggaatgagccactgtacctggccattcttatgttagtttgctcaactgtcatcagaaagtaccacagactgggcagcttcaacaacggagatttattttctcccggtactggaggctggaagtccaacatcaaggtgtcagcagggctggtttcttctgaggcctctctatttggcttgcaaatgccatctgttgcctgtgtcctcacatggtcatccctctgtgtgtgtctgtgtcttaatctcctcctcttataaaggcaccagccatactggattagggcccaccctaatggtcccattataatcaccactttaaagaccccatctctaaatacagtcccattgtgaagtactgggggttaggacctcaacataggaattttgggggacacaattcagccagaacattctatcttagcatcatctagccaagctgactttacctagtctctgcaatcactatatttctacctctcatgcatttgaccccactacctcttgccttcctcccctgcttctctttcaaagctgctcttccaagaagctctcatgccaagcaggtgtccagtctgtttaaacacccacagagatggggagctccttctctctgaagcagcccattcttctggcttcaacagcatcataccctagcaatgtggacctggagaggcctcacgtttcacaaacccaaggtgcttttcaattcagataaaacaatctccagataagtaaaacgacctccagataaaatgagaactgagtaacatatgggaaaaaaacagaaatatccccaaagttgaaaaccagtgaaactggatgcctgaagtctgtccactctgagatactcttcttggggagcagctttaagccaaatctggcccttttcctgtgttacgaatactcaaatgtttctttgcttgtttccagccgtgcgggagtaccgtggtctctgccctgtttcctctgcatgacaggactctcctaaatttcacttgccaagacccctcggtcaaagtaaaattaacagaaccccctgttcttcccactctgctttccagctcttcccggcgtgcacacacacctcctggaactccagccttgtgcatcatcttgatgccgtcgcctagtaacgatatgcttagcaaccggtaagggaagtgcgatcgcacctcccagcactgtatgtgaagcactgcagacaatacaaacagttccctggttctctttgcagctagaggaaggtaattgtcagaggtggccagcattatgctccagagatagtggctcatcatccgggggcccaaattggttgttgcttggcttctacttggcattgggcaatatctttgtgggggcggctgggtaggtggttcttgaagggccggatctctctgcttgcacttgttgtcaggatgccagtgatgcaggctgggcagcttgcagaatcctctctactcccacgcagccctgccctgtaccaagccacatccccctgcatcccaagccattccccgctgcctcttccatttggaggctgttcttctatgccctggcactgcacaggcctccaccttgcagctgacctgtcctcccagtacccatgcctctgtctttccaacaccccatcaggcatgtttctccctcatcactatctctcacgttcctatgcatcccagcctcagaccactgggtctgatgccaaacagaggggactgaggcccacctcctgttctcttctggtgtccttattagaaattggatcattgtgacttaactaaagtttccaaggtgtcatgttgcactgagaaaacaacagagaaggccagagagtctagagtctaaaagtgtatttccaatcccagatccctttttctgtttgttttttggtcttaactgtatgacttaggtcaagtttctttaacctctttaagtcttaattttctagaggggttggaatatttgcctcacatggctaggatgacaattacataaggtacaaatagaaccccgtaataaaccacatggcatacagtcagagaacccgttaaatatcctcttcctgtccttccatctctgcctctttgttcttcctttcaaacttcaagctaaagccagttttggagttggattctcagaaggcagcacagtgcattggcaggaatgcggggcagggggtgaagacctcagctctgatcctgggccccacccccaacagccccgagattcctttcattcccctgtaaaatggagcgaagagcacctggcatgtctcatgcaaagagctgctataaaactcaaaggaaataatattcatcaatatcctgtacacattttgagatgttttacaaattttagaataattttctcggacaaacctggtctcatttttgcacctgtaaaatgaaatgagattccaacatgcctaaaacccccttaaatcctaatattgtgacaaactgagaggtgatggttgcttgcccttcaagggccaccctagacaggacagactccttcatcacaggcagtctttgtcctaaagttgtcaggatagattgcagcaatacttccactctctgttcacagggtccccttgaccaaggtggctggttatcacccggtcaagacttcagcccagtaacattctgcaggcttctcatcctagcatggaaatgtatataactctgttctttcagtaagcaaaacaaatgagtcagagcatactcaaagcatgataaaggtacggggaagcaatcgctagtgtaggtgtttgaagtttatgtcatggatacttccatggtggctgtgtatttagtagcagcctaaaagacagtggaatttgcaaatggaggatacattaagcaagaaatttaaaaaggcgtaacgtaagtcacagtaagtcaaacagcagagggacaaacaaatagaatttggatgttattgaaaccttgaaggttgggagtctggccatgagccagagacatttgcattctcttctgagagacttccccccaggcaattatagggtctccaaataacagagcatctcagcagataagataggagattcagagctctcaaagctctggatttgtctggaatatctatttcaataacctttggggagaggggtgcaaccccactcagggaccttgctgttatacattctccagtcccgtgacttcagggcaaagatcagtagagcctcccctcctgttaataagtgggggaactcctgcttcgtaataaagttgcaagaggtcggacataacacaagtgcgaactgttaaccccagttgtaactaactttttaaaagtataggtatttggggctgggcaaggtggctgatgcctgtaatcccagcactttgggaggcctaggcaggtcatcacctgaggttaggagttcaagaccactctggccaacatggtgaaaccccatctctactaaaaatacaaaaattagggtgttggtggcacatgcctgtaatcccagccacttgagaggctgaggcaggagaattgcttgaacccgggaggcaaaggttgcagtgagccgagatcacaccagtgcattccagcctgggggacagagaaagtctccgtctcaaaaaaaaaaaaaaaatatatatatatatatatatatatatatatatatatatatatatatatatacgcgcttggagcacgcacagtggtgcacacctgtagtctgtagtcccagctactcaggaggctaaggtgggaggatcacttgagcccagaagttccaggtagcaatgagctataattataccattgcactccagtctgggtgacagagcaagaccctgtctctaaaaatgaaatatatatatatttcacaaggagcagtgggatttaatctatgttcttcctggacccatagaatagaaagtcatggaatcaaagaatattaagccgataggaactgtaataatcacctggtccaatccctttaatcacgggtgagaaaatggtctccaagatgttagaagtgattaatctgggattgtagaaatgttccatttgcctttaaaataaaaatacaaaaataagaaagcataaaagtgacttacctaaggttccacagccacacagacaaagaatttgtctagaccctgaatctgttgacttccatccctctactggtcctaatggattccatctgaggctagaactgagtttccaaaaatatcctttaccaaaaaaaataaattaattaataaataaataaaagtgtactaatgcctccaactagtctttgcaatgtaaaactttccattttcaacatttcacaatctccaggataatttcatcaacattatcttttgaataaaacatagacttatctatggggaaacattacacctaaaatgtcagcagtcagcaaatctctcaaaagacacctggttatgtaggattaaaaccacccgttgaagggcaatgtgaaaatggaacctctgtttgactttcgtaacccacttcccacgtagcccatccactggagggaaagagaaactgctaatgggatggtaaaagcagtttgaatgccatcccccgcagaagctcctgtctacagcttttgttcccatggtctcttcaataaatatgactcaggctgctgtttgggcttcacttcctctgggcagggagctgacagcagcggctctgctgtgcccatcatggttgactcaggggacccacggcgggggggctgcctgtcctctccccagctgaccaaacacccttctgctcttccaagcgctgctgtccctgactcttctagctttcaaagttctcaccaattcataaggctggtggctccccatcaccccattactttttctaaagcagtgctgtgcacgtatcttgataagctgccaaagtgcttttttcacccacctactcacctatagaattcatagtctccagtgtaggcatgacgcatggaaggccaaggaaaggccaacatgtgttcctgcaaaaaacaaaagcaaaagacaggaaaagcctcccaaccatctcacctcttctaaatgcttgttggagcaagaccacaatctacttaacgtcttcaggggtggagggggggcggtcatctgggccagcctacacttgtaaacttctttttgctatagaatcagctatgaaaggagctttcacttatttggatacacattatttgatatggtttggctgtgtccccacccaaatctcatcttgaattctcatgtgttgtgggagggacccggtgggaggtaattgaatcatgtgggtaggtctttccaacactgttctcatgatggtgaatatgtcttgtgagatctgatggttttgaaaaacggaagtctccctgcacaagctctttttgcctgttgccatccatgtaagacgtgacttgctcctccttgccttctgccataattgtgaggcttccctagccatgtggaactgtaagttcaattaaacccctttcttttgtaaattgcccagtctcagttatgtctttatcagcagtgtgaaaatggactaatacattattattctaaactcaaggggatggattctagaacaagaactgtagcattttacataacaagaacagttacaaaggattgaataaagagtatgggggtctccttcacctaagccagcccaggctacagtcacctaaaggatacagagaagtggagaaccacattttcacgggactgctcatctagtcttgggattaaaggggattaattgcaaaaatatttagttagcaatccaaaaatatttagcgtccactacagaagagacccagaagatttacggtataagtttgccataagctacataccagttgggctgttaatgttgggggctgtgtttttctccaatactcaagggcagtagggagtggatggggagataccacatcaggctagtcagtcacccttggctttgggatggcactccttgtccaagaaagtgctgttttttgctaggacatctcagatgcagggtgcattgcttaccaatctgctgtgaaattttctcctccttgtcctttcttcatatgggataggaaaggcccagcttggcctaactatgccctcacacgctgatctgtgagtgtgagtaaacacagctcctaactcattcactcatgcatgctcgctctctctctaacacacacacacattgatcctgtggtcaccatagcacagccctgtatctacctagtaatggcagaccaagacagcacttgaacagatgaggcaactagggtagggctgttcccaggggaggctgttcaggaggcacgatttctactgctcagctgcatgaaggttaatagcctggagtgccaactccgtaaaccttatcagtcacttagacctgactatgggtggctctgtaagatatttcccaagagcaggggaaaaagagcctcagcagaaatgggcctgctattgaagatgaagcagggaaaggcaggtgtcacacccctgtttattgtcccagcactcttttagttgcagatgacagaaacccaaaagagaggattcaccttggctcacatacccaaattaagggaagattcaggaagcagctgaactcaggtgtggtgggaatcaggacctcatcccagaacctcagacatctctgtgtctgcccctctgcctctgcttctgtctctcacatctctggctgtcattacatgttggcttaattctttcagaacaacttgtgccaaaagaaaggaacttggtggctaatggtgtctgagctcccagccatagccctatcacccagagaaaagcccttttccccaagctaaagtaaaaatgccaaagaataactctgattagtttggctaagatcgtgtgtccatttctggactaacccccacagccaaaagggtggggtactgtgtttgcttcctcttgattaatgtgccccatcctgtggtccaggccaggacggggaggaagaggagatggtgttctgtgatgagccgtctccactagcacacaaggctggcctgggaggaggaacagtctcacaaagaaagccagtgaaattctcccaagcagggaaaggagacgttgcagacagatgaaacaattgaggtcacctgcaatctatgtgcaagcagtttttgatttgcggccggcaggtatgttgactgttgggaggactgttaaacttggaaaacaggaaaatagtgacatccgaagtgcttgaaaaatggcagcgtgtaattatagctgggaacaaaataaaactttgcagaaagaacaggtagtgagggtgtgaagtatatgtcaataaatcatttacataccgctgggctgtttgatgattgttattctatgaaggtaaatgagcttgccttccttgtctcattggcctgcttgtaggatctcaccaaccaatttgtgtgtttgctccttgttctgtctctcctgggctggaacccaatgtcaatattagggatggtcttccgacggaatcatccctgattttcaaggatgatatttttattatactgcttatgtctagagctgaaaaaccaccttgctcttcagtcttgagggaatgatgttcttacagtaaacgactctttttgattctgcctcttaactccccagactatactttgttcttattcaaaaggagcattagctctaatactctgctacaggctgtctaataacaacctcccaaagatgtccgcatcctaatcccagaacttgtgcgtgtgctaccttacatgccaaagagactttgcagatgcaattaagttaaggatagtggaatggggagattatcttggattatccggttggacctaatgttatcacaagggtccttttaagagagaggcaggaaggtcagagtaagagaaggcagtgcaacaacagaagcagaagtcagaaagagggagggaagagagagagaagagagacaagagagagattgtaaggcactatgctgctggttttgaagatggaggaaggaaccgcgagccaaataatgtagcctctaggagctggaaaagacaagaagaaggattctcccctagcaccccagaaagaagtcaaccctgctggcaccttggttttaggacttctgaccaccagaatggtaagataaattagtgttgttttaagccactaaattggtggtaatttgttacagcaatagtaggcaaccaatacagctacctttctggagagcaacttggcagcatgtactaagaaatatgagtgtattccttctgactcagtaattctagctctaggcttctctcctagtgaaataatcagatctgtagaaatacacttatatatttagaagtttgaggctacgcatggtggctcatgcctgtaatcccagcactttgggaggccgaggccagtgaatcacaaggtcaggagtttgagaccagcctggccaacatagtgaaaccctgtctctactaaaaatacaaacaattagctgggcatggtggcaggcacctgtaatctcagctacttgggaggctgaggcccgagaattgcttgaacccgggaggcagaggtagcagtgagccaagatcatgccattgtactccagcccaggagacagtgcaagactgtctcaaaaaaaaaaaaaaagttccagtattatctagaatactagaatagtaacaccttggagccgtctgagagccctactggtggctctatctctattataattataacactgttcaagtaagaaaacatggcccccttagtgatgacagtccctctctatgtggcttccagcaatgtgttatgatcgcaggttggggtggcctgtattaggaaaagactgtgatgacagctttgctgttgatctattgattcaacaaatgcttactgaccgtattgggccctgggccagagctgagggcaaagagtaaaggacatctatgggattgtaaggaagctgcaagagtctggccagggagatggttatcaacacagagacttcacagaatacttggtgttttacttaaaacttgaaggattgataagaatgaactgcagctgaaaagccaatgaattcatggaatgcagtatagatcctcactgctcacgaggaattctgaaggctctgatgaactgcagctgaaaagccagtgaattcatggaatgcagtatagatcctcactgctcaccaggaattctgaaggctctgcagcctgaagcaggactagccctcttgtcaaagagctgcagtcaatagcggaaaaacgtaaacaatgcaaatgtcctttaatgggagactagtatattcacaccatgaaatactactcagcaatgaaaatgaacaaactattgacacgggcaacgacctggatggatctcaagggtattatgctgaatgaagaaaatgttcatctcaaaaagtcacatactgtatgattccattgacatcacatcctttaagagatgaaactgtagagatggagagcaaactaggggttgtggagatgggtggtggcacgaatgtgtctaaaaggggtaacccaaagaagtcttttcacggtgatgaaacagttctgtatcttgactgtggtgatggtctcatgagtgtgttcacaggatgaaattgcatggaactacatacataccacacacacccacacatacgaatgaatccatgtaaaaaaaataatgaaaatgggatcaggtctgtagttcagtcacagtattatatgaatgtcagtttcctggttttgatattattattctacaaggtgttcccattaggggaagatgagtcaagggtactcaggactctatgtgctatttgtacaacttcctgtgagtctataattctttcaaaataaaaagtacaaaaaatactgacaaattaaaattcctctgacacttcttctgtctccaagaattttctcaccacttgtatggttccagagccacttcagttggtgtttaaatattaatccctcatggtcctcacatcatttccaggggtcttctcatgatcttgtaggatagggaggtaaccagcaactgacagcagaagagaatgggaaattcattttcttgcaaatctccagtgcagggggccaccccgtgcctgccatctcccttaaccgctatcaggagcatcatttcccaaccaccagctttgaaggaaattgggtctcttgttgtgaaactgggctttcttctctctcctttgtcaactctgaatgagagaggggaaatgggtcaggttagagagaggagatgccttttttgaagaggagatctgagtgagataaagatatagatagccaagagtaagtgagataacagagtaggtgctctggcataatagaaaatgcacaggcttggaattacagctgcattcattcattcatctgatatttatcaagtgcctaatctgtgccaggcatagttttacatgctagggatatggagtgaaaatatggtccctagcctcatggagattatgtcagatgactgcaatttagactctatagctccccagtcatgtgacctctgaaaagtcacttaatatctttgaagctcggtttctactctgtaaattggggttactagtagtaattggggtaaccaagccaacctcattggatttctatggggttgcataagaaggtttacttagttcttagcacaatgtcttaaacatagtagacgttccctttttctcattagttctcttcatcctcactctttgctcccctccttggtagattggttagaaccatctaaattcccccagggcagcacagggctgtggatatagctctgcactgtaggttcagctgagttaagccatcctcagttgagttgactgctacacagttttgtagcactcaggccaaatgaaaccatgaagaagaaaagaagcaatactttttgcatttctgtccatttttgctttatatttttaattgtctgtgttttggtgcatataagcttatgattgtaacttcttggcaaatttttcctttttaacatgattcctcataatcatatttttaatgtttttcttcaaatcttatttgctattttatatatcaatatcaactttcacttagtaactggtttatatttttctgtctctttatttttaacttttgatgtcttaatgtttttaggtttgcttcttgtaaactacagatagctggatttttaaaaaattaagtctaagtgtctttgtcttttaacaggcaatttaagcttctttatttattaagacttctaatatatttagtatatgtatactacattattttgtttgccatgcttcatctttgccttttctcacctcttgcctttcactgtattgattatgtgtttattattttctcctcttgtagcctattggtttagaagttatatattaggtttctattattttaatggaaaaataggttaaaaataaaacctaataataggtttctattattttaattttttaacacatacttgaatttaaggtctaacattaatcaatatcattatcctccttaccaaattggaaggattttatggcactttgactctaatctttctcttctcatgtcccaaactgttgtccactggtattatagtattatcttcttttcaacatctcccctccccattttagccattaggattattatcttggactttgcataccttcttttttttctatttagatattgcaaatatatatatttttgaaacatacatagtcttgctctgtcacccaggctggagtgcagtggcgcgatctcagctcactgaaacctccacctcccaggttcaagtaattctcctgccacagcctcccgagtagctggactacaggcatgcaccacaatgcctggttaattttttgtatttttagtagagaaggggtttcaccatattggccaggctggtctcaaactcctgacctcaagcgatctgcctgcctcagcctcccaaagtgctgggattacaggcgtgagccactgcacctggccttgcaaatatactttttattgtcttaagttattccatttacttcagttcttgattttctaatctataacgtgcatctgctgcccctttctcaaggtgggttgcttggttgtatggatcgtcactgtgaattggggcaggaggagcagggtatttatgtgtttttgcttatggaaatgcactccagagttctgctttttcctctgcttgaatcacttgtcaccatctctggatttgtttttattttaattacttggattagaattcccactgcatgtaagtagaatgacacaggttttgggttttaccttctctctttctttctctctccctatctttctttctttctttcctgggacccagacagaggtcaagcttcttcatgcccagggctggtgaacagtgtttctagtgcccaccttgtagtcaggatggtatttgttgagttaatccctgcctcacaagggtctggagcctgaagacatcaccctgcacaaacgttaaacccccggccccagctcctgggccaacatcctctgatacccaggtggcctccatagctttagtgcccacacactgctttagatttttccggatatttctgacacctgagaatttcttctttaccactcggatgtgattaagatgtctttgttatggtttattcagcatgccatgcatatgaagggggaagggcccagtcgacattaggtctgtctattacaggactgaaaaatcatacatccccatgttctcacattggcaaaagctcactttcatttattcagtcaacaaatgtcactgagtcaactagaatctaggtctagggtgacgcataaagagacacagtcctccctgagctcccagaacttaacacccagaatgggagatgggctggaatcagacagcccaaggaatccatgcgcgatgccggcaagcgccgcagagaaggaaagtcatgctgatgctgatgggagacggctgatgctcagaggaggcctggcctgggcaggggtcagggagggatagagacagggagctgtcacagaggccagaggacagcccaagagcattcagtgtttctggtgcccttcctccttccaggtccctccctccttccagccccgttcctccaccatggaagccaatgtgacttgtgagctagctggctcctgaaccggtggcagaaccccatggcgatgcaatcataaaggggtgggggtgggtgagagggcaggatttcctggggtacgatgccccaatacactgtgaactaccaaatgacacgtatattctgtgaactttcaaaaaaggatgtgaaagacttctgtgcaaacatttcacctgggatcttttcactagcaagatggggagaaaaagccaaaactgcatttctctcgccctctgggtctagatgtggggatttcttctccttccagatgacagccaggaagggcccccaattattctcgaaataaaacgtgtcggtctttcgaaatggtcagtggggtgatgtctgggtcccaggaaagaaagaaacataggatttgtgctttttgttgatatgaagttaaggggtacaagtgagagtgattttgttacatgggatacattgcatagtagtaaagtctgggcttgtagtgcaaccatcacccgaatactgtttattgtacccattaaataatttcctatccctcacccccttcccaccctcctgagtctccaatgtctattattccacactctatgtccatatgtacaaattatttagctccagatttagctttttatttcttttttgtttcctttttgtttgtttatttgatatagggtcttgctctgttgcccaggctggagtgcagtggtgcaatcatagctcactacagcctcgaactcctgggctcaggtgatcctcccatcttagcctcccgagtagctgggaccacaggcatgcaccaccatgcctggctaattttttattttactttttgtacagatgggggtctcactttgttgctccagctgttcttgaactcctggcctcaagcgatgctcccactttagcctcccaaagtgctgggattacaggcatgagccaccgcagccggcctggatttggctctttaaaggaaagagcgagccctggactgggcagggtgggaaaatggccccagctctccctctgacttcagggagggaccttggatagggggcttatgggctccaggcaccttctctgtaaaattaggtcatactaagggagctggagggcccttctctttctggtatcccaggtggtctccccaggggtggtggttgtggctgaggcccactgcctgcttttctggtgctctcaatgaagtacagtcctggggtcctctgtatgtggatggactaggctgtgaagtctatccgcccccctgctccgctccacacccacacactgctcttcactgataaccccgatgatgcagacagcctccctcaggaatttttctcatcctcctagtcatcatttcagtcagccctgccccgtgtgccagacaagcacactctatgtgttcaaaggtgatgcaccgatcgtgccctgtctgatgtttactaaccaacctgactgggtctgtgggtgacaagggcaggccctgtttcccttggatcttccttttatggacacaaatcgctgacctgtctgggcaggcctgctctaatccaggtctggccctgagcctcctgtcattttgctgacccagttcatcatcctggaggcagggcttgagttgaaaagttagagcctcagggcagcaccaggagcctgcactttccggggcctccccttctctctcccctaggctgacctgtcctcccctctccacttcctgggcgtgactcacaggcaggccctatcggcatggcaggtatgtgtcatttccttatgctggtgagacccagagtttcagtgttagcacccccacactgtggctcttctagcccaatggagaagggctaagggtttctaaagtcgttgacctagggatttactgttgggatgaatttctcacctaggggaggtgttctgtttttgctgagagatgactgtggggagcagggttctctgctcctctgacactactcatcctccttcccaacacctgtgggcctttagcaaagcaacaccccacccccaccttcaccctgaccccagcagtgttttctttccccccaccaagacttccttggggccctctggccttgccaaaccccctttgtagcagcctccccttccagcagtgacaggagggacccagcctcgggagcctgtctctgagagacagatgcaggcaaagagccgttaccatgcaaaatctagaactgttcccacgtgaaatctagaacttctcccacacgaaatctagaactgctcccacacgaaatctagaactgctcccatgcgaaatctagaaccactcccatgcgaaatcttgaaccgctgggtggaaatgaggttcagtaggtgcggcagtgtcacctctctggagcatcttcccaagtctttatgacaaacagggataccctcatggccagagtcagctgggaatttttgtggaagcagctccttggatagcatcactcctgttctcgtcatggtggaaaatgactaaaaactcaggatatcccactggccctgggcaaattccctcattggagtagggactaggacaagggccagcccatcctgtcaggccagagcacttctgtggtcttcagcccagttctgagggcccctcttgaaccagcttttgggaagctttgagggagagaggggagccagagaggacgtctcgtgagaagtgtttggaggaactgaggcaggtccagggaaggcctgggagagcagaggagctgttttccactagtgaaaggtcaggaggtggaagtgagatgggttttgttctgtgcatctccatgagcaggcccaggaagttacagaaaagtagatttgggatgaatataaaggaaggttttttaataattagagctccgagcaatgggacaggttgcagaaatgttgagagagtgagtttctcatcactagaagaattcaagcaggaagtgggcaagagggagtgcccgcatggtctgggatgcagggaatggactctgactgctcttgctgctctgagcctcttgattctgatttgggtctacccctgcccttcttgcaagtcctcctttttctcatcatggacctcctccccggagccaggcagaggctcaggggctctcccatgtcctgtctgagtaggctgcatgatgactattgattggctgaagccccagaaatacctgccatgtgctgggctgtgacagtcacttggcgttcctgggacatgttcatgtgaattctcaccggtggcttcacccacccccagtcctgtgggccacgattactctcccacgtgctggagatgaggaagtgaggaaatacccagggcgctgcagggctaagattagactagggcccggccgcctgtcttgacacatgcgcacaagcagctcccccaagttaagagcctgtgtatcagctgagtcccagggcctggggctctccacacactctacatacaaacacctggcaaggagtcctcacaacagcgctgaaacagctgcatcagcgtcccgttttacagagaaagaagccagggttcaggatagttggaaataagtctgtgcatgactagcaagggatagagctgtggcttgtgctcagctttgccctctgtgccactgactgccaccagaggctgtaagctgccttccatgcgatgcacctcaggcagctcagagaatgcacctcaggggcttcagccagggcagttcgtttccatactcctgggtgaatgatggcctcctccaagaattccaggtcctatgctaaatacaactgggaaagaagtgcgtaacgcattatttccagcttaccagaaacctggagccccaaagggtaaacatagcacatttacaataagccagatgtgctgaaaagggaacagcagccgtgaagaaaagcttcctgacggaggtgaaacttgaggtgggctttaccaagaggagtcttagataggcagagatatggaggtgtgaggcggggagacattcgctcagtactgcagggactgaacagaattttgccatgaattcttgagctacagttaagcaagcattattgactttcccactttgtctacctgcatatgagtgatcccagaaccttccagccccaccttctcatcctgacttgatgagtggcctcactgacgtccaattgacgggagaagattgtaggcaatattcgcttttcttctaactggctgtcaattcctgtggattccaccttgggacatcttccttcatctactcctttttcctcattatcgcccccatcttgagtaagacactacttcttgccaaaatcaatgcatttgtcactcgattgctgccccagggtttcttcctgcaaatctgtcctatgcatacctgtgggtagtcacctctgtaaaccttgacacttctgatgacatcttcagcaagcctcaggctttcctgcagttttgctcatatacattctaagtttttctgatagctttcaacccacgtcttcttgtttgcaaacctatccagcctggaaggtccaactcatatcctgcctttcccatgagatgaaattaactttcttcacccatgctgctccccagacataatttcatgtccccttcgcttgcgctaaccacactgtgctgcgtggtattatttgatggcgatatctgtctccccaacttggctgtaagtccctggatcactacttactccttttgtactctctctcgtctgccaacctggtgggtactcaaaggtgtttgttgaattgattgtagtcacaattcccgcagttcatccctagcccgagggaaggcaggagacccatgacaccttaatcttggcctctttctttggaaaaagaaagagtttagcaagacagggacctgcctaagccttggtttctttcctctgcaatatggcaaagtcctgtatgtttctttgagagacagtgtggtgtactggtaaaggaaataggaaacagatctgccatttcctacctctgtggcactgagagagttcctttaatctcctatgcctcagtttccccatatgtaacatggtagaagaatgataataccaacttcgttttgcggattaaatgagttaacatttgtcaccactcattaaaaataccccaaagatatttattattttaaggttattatgagtagtagcctgtgctccctcctagagggcaaaatgcacaaccttaaagctaggagggcctgagatgaccctggtgatggggactgtcccagccagacattgctggtaatttgccttcctttcaagggctgtaaaactgctcctcagttatgaaatgaaccaattaaggacttcggacttagccagtcctgacagaagcatttcaaacagaaccactaatcatacctgatgtttttattgttttctgttgacactgccccagaaacatgaggcttctggcagccagccctggcacacctgcctcatctcttcatgacaccatgtttcaaagaagcttccttgtcaaataggagaaggacccacctgtgctacttcctgtgattgacaggaagttctgaaacccaaagaagcaaatcatggctcttgggtcttggggtggcacaagtcactagaaaatctcactccattgctgatcctagaattagttcaggctccctgaggacagatccaccccagtacctcccaccccttccatctcttcatcccccagggggaggctgtctacttcttttggggctttggactaatccccccagttcccatcttctgaggttttgtgctaatcttgtttgtctcctatgtgtacaaagcaatcacccaggcgacatccagcttctagatttgggtgcccagggttcatgtggtgccatgttggcctttgcctaattaattttaggaagtctttccaccagccagatcatggtcttccaaaaatcctatggagtcagttctaggcagaagctgagcaggcatctgggcatggcaacaacttctagcctcttcctcttaccacttggcgtctagctcccaggcaggtatttcctgagccagggttcctgtgcaggtcagtctttacaatatgcaaatttcttgtgacccagcccatttccccccgagggaggcaggaagtcccttttgaaatttctgagcacacacaacagaggctaggagaggaccagctctgagactcccactcaagcatgtcaaggggtgtttgtggctgtgtggctgtgtgtggagagcagagggcaatgctgggctggggcaggggagggtgcagaggagagggtgtgggggagggaggagctgcagcctcagacacagaattggactgagaaaacaggatgcagcagaggaggaggctgagtgtggtggctcggctggcactggaatgctcaatgtgaggaggtagaaggtgcctgagaccagggtctctggagttctagaaaagcctgggcctcttccatgtttggagtctctctggattaagaaagaagaagaagagacagaaatagccaaataggacagcaaacattatgatgttgtttaaatgtttactttcaccaattaatagttttaaacacacacgcacacatgccacacacacactgactacatgaatggactcatttggaaataatgtcaagggctctttgtcctgtgaggcctgggcccagtggccatcctggttttgggagcagctctgcctgagagaccctcctgtgggcatggtggcagctggagggtgttctgggctgttgaacaaaaagtccagaaagtccatctggactggtcctgctggggatggtgagggactgaacagcccaggtgcggggtgtctgggcttgcccacctgtccatgtttagccaagtgtccatttcaacaaggaggaaggtgacaggcccccaggacgatggcctctctcctcagtcaccccaggtcagtccccagcaaatgcagtggggccttgatggggaaagtcctttcagggtttgtatcaatttctttgcattgttgtagcagaatatcagaggctgggtaattcataaagaaaagaggcttaattggctcatggttctgcaggctgtgcaagcatggcaccaacatcagcttggcttctggtgaggcctcaggaagcttccaatcatggcagaagggaagaggagctggcatctcaaatggcaagatagaagcaggggaggtgccagcctcctttttaaacaatcagatctcacatgaactcattaaactcattacatggggaaggcaccatgccattcataaaggatccaccacatgacccaaacacctcccaccaggccccacctcccacactgggaatcacatttcaacataaaattggagggaacaaacatctaaaccgtatcagggtctctgattccacaagagccaggggacaaagcaggccccacggaatagggtgctgtggagtcaggcccaggctggcctgctttggggatgggatgggcctctgtgggcccaaacccatgctgcccttgttagcagacgccagatggcctaggaccgtcctttctctctgccatggagtgagtgcgggacggacgggtggctcctgttagagctgatgcttacatgggtgagggaggggaacggctatgtccccaaatatcctgctctctttgctttccttccactgacaaggactccctccttgaccgaaccttaggcaggctcctctgagccctctttttggctcccccaccctgctccttggcctgctaagctccagaaagtccagcaagaactaccccctcaccccctaccccgccaccatcactacctcaccaaattccccttggtattcatccctccactgactccctcaccttgcccactggctgtgaatccccagctgttccccttgtggtaggaattgagttcaatctccctcccctattggaatagtcttggccctattgcaataaactggaaacaaggcttcctgcctgattaacttcacctggtgtgattttgctcctgcttacatgtgcaatcacacacaagctcttaacacagacacttagcaaaccctctggttccatcccattatctcattgtctcttctgctcccagcaacattgcttgaaaagggtattcaggtccagggagaaggaagccacctgtcccacttggccatggagcttctgtccaggaacactgaccactcttgctggggcctggagtgacggcagggccacactctgctctgtcatgtgcctgccctgggccccggagaccctggaaagaagaactagggctgccttgggctaggaaggaggaagcaggggtgggcagggcggaagtggaaagagatccaggagtgtctcccctctcaggacctctctcactccagcccttgtgaagggctgttctaaccttgttccctcagcagcagtctctgtcatcagaggcatttctcagcatctctattttggagctgcagctggttgcttctcagaataaacagagctgtgatattatgttgaaagcagaatggaataacatctcttccttatgccctccctcttccccatgttttccaacctccacttccctcttcttaaaggccttgccctaagacctcttcctccacaccccctgccctacagcttaccttctaccctcttataatcacaggatcccttcactggcatgtagggggacctgagatgaccaggccctgtgctgggcctgggggatccaggggtttctatctgcaaagaacccaatgccaagtgacacaggagttcatgtattaagaacttaaggcttagtgtggtgactcacgcctataattccagcactttgggaggccgaggagggtggatcacctgagatcaggagttcgagaccagcctggccaacatggtaaaaccccatctctactaaaaatacaaaaattagccaggcgtggtggtgggtgccttttgtcccagctactggggaggctgaggcaggagaactgcttgaatccaagaggcagaggctgcagtgagccgagatcgtgccactgtacttcagcctgggtgacagagtgagactccatctcaaaaacaaaagaacttaagtcaaggctgagtgtggtagctcatgcccgtaatcccagcactttgagaggccaaggcaggtggatcacctgagggcaggagtttgagaccagcctggccaacatggcaaaaccccctctctactaaaaatatagaaaaactagcaaagcatggtggcatgtgcctgtaatcccagctactcggaaggctgaggcaggagaatagcttgagctcaggaggcggaggttgcagtgagctgagatcacaccactgcactccagcctgggtgacagagtgagactccatctcaaaaaagaaagaaagaacttaagtcagagattatcagagctggtccagcattctgcttcaatgaggcaactgaggtctccattgaagatgtgttgggctcagggtctcagagctcttgggagttcaggtaggagccataacactctgtgcagttttcctcgtacctggctatatcattatcagaacagctgtgttgtattgaaatcagtgaaagggagctcgatgctgcaagagacagagaaatcagaccattgtttgtcttggacaaagcagatgtgcactacccagtggatttatggactgagatggcttctaggaagaacagggcaatcagagatgctttccggataccagagggtgggaaggtttaatcattaaggagcaaatgaagagacatgtatatgtggccacattcaagaccacgttattagcttactcttttgtaaaccagtaagtctgacagtgtgtgaaggcccaggcatatcactcacctcctctgtggtctatccagagcccttccgttacggccttcatcctttccctctcttgtcccttacctgtggttggtatgatttcccttttgtaaaatatgcctaactccactcaccacccatcctctatctgctgatctgctgtgtagcttcatccacatgagactcaagagcaatgcagaatgcaaggacagggagttcctggaaactgggtatgttgcctcacgaccttctacccaggcccaagtgtggtcagcctcatcttgctccgtggtctcacttctcagcctgtgcatcagacctttttccccctgttacctgaaagcaactctatgatgaaaagaggatgatctgagacttcagtgggtttcctctcttggttttctcttatttttaaagagaaaactgtggtgagactctcaagttagtctttttagtttatttttatttttttttgaggcagagttgcccaggctggagagcagtggtgcagtctcggcttactgcagcctctgcctcctgggttcaaatgatccttccacctcagcctcccaagaagatggggctacaggtgctcgccaccacacctagctaatttttatatttttagtagagaccaggttttgctatgttggccagttggtctcaaactcctggcctcaagtgatacacccgcctcagcctcccaaacgctgggattacaggcatgagccaacacatctggccccaagttagtctttataagccccagtggaatgtccaggagtaaagctgtcagcctgggggtagcttgggcttgctgagcattgagggagctacacagagggcattcttgccggctgagagagttgtgttgtgaatgccaaggtcggcggctggaggtgggcctggttcttccatgcacactgggaatgggcatagcgtgaagaatgtgagttttgaactcaagggacttggaggtatgtctcagctctaccatttcttagctctgttaccttgggctggttatttattgttcttgagattccattttctcatctgtaatatgggaatataaacagaatctatttttattatttatatatatatatatattttgagacagagtctcactctgtcatccaggctggagtgcagtggcacagtcttggctcactgcaacctccgccctctgagttcaagcaattctcctgcctcggcatcccaagtagctggtattacaggcatgcaccaccatgccctgctaatttttgtatttttagtagagataggatttcaccatgttggccaggctggtctcgaactcctgacctcaggtggtctgcctaccttggcccttcaaagtgctgagatttcaggcattagccaccatgcctggccaacagaatctattttaaagaagagttcacttcctgatttcaggagtaatctactgagcacctcgtgtgtgccaggcaccgatccaggcagaggcgcatggcctgggaagtaccaatatgacgcttgagctagggacactcatatgttctgcaaggggaacagggtgttatgtggattgcataagaaagcatatatgcattgcttaaccccatgcctgatacatacaaagcacttgataaacagtagttgctattgtgactatattcaacactagaaatatgatataaatgtggtcagtgagccagaagaggagtttcatttgataaaatcttcagtttcttcctcaaaggcgtaactgtcttttaattaaagggagtgtattagtccaagttccccagagaaacagaacagacaagatgtagagatgtctataaagagatttattataaggaattggcacacaggagtatggagactggctagtcccaagatctgcagtcggcaggctcaagacccaggaagagttaatgtttcagtttgattctgaaggcaagaagaagctggtgtcccagttggagggtcctcaggcaggaggaattccttcttactcagcaggggggtcagccttttgttctatttaggcctttaactgattgtatgaggcccattctcgttagggaggtcgatccactttactcagtctaccaactcaaaagctaatctcatgcaaaagcaccctgacagactcacccagaataatgttcaaccaaatatctgggtactccatagcccagtcaagttgatacagaaaattaaccatgacagggagcaatggccagaggacatcatagttgagatagcctagaggagagctgaggacacctgggctgtgctggcaaccaccctgttctggagggaagggtaaccctagctgaggttgggacagaggatgcaaactagtggtcctggaacttgatccagtccaaagatgtgtttttgttagcttatactgttttgcaaatctgcactagcatttaaagattagagagttcatatacaaagtctaaatttccacatagacatttccaaagtctatgtggccacttcaagtcttctcttgaaagactagaagtggccacatagaggtcaagcatccattctcataaggcaagcatcagctgaacccaagccacagctgcccccttagcccagatacccactggcctatcggcttaggctccaccagccatgcctgatgggcttcactcatgcaagttaccactgctgctgcttttggagaaaagacacccaggcctaaacatcagggtcctgcccctgccacagtggggagcccatggcagcagcatgctgtgttctctctgtgggagcacagcagggaggcagcatgagtctgtgttcaaagcacacatcagacatcttactccctagtccccacacagacttctccaacaagctgctgtctaaagtgttctccctgaccagagtcttcacatagttctttgcctggggaggggacttgggtagtggtgggaaaactcttccccctccaactagaaagtagctaaacaactggagagaattggccttgggcaagcagctaggagaggacccgttgctcctccctgcctctatattgtgtaagtttatcccgacatttaaaacttagagctgggtgtggtggcacacacctatagttctagctgcttggggggctgaggcaggagaatcacttgaggccagaagttggaggttacaatgagctatgatcacactactgcactctagcctgggtgacacagcaagactctgtttctaaaataaattttttttaaaaaaaattggagatttcacattaaaactctcatgaaaaaccagcagtggtcatatggaggtcaggcatcttttcagggcagggtgtcttctccttctggtttaaagcaggagaggccctgagagaagagccttgggatgggatcttctagagccacagaatagtgaaaaatacgcctcttgaacaggaggtgtttggtgggagaagaaaagcctctagggaacccagagctgctgcttgtaaaaagctgaagagacattgcaaggaggagggatcgaaccaaccctgcatgtccccagagggcagaagtccaagcagagaccaaagcagtgagaaagcaggcttgcagtgagtataatgtaggctttaccaccaaggagagctccttggaagtgggaacgctgatacataggtggtaaatcctgaggctgaggggcagcaggggctgcacattggggcttctaagtctttttcatgtgcagtgcacatagacaatagaagtatttgcagggcacacaaagtagactggcagggatttgaaaccccaaaggggactgcatttaagcctaaaggttcaaaccatgagtggcctgttttgaggatacttgggatctgttttaatccagtatggtaggacatgcagatgcagagatgactgtcatgaaggaagaagttcgcattcacagacccctcacaacaggagtcccagcacaccacatagggccccgtggggcagcacaggtgggtcaggaggcagagagagtaagaaaaaatgtaagcaggagcatttattgtgatttctgtgggaaggaacatgaaacagcatagcaggtttaggattggctcacgtgaataatttcagcaggctctgggctctcacataggcactgtccccagttacctggtacctactctggggtgattaggacagttggatagtggcctccagtgtgagtgtgacaggaggcagttgcgagtgtgggctctggatgggttggtttgcatatatgaaaggcagctgtcagaaactggctggctctgggagaagcagtccctccagggtcagtggggccccatgtcaaagcatcaaatgtagaaaccagaaaacgtggttattacaaagcctggcccacatgcccttgagagctgaggggatcagtttgcccaagtgcaccagatgcaaagcactgcactatgtgatgtctgcaattcctttcagccttgagatgctgtaaatctaatagcatagtgagctggaaatgacttgggagttcagccttatcttctctttgaacagaagggacctgagtccaaagagctgaaccaacttgattagtctcatgatggattataaagtggggactggaactcaaggctttcccaccatcctgtgaggctggaaggggctgatgggagtggcatgacatcttcatccatgtgatctcacaatcatgaggaggacatgggctcaggagtgccaaggctgcagcatagggagtttctggggcagaaggaagatgtgggcagtagcacagtccctgccagaccagtgaggccctcctgagtccccttaccctgtccttgacatgtagggaactcagagcctaaggtcttagggccaggatgtagcctgggatgaggagacctcaatctggtctcagctttgccctgaaccaagtgtctgacttgggcagttgagttttcctctctggtatcacccttcccagtggtcatccagtcatttccaaagcatgccatcatcatttctgttcaaataaagatccctttgccccacccactagttctgacctgtagatccagggcagaacatatgtgtttccctcgaggaacatccaggtcctagaatccaccagacccttccagtgttaaatcctacagtgctctcattgactgcctcctggtcataagctactaggtagtgaagggctgagaaccagaccccacgtctcctgcctccgggggccgtgttctttccctgtcccatgtgcctctccccgagtgggcacctccctcctccccagttatgcacgggtgcccccagctatatagaagcgtgccatgtccacttatgtctggtttagtattctgcctgtacgacctgtttgttctcagaagagccgtgggctgcactggtgagcagggtaccctgtgttctggagccttcattcccctcaccaggcacacggccatgcaattaggcacttgacacatgatgccaatgttgacagccgagaatagaacccaagagtgggaggttagtctgctcagccgtgctgtgggatgaagaggtttgtggttgccacctcagcttgaggctgagcagagaccagagctcagagtggacgaagcatcagacaggagccccaggtgtgggctgtaaagccatgggagagagtccaggggtgcttgaccttcaaagcccattcaggtctaaagtcctcagaacccaagacctagacccagacaacagggagctgtagagtgggttcaggccaggccaatctgggcaggaccaataggcttggctgcccccaccccaactagtgccattggccgttctgggagggagcagtctttggagacttctggtgatcatcactggtgtcagcagatcttgtccaaattgattcctgtgggcttcttgaggttgggactaaaatgtgtctgagcagcaggtgggcctggactggaatgatcttgaaccacacaaaccctcatgtttctttttgtcagaggcatgtgaaccagagcaactccatcttaaacaggagctaggtaaaatgaggctgagacctattgtgttgcattcccagatgatgaaggcattctaagtcacagggtgagataggaagtcagcacaagatacaggtcataaagaccttgctgataaaacaggttacagtaaagaagccggccaaaacctaccaaaatcaagatggcgatgagagtgtcctctggtcatcctcactgctacactcccaccagtgccacgacagtttacaaatgccatagaaatgtcaggaaattaccctgatctaaaatttctggtctaaaaaggggaggcatgaataatccaccctttgtttagcatgtcatcaagaaataactataaaaatgggcaaacagcagccttcaagactgctgtgtctatggagtagccattctcttattcctttactttcttaataaacttgctttcactttatggactcaccctcaattctttcttgtgtgagattcaagaaacttctcttggggtctggatcgggacccctttcctataacattttcactcctgcgtttagaaccagagactcgctgtgcaaagtgggagtgaggagggtgcaacttgtgtctcacagctccagaggcagagctgccccctgcgggtaaaaggtgtagaaaaactcctttaacatatcctaggaaagacctctttggtactgaaaaccaaccagaaatggaatagataggttgtttttgccaaaaggggcgcctgtcattgaaatatgcagatgcttgaaggaaccagaggaacttgggtgatctgtgatcacggccaacactcagtgttgggtatgtgtagtttaccacgtacatgatggatattatttttactcatgttcacaacagttctgggaaagatagtgctaacatgcccaattttatgggcacgtacactgagattcagggaggtaacaggatttgtcccagatgattagactgggccatgacagagctccagaaatgtgcttgtttcatgccagtgtgataagaactttgcacacctggcatccttctttggctgccatggggaggtcttagttctagtcctgattctgtctccagctgagtgtggtcttaaccctttctgagccagtgtctccttcctgtaaaggggccagggccacctccggaggcaggagagaagacaaagagctagtacactgtgagctctctgtcacatgcactgcctgtgtcacgggagggtatttttactgaagggcgccattacattaaaatggagactccatttctaaacaggtgggcacattatctctagctggaaggagcctcccccaagagcacagttcacaggtaaagattaggaggtgttgagtgcaggtggagaaggttctggaaaatgtaaacctcctcccctacttaacactattcctggcatcacctgcatagtcagtcctcaagggattacttgaaagctagcacaccccagggcatttactttggggaagggaacatccctacctttggttccctcacttgtaaaaacgagggaagtaaaaacaaattatctgacattccctttagctttggttcctgccattggtgagtttacaatcttagttgttacttttctcttttatcaatatctccttctatctttttctttctttctgcttttctctccctcaccttttcttccctccactgtctcatatctccctcaacaaccaaggtctctccttgtagctaacgagtttagctcccagaattatagaccaagacaatgatcctggaagcatcaaatctagtccaggggctttagcccagaccttaaggaatcttgggctatggtgagggattcaggggggttctgcaaatatggaagtattttcagccaaacaatgaagaaataaaccacttcaggagctgaacgatcactttaaacagtatgaaatattcatatgcaagactgttggaagaacgtccctctcacctaatcccctcacctaatcccctcactttttagatgagaaaagctgaggtcagatagataaggtgatgtctccaagttatccgagtgttgctctggggtttaagttgcacatgattcaagagtataaaatcttacagcttatctgtgtgtgtgtgtgtgtgtgtgtgtgtgtgtgtgtgtgtgtgtgtgtgtacacaaggcaatcagaatattctgtcaatagaagcagaaaagtagaacttggttccttctggggctcctgaaaactggggtgtagacataacccccacactctactcccacctgcttcatcttatcccccaccccaagtggagctaggggagagcagcacacagttcccctcctcactggctgtctcctccctgctgcctcttgtctgtggtgaggctgtggagaagtgggttgctgttcttttttctgacttcctgtgtgcttcagaaacctcaatgaacaaagagctaaaggaagaaagggccccggcaccgttatgccaaacatagactcacatccgacacgggggagctggatgcccgatttttatagagatgaaacccaggattcaggattctgactgccctgttcccaacgtggctgcatggggaatgtcagtgcttgggagctggaagtaggtcgcaggcttctcattcttttcaggcttaggtctaatgtatttaaagaggtagccgaagtgagtctttagatgtatcatggaaatcaaaccaacattaaaagggaacatttaatttcctctctgcaaccactgttttttgtttgcttttggagacagggtctcattctgtcgcccaggctggagtgcaatggcacagtcatagctcactgagctttgaactcctaggccacctcacccacctgggtagctgggactacaggcacatgccaccatgccggggtctttttaaaaattttttgtagagataggagtcttgcctgtggcccaggctggtctcaaacttctgggctcaagtgatctacctacctcggcctcccaaagtgctaggattacaggcgtgagccaccacacccagcctaccacagctgttttaatttctctgttttccttcagtgtacaactcagctgtaaccataggagcacatttccatagataatttgcatataatctctggaatcttcatattcccttaattgaatatgcctaagtagtctcctcattacttaccttttagcacatgcaagttaatttacgagtgagtctctccatccaggtgagaacagcatcgcagggaaaaatctgtgcattttatttttgagatggtatctaaaaaaactggactgcaatggcgtgatcttggctcactgcaacctctgcctcctgggctcaagcgattctcccacctcagcctcttgagtaactgggattataggctcccgtcaccatgcccagctaatttttttgtattttagtagagacggggtttcaccatgttgcccagggtggtttcgaactcctgagttcaggcaatctgcccgccttggcatcccaaagtgctgggattacaggcatgagccactgcacctggccctgtgcttttttgatgttgtttttgttattgttgtttattattgtttggacgacacattgctgagctttctgtccataagctcctattctcagggacttgctactcacatcatgatccacaggagactctcggggtcacgtctttctctgcccagccctggcttcctggtgctgtgttcatgtctgattttggatccctgagacctttttctcctacctttcttctgaaaggatagcagtcattttgtgaccttgctcaggaaattttcagctgggttttccctttgtattttatttgatgtttttcaccagggaggaaaactcctgctaccatgtgagttgtgccaggggagacttgccagagaagagctgcctgcagggggatttctcgctaccacatgcagggtttccctactttggaagcctcgtggctggaattttaaaggccaaagttcccccaaattttctgaacgctgaatgattgaaaacacctattttttttttctctttttacccaagcgccttttttcccaataaagggcttgggtaacgacaagaaactaaaactgaaaccacaactctgctctaaaataagagactcagagacacccaggaagggcctgcctttgagacttgtcactccctgagatccatcgtggcaccaaatgtttgccgagctccgccctgggagggaggcctgcagcctgggaactgggagacctgggtcccagtggagaggcctcaccatgtagtaagtctctctcgattcagttctcacagtgagttgagggccaagccagccattcttcagcctcaccgggtgggtaccagaatcacctgagatgttaggaaggtggggaaagagggaggtgttggtcaaaggggacaaagttatttacgtagaatgagtaagtcccagagatctaatgcacagcatggtgactgtacctaagtatgctgtattagatacttcagattggctaagagagttgatttttttaattttagtaattttttaaatttatgcataataactgtacatatttatggggtacagaatgatatttgaatacatgtatactctgtgtaataatcaaatcagagtaattaccatattcatcatggaaagcatttatcatttctttgtgttgggaatatccagaatcctctcttctatttaaaaatatacaataaattattgactctagtcaccctacagagctacagaacattagcacttagtcctcctatctagctttaatttggtatccattaaccaacctctctccatccaccttccaccctgcccttcccagcctattataaccacgattctgtctacttctgtgagctcaacttttttagctcccacctatgggtgagaaaatatagtatttctctttctgtgcctgacttatttcacttaacataacatcctccaggctcatccatgttgttgtgaatgacaagattttattctttttcatggctaaatagcactccatctgttgatgggcacttcggttgatttcctgttttggctattgtgagtagtgctgcaatcaatgtggacgtgcagatatctctttgacataatgatttaatttcctctggaaaaaatccctagtagtgggattgctagatcatatggtagttctagttctatttgtagtttttttgaggaatctccatacggttccccgtaatggttatactaatttacattcccaccaatagcgtttaggagttctcttttctcaacatcctcaccagcatttgttattttttgtctttttgataatagccattctaactgggtgagatgctatctcattgtagttttgattcatatttcccttatgattagtgatatcgagcatattttcatttatctgttggccatttctatgtcttctttgtttttctgagacggagtctcactctgttgcccaggctggaatgcagtggcatgatctcggctcactgcaacctttgcctcctgggttccaatgattctcgtgcctcggccattggagtagctaggattacaggtgcaccaccatgcccagctaatttttgaatttttaatagagaggggctttccccatgttggccaggctggtcttgaactcctgtcctcaagtcatccatccaccttggccttccaaagtgctgggattataggtgtgagccaccacacctggttatatgtcttcttttgagaaatgtcctttcagatactttgctcattaaaaaaaaattattattatttaccattgagttgtttgagttcctcatgtatcctggatatcagtcccttgttggatgaacggttttcacatattttctcccattctacaggttgcctggtccactctgtcagttgtttcctttgctgtgcagaagcttgtagcttgatacaatcccatttgtcattgggaggtcaagacaggaggattgcttgaagccaggagttcaagataagcctgggcaacatagtgagatgctgtctctgtttttttttttaatcccatgtgcctatttttgcttctgttacctgtgtttttgaagtcttacctgcaaaatatttgcccagaccaatgtcccgaaggatttaccctgctttcttctagtagttttatagttttgaatctcacattttagtccttattctgagttgatttcatgtatagtgagagatagggatctagtttcattcttctgcatatggttattcagatttttcagcaccatttattgaaaacactgtctttttcccaatgtatgttcttggcatctttgttgaaaatcagttagctataaatatgtggatgtatttctgggttctctattctgtttcatttgtctgtgtgtctgtttttatatcagtaccatgctattttggttactttagctttgtagtatttttgaaatcaggtagtgtgatgcctccagctttgctctttttgctcagaattgctttggctatttggggtattttttgattctacatgaactttaagattgtcttttctatcatatttctgtgaagaatatcattggtcttttgatgggggttgcatggaattcgtagagcgctttaggtagtatggtcattttaacaatattaattattccaatccatgaacatggaacatttttccattttgtgtgtgtgtcctcttctaattcttcccacccccccactctcccaacacacgccgagatggagtcttgttctgtcacccaagctggagtgctgtggtgcaatcgtggctcactgcaacttctgcctcctggttcaagcaattctcctgtctcagcctcccaagtatctgggattacaggcacgtgccaccaggcctggataatttttgtatttttagtagagacggggtgtcaccacgttggccaggctggtctcgaaatggctggtctcgagctcctgacctcgtgatctgcccaccttgacctcccaaagtgctgggattacaggtgtgagccaccgcgcctggcctcctctgtttctttcatcagtgttttatagtttccatcataaaggtctttcttggttaaaaaatatcctctcttattaaaattattcccagttattttattatgatttttgtagttatcataaatgagattgtttagttttgttttagataaggtctcactctgttgcccaggctggagtacattggcaccatcatagctcactgcattcttgacctcctgggctcaactgatcctcccacctcaaccttctgagtagctggggccacaggtgtgcaccaccacacctggctaatttttttttttttgagacagagtttcactcctgttgcccaggctggagtgcaatggtgtgatctcggctcaccacaaccttcgcctcccaggttcaagcgattctcctgcctcagcctcccgagtagctgggattacaggcatgagccaccatgcccagctaattttttgtatttttagtagagacagggtttctccatgttggtcaggctgatctcgaactcccgacctcaggtgatcctcctgcctcggcctcccaaagtgctgggattacaggcatgagccaccatgaccggcccaacacctggcaaatttttaaatgttttgtagaaacatggtctccctatttgtgcaggctggtctcaaactcctggactcaagcaatcctcctgcctcagccttgcaaaatgttgggatgacaggcatgagccactgtgcccagccaagattactttttctatttattttttagctagttggttataagtatacagaactggtttttatatgttgattttatatcctgcaactttatcaaatttgtttatcaactctaaacaatttttggtggagtctttaggtgtttctttatataaaatcatgtcatctgcaaagaggaacaatttgacttcctcttttccaacttgaatgcctttcatttctttctcttgcctaattgcactgattagggcttcctagagaatagatcttaagtgttttcactacaaacacaagaaaaggtaactgtgtggagatgaatatgctaattagcttgactataataatcaacttgctatacagctcaaatatatacaatttcagtttaaaatattttataaagaatcacctgagatgttatggagaaatacagatggctaggccccaacccccatggtctccatgcactaggtcaggttaaggcttagagatatttacactatatattccagcgatgccaacatgcatgtaaacagggtgaagaacccagggaccaagcgctgtctgaggttgtttctcatctaacagcaacgttttaccattagaacccagagccccagaggaccttactctgggggtgtctatggaatgaggcctccttcttaggtaggtctgtactctgaattatagccagaatcttcatcactgcagggcatagcggtaaagagcccacacctgtagccccttctgactccactcaaatcacagttctgctctcgacttgctgtgtggcctttgggaagttactctgctcatcctcggagacctcatccatgggacagggggtaatggtacctagcttttgggtttttcttaggatggactgggctcattgtgcatggaaagtgctagcccagggttgggctacggaagcactctgttacctgctgctgtttctcagaagtgagccctttggcatggagagctggaggaagaggacgaatgctcaaggtctcagggctggagaggaaatcatgatcatggggtggcaaaggacctcaaggcactgccagacactctgggctcttggagaactgttcagagttggcgataactttctgtaatcctaggcatctcttctcttgtcacatttcattgagatatctgtctatcctatttaacccaagcctgattttggataggatccagaaatctaggtgaatttcaggggcctggttgcttcctcatctagcttggtggtaagaagctcagcccctctctgtgggccatgtggagagtacagaaaataaaactgtatcagggccgggcgcgatggcccatgcctgtaatcccagcactttgagaggctgaggtgggctgatcacttgaggccaggagttcaagaccagcctggccaacatggtgaaacctcctctctactaaaaatacaaaaaatagctgggtatgggggcgggcacctataatcccagctactcgggaggctgaggcatgagaatcacttgaacccgggaggcagagtttgcagtgagccaagatcatgtcactgcactccagcctgggtgacaaagtgagattccgtctcaaaaaaaaaaaaaaaaaaagacagtatccgaggaggagatagagattgatgcataggagagaggtccagtttttatccttgtgcaatagactttacacatttctaaaatatatttaaccaaaataacaatattataactgatgtaacttaagatctttaactgcatgcagttctaaatgtggattgtgtttttatgtagttctaatcagtatgtaaatttcattctctgtcacttaacatttttatataaatcttttcatgcactactcatatttttatcatagtttttcattattgctagtgctccgacttccccctgagcattttgttttgattctcattatttcactactataaatagtacagctaggaacatctttgtgcaaatgcttcacacccctcgccttggatagatgcggtatgtttcccaacgttgggtagcaagatcaacacatgtgagttattttgtatttaacttccttgcttcagaaagccagttctgagtaattggcaattgtactagttcatttcaagtccatgaacataagtttttcttttttttccctaggtaacttggcttgtttaataggtttatggtggttccttaaagttgtttttattagcattttcaactgctgagggcttttctgtctatttttaattttctcaagtcttttcacacacaggtggcatcctgtttgcttgaaggggcattaaaattgctgttttatccaatttgcattaaaatgaaaactaaatacatctacagattggggctcggtcatgttgaatggttttgaggtctgtttacataaagcaaatgtttggcgtatactaggtttgcaaagagtggcagactagggggttggcaggtgaagcttgttcaagacaatggttttgttggttttaaggtgttgagagatggtgggctacatctgtacagttagacttgggtttatactttctagttaaaaaaagtacctgaggtttttttttttttaatcacctacttttttttctgtttattacatgtatcataaaatataccttaatcaagtcctacatatccatgactatatacatattaacatgtcaaaagtctgcattcctttccatacatgtatgaggaatttgtgtttgagcagaattctgggggctacatcagaaaagcaggttcatctgggctgtactctttggcacagaaataagcttgatgtgtggagaccaagctcagatcaggggtggagggaaggttgggggtcactcactgctgggatgtaggctgtggactgtgtttgttggggtacagtggaaaatctgagctctggtcttatctctgccactgaagaaaggggaccccaggcaagctgctcagtcagtcgcttttcctcatcctcaaaatgggagagcagcctgccttgggagatatcagtgaggtagcaagggtgcaaatgctatgaagggagattcagcatgtgatatgcaaatgtgaagctcctcttcctctagctgttacatttcttcttaacgttgatttggatgaaggagtcagatccatctttcacgggacagtcctacaaccgttcaaaaccagcaatccatcctgcgttcccatgactcactctctctttggttttaggggtctgcaccatgtgatagggccttgttgaatgcccttgccctagaagacggcctctcaaaccccaggccctcagctttcactgctgaggtgggatcgtgtgtgcagagcccagagggaaatcaccatagtttcttaggggttttctggtaatcccaacactacattaactttttttggcagccacatcatagtgactaacagtgaatttacagttagcctaaatcctattttttaatccatccactgctaaaccacatctttctcatcctagactggggaaggctttttttttttttttaaatctacatgaagaatggctcatttatcccacttcacaagttgcgttttgttaaacttggcatgacttaccagcctgtgaggatttcaagaactttttttgatcctctgttaaagccataatctctcccaatcctgtgctcaacttgatgcttcttgtttaataaccacaagctccttcatacccaattaaaaggcgtgaacaggaacaattaaaacaacagtctgccatccaggttaatgcagacatttgattagcagtctttagaagaaaccatttgaccaactaggaattcacctgctatcatctgacctccttgttaaactctcaagaaaatggggaagaactcagacaaattgaagcattgattcatcatggtaccaaatttctccgctcagcaaccaactttgtgacccactcagagggggacatgagatttgcaggagttggaggttgagagggaaggaaaaagctgagatcatgatttgaagaggagaagttggaggataacttggtttggggttaaagatgacaaagagtgtggttttgaaaataacaactttcagaggactggagagtaagagaaaagaagctcttgggaggaaggggcacatggtaagatgctatgcccccatgcaccttgtacattgttgtcttgaagtactgggtggtgccaccactacaggcaacaagtgggacatcaactgtcagaggtggcttgaggccagggaccctgagatctgccctttttgcccagtctgtcgctgttcagacagtggtgtgctggaaccaactctcacaagccaatggtgtccatttctccccaactcccctttcagtgccatcatgctggtggcttggaatcagccacaatgaaagtatttacaccagagaaattggcaagtgctacaaatcaaggcatccttctctcagattgccagtggccacacacacaccaggcacttattctcgctgcccctgtggccttccagctcacacctgtgctgtatccttgtgccagatttatatttttaaaatgaaaatctgcttttccatggatgatgttcaaaaatttcttagcagattgccaccttctggtctcatttcccaatgacccctcacccaccctcttcaccagccctacaggcagcatgtcatggggtttcctgatctttctgggtcactttttcctaagatcctgaggcccagtaggcaggttctcttctgtgatcatctggtcccatgcttagagttctattagagaccgtagcaggctgtggctgtttttgtgtgttttgttccgttttatcttttttctttttactggattatgatctaatagatggggaccttcttccctcttctgtttatcttcatagctccaggtctgctatggttcctgaaacataggaaggcagagagaggagggaaggaaggaaagaagaaaggagggagggagggaaggaaggaaagaaggaaggaagacaggagggaagacaggaagacactccagccaaaaggcattcatgacctggcaagtaaggagcacaatgagtataatttttgaagaactaagagaagaatggagcccagaagtcaaataggagataagaaaaatctggctagctgcagggatcaaaggctttgaggggaggagaggttcctttagcaagaaagcccagggtaatgcatccctgttgctcccctcctgccccgcaagacccccccaagccagctggcctctgagctggcaggagctggcaacagggggactcccagtgggtaatgggtgcgggggtggggagctgaaaacgtggtaaagtctcaacaaatgcgttttgtattacattcaattatagctggcaataatcacaacctttctggttctttcctccgcaaggtaatggggagaaagccttggagaggagggaggtgatttagcaaatgctggactggagggccctggagcaggcagaatgctggccctgcgggaactgagggctgagagggctctggttggggagggggcactgtgaggagccagcagggcacagccttgcccagaaacctaggaccagctccctgagactgcagggtcattgccaattagttaagtggctgcactcagcaggcctttgggataggaaagggctgcgttctccatcttgttgatgtggaaacagcaaggggaagtgattcagaggcggagtggaaataaagtgtgtgtctcgtgacattgtgacttctgctagatccaaagggctgcacttgactgtctcctgggaagcttccttccatggacaggcgcctgtggtgctttcgagacaggcaatggggctgtgcaggagcagaggagagggaggcatgatctgtggaggtggggcaggtgcatggaggaaggcagggctgggtgaaaaggcagcctcagtgcacggagcactggaggtagaaggggctgccacagccacctgatcctgcacttaggaggtcagtttagattttttaaaagtcaggtttaaaggccaggcatggtggctcatacctgtaatcccagcactttgggaggttgaggaggaaggatcacttgaggccgggagttcaagaccagcctgggcaacatagagaaaccctatctctatacaaaataaaaataaaaaattgaactaggcatggtggcatgtacctgtagtcccagctacttgggaggccaaggcaagaggatcacctgagtccaggagtttgaggctgtagtaagatatgatcacatccctgaactccagcctgaacaacagagcaagcccctatctctaaaaattaataataattaaaattaaatttcagaattaaaaagtgggtcttagtattatgtttctaattctctcttcttccaagtcacagacacttaaaaaatgtatgtgccaaggagtttgcagaagtaatggaagtaacctctgatactccagaaaattctgcaggataagtaatagtgacctcatgccccaatggaggaaactgaggcctacagagattatcttgtccagatcacacaacgggtccatggcagagactcaaggctgccatgttgtcacactcacgtaatggcccagttgtatggcttaccagccctgaagaaagtggtttaaatccaggtttgaatgagttaaatgtacgcgccttctccctgacatcatacggcctttctgactaatgggcccctttccactctctctcaaatcaggaacagaacctttttttttttttcttgaggtgaagtttcgctcttttcccccagtctggagtgcaatggtgcaatctcggctcggtgcaatctcggctcactgcaagctccgtctcccgggttcaagggattcttttgtctcagcctcccgagtagctgggattacaggcacgtgccaccacacccaactaatttttgtatttttagtagagaaggggtttcaccatgttgatcaggctgatctcaaactcctgatttcaagtgatctgcccacctcagcctcccaaaatgctaggattacagtcgtgagccactgcacccagccaggaacagaactttcagtcctcaagaccatgcattttatgtttgggactctcagcatcccctctggtgtctgcctccccaagaggctaagctgtttactgaacacaacatgtgtaacattaccctacaatgtcttcaaaggcaagagttaagttttcctgtgatatttattcctgtaaccctagcatctcccctgtgccaggggcacagtactaggtgcagttacaacctggtgcatctggaggggacgtaaatgctgcttcagttccccctcctgcaggcaggtcaatgtcttgccattcaggaagagcataatttattttcttcctgaagatcttaagaactcagagattgtccatcctcctgtagtaccctttgcagattttggccaagaagttcttacagacaatcagaagttttcctgttttaatttgagcccatttcttgtgtttgttattctttgactttgattgtggcagatttgggggccaggaggcaaaccgaagcccaggatggctcagagccagggttttcactggtgccacaggatgtagtctcctctgactctgctccgacggtctggggcagaccaggaagcagggaggacagaatgccagggcttggagagccaggaaggtctggagaaaggggcagagtttttggctcatgagttgagcatcagaggattttgtgatcattaaaggccagagataggctattgacgagtagttcaaataatcagacaatatttagaggcgtgaacaagttctatcatcaagaagaagagctggagtcagcagattgttctcatctcttcccaactcagcattcagtggtgatgtgcattggtacctgaaggtcagtcatggtgggaatttttacactacggaaattggcaagttctacaaagcgagcttttttttttttttttctggagcactactgacaggaggagcaagatacagggaatacaggtcatcagacaagattttggaaaaaaggcaagtgaaaatagtcatgatgatagagcctttcactggtgtcccactttattgcttacgaggaactctcacttatgttttctcacttcatcttcaccacccttctatgaggaaaacagggtaggcagcattaccctactttataggggaggaaaatgaggctgggataggtaaagttacttgcacaagattttagagccagtcagaaaatgagctgggagcagaacacaggcagggtgagcgcaagggaagatggcatggaattgagagctatgttctctcaagaacctgaagaggggtggcagatgccttcctttcatggaaccgttcatttactttgcttcaaagagttctgagtgttcattacagatctgtgtctacagctcagagttttgggtgcacttgaggaagttgccatgtgtcaatagagacatgggcaccaccttcctgggcctgaggcttttgatcaaacctatattctagtgttgagtccgtctaggacctctcaagacaaagtcctggcacaagaagggtgattatctctaagccaggagaggttctggattcttcactgactgggaatattcgatgctaattgtcatctttatctttcgtggagtttgtgccgcccttaggggatttcaccttcttccaaggcagctggggaagtgggagaaactgtgggttttgattaaaacctggtttgggatctaagtttgctacttagcaggcatgaatccttgaccaaatggcttagacctttttgagtgtgtcaccatctgtaaaatggccatcttcactcctgcccacctcccaggattgggcagcagattgttgtgcaaagaacttgtgtttctgtatagatttttaaattgtaattacttttggaatgagcatccacagcagatgtttctgctgcaaagggctaaagggagaactgaggaacttgcatcaggctgaaggtagaggtagattctgggtgacagaaatgactgctgaaatatttctccttgagctatgttggtgactgcagttagtggctcttgaatcaggggccaagggagagtgaggaagataagacaccagagtcctccaagcacgctgatgatgtgtctgggtgggctgcattgggtctgatgtacagtgtgaatctttctctttggtcaggaccgatatgggagttggctcctgagtgggctagaccctgcccagccaggctgcggaatgggaggacaactatcagggtgtggtttctcattgctacatttttttcttaatagactatttttagagaagtttttgtttcacagcaaaattgagccgaaagtgcagagtgttcccacatgcaccctgccctgacacaagcaccgcttcccccactatcaacatccctcaccccccagagtggcgcatttgtcacagtccatgaacctgcgtggacacatcatgatcgccaaagatgtccaggggcctcagggccataggctcactagatacagtatatcctgaagctgggacctgctgtatgtgtgttgcctccatagctgcatatacagtcacctgtcacttaagggtaaggctgcattctcagaaatgcatcattaggcagttgtgtgaacatcagagtacttagagaaacccagatgctacagtctactacacacctggactattgctcctacagacctgtacagcagattactgtactgaatactgcaggtaattataacacaattgagggtataaataccctagatccctcactctctgggttgggtacattctgtcctggttcctagagtttccagcaggattaaatggcagttgcccaagtgatcacttacttgatcactctttttgactgttttcccttccctatcatcatttctctggtttacttacacaaacctagatggtacagcctagactatatggtatagcacatggctcctacaaccctatacagcaagttactgtactgaatgctgtaggcaattgtaacacaatggtaggtatttgtgtatctaaacataggaaaggtacagtaaaaatacagtgtaaaagataaaaaatggtgcaccggtctagggcacttacagtgaatggagcttgcagaaccgaaagttgctctcggaatctgcgagtgagtgtgagtgaatgtgatggcacaggacattactatgcactactgtagactttataaacacggtgtacttaggctacactaaatttattttttaaaactgtatttctttagtaatagattaaccttagcttactgtaatgtttttactttataaactttttttaaagcttgttgatgcttttgtataatacttagcttaaaacacatgtgcattgtacaactgtacaaaaatattttctttctttatacccttattctataagctttccatttctaaagatttttattttttattttttttactttttaaacgtttttattaaaaacaaagacacaaacacacacattagcataaccctacacaagatcaggaccatcagtatcactgtcttccgcctccacatctcgtcccactggaagctcttcaggggcagtaacagacatggagctgtcatcgcgtatgagagtaatgtcttcttctggataccccctgaaggacctggctgaggctgttttacagttaacttttttttttataagtagaaggagtatactctaaaataatgataaaaattatagtagaggaagtacataaaccagtcacataatctttattatcattatcaagtgttatgtaccacccgtaattgtatgtgctagacttctctattcctggcagtgtggcgggtttgtttataccagtgtcaccacgaacacatgagtcatgcgttgtgctctgaccttgccactgttatgatgtcactaggtgagaggaatttttcagctccattccactctttggggaccaccatcttatatgcggtccaccattgcctgaaacatgattaaatatgccatattgtgctgtgtgagtatatttgcctgttgtctctctgactagagtgtgtgctctttagggaaaggcatgcttttctcatcttcataccctgtagcagggctgccactgttccctcctgtgtcccctgggccctgccatttcagtacaatcctctcttctacccacctgctgccagctctgcacctctgtgcctgaggactttctcagctctcccttgtgcagaactggctggatatgctggaacaatgactgtaagagtggtgtataaataccccagatccctccctctctgggtggggtccattctttcctggctcctagagttcccagtaggattaaactgtggttgtgcaagcgataactcacttgatcactcttattagctgttttcccctccctgtcatcatttctctgatgtttcctggggttacctctcaaacgacttccccctggattccttgttgaaggtcaggggatccgggttacatcttcactacatagcagagtattgacacacaggacatgtccagcagatgtttgttggaaaatggtatggatacctctagaatagacagatacttccagaatatatatatatcttttagataagaatatatatatcttaaagcagattgcatattcttctctccataggtcttatgccacattttgctgcccttgtggactctgagcttggtgctgcctgttgtctgcctgcccctgacctgaaggacatgcccagctccttctctcatccttgcctctcttttgcatcttcgtaatacatattcactttttaaaaaaggaatggctctttgaagctaatggctatctaaatctttcttttctattgtccagcacagtgtgaataaatacatacaggctatgattccacttttcaaatgtgtgactccatgttcgtgttttaacattgtcaactccatcattttgcccccaactcctggtcaaggaatttccctccctctaaaatcacagtctcttcttagaaaggggatatttttctttaagaaggggtttcaggataagagctaagctcgttctagaacagtggtttccaacccaggccaaacgttagaaaagtcctgggaaacgaatatgtcaatgctcagcccagaccaatttgacagcagtgtctgaggttagggcttggtttagggtttctgaaagcttccctagtgattatgtggagctaaggccgatgccatccatctagagctagaatatccacttcttcctttgggcattccctgctttagatcagtgggagataaaccctactctactgagttgtattggacctagaggccaggaccaatgttgctgattcaaggtgaactacagattcctaggattcttatcatctacatctgtgtcaacccaggctgtctgcagaactgggctgggttttctagagtcccagctcagctccttcccatgtgcagcatgcccttccctgcggggctgctgggcagagcgctgttcctcttgaatcctcctgcatgtgatcagtgatgtctatgtgatgagctcctgtcagacggaagcctcccaccctgaaagtttttgttggcagctgaggatgggggtggacagcatcagttgacagcctggccctccacctgggccctttcctgccttctccattcccattccctcggggccacttcttctccaatctgtttcttctcagattttccgccttgtccctgttcctctcctgctattttctactgtctcactctttgctttttctgctcagctgtgccttggaaccaagctgtgaccgccttctctcacagctgcctttgctaagggtgggccccttgcctgggtgccagggtggagggaggaatgggtcagagagaggggcttccaggagacagagctcatacccctgggagccccaagtctgggtttcatacctggatgcttctgcaacttgcccctttctgctgcatctttcccagtcaagagagccaggtgccttgcaggggagcttttgggaatgggagaatatatagcatttgtgtctgtcttggagctcggtgggtgctgtccctggggccatgaggtatgtgggcctgtgtggggctctttcagggctgaccctctgctgtctctgcaggactgcaatgtgccgatcttagctgctgcctgagaggatgtctggggtgtccgagcccctgagtcgagtaaagttgggcacgttacgccggcctgaaggccctgcagagcccatggtggtggtaccagtagatgtggaaaaggaggacgtgcgtatcctcaaggtctgcttctatagcaacagcttcaatcctgggaaaaacttcaaactggtcaaatgcactgtccagacggagatccgggtaagtgtgaagtgtctgccctgtccatctgtctgtccctctgtcttcttcctgggcagctgagcagctctcctgcagcctcgcagctctcccatatccacccctgggtggaagaggtgaggtggcatcagagagatgtgctcagcctgcatcaccaggcctgctctccagatgttcccatactacttctctaggagcctgggaaacacatgttgtagcctttgcttgaaccccagataatttgtttggcctctgattcaattcatttcaacttattaagtatttatgatacttgaagctctgcaagggacttaaaagctgctgtcctcaaagagtttacactctgatgaaataggaattagagatacacaagtgattgcattaaaaatagaacaaaactggtataagccttgtgtgctgagcatgtacaggaaggcactggtggggcacttagaggatgacaatgaagtagaggtgctttgagccaggtggagggttaacaggtgccctgcctggcaacacgtccttttgctcactcctacccagaatcacaacatctgttttgcaggtccaggtacccaccttcatcagggcacctggacaccaggatgccagttcaccttaaccaaatgtatatgagattgtcatcataagcagagctccaacatgctgaactaatttcagtcatctacatttattgaacaattactgtgtggagcctgggccaatccctctacacacattattccattaaatcttcccagcatccccatgagtagatacactgaggacatacctttcctctgcccagagcacccctttctgatgatgggagggaaatccagattggttctcaggttgcttagtgggtaatttgaacaaaggaagcaggaacttttgggaaagctaatcaggtctgaggacatgggatgagccatctccagctcatagccaacctttcccatgtcctgaaagccagtgtccctaaactccatgaatgtttcctttcgttagtactgctgtgccctggccacatcatcctggctgccttccgtctgctatagcacacgctgtgcttccacacaccagagcagagtgtaattgattatgtcactgtcatggccagttatcaccattgattacagtttgattggctctctctgtttcctgtaactgatttgattagggccttgtttgctcatctttctgatataaaggcacaattgtgtcctgagagtaagccctggtcatcttcctccaggaggatgttttcctctctctttatccacttcatgagtcttcctttgggtatatcatttttgcaaagagctgatgccatccactgtgaattttactagtttaattttcagaagttaacctgatttccaagtttagggaggagcacctcattgttcttttgtgctgaaaaacagagagcagcaggttagttcatattaggacatgttccatagagtcagcagtgaaaagggtcctgaaaaagaggtaggatttaaagcagtgacactggggacaggaagaggctttccaagagtggggaacagcatgtcaaaaggcagggaggcctctgaacagtaagtagttcagtttgactggagtatggattatatttagaaaagtatctaaaatcaagatcaaaaaggaaagttgacagcagagaatgaagggcctagaatatcaggcagagaaatttggaaatggacaggcactagggaacaacacatatttttaagcaggggcaagatattcctggagttgtatgatataccctgctgggtgtttaagggatgaaagtaacacaacaggcctatggagaaggcaatgagacccaggcttaagaagaatggctttgaggcattatctggggtcggtggggaacagaggtggagaacagaagtgactgacttccaggaatatgtccaagccttctgatttttcctgcttccaatgtctcctgcaggcaaaatgccacctgcttattgcaaatagctgagggtttaaagccacttagacttctagccaagtcctgctccatccttactggttgtgtggcctgggacctaatgattaactgatctgggcttcagtctcttcacccggggatcatgctgtaaggattggagatggtggaggagaagcacaaagcacacagcagtgcccataactggaggctattgactgtgtgggtattaggttattacccagctcaggaatctccaagggcctctaattgcccagagaataaagtgcaaattgtcttcttttggtgtctatccaggtatctgtcttattttcaaataaagaagtaatatgatcagatttgtgttctaaaacaacaacatggtgttctgcaagatgttaagaagtgtgccctcgggaagggaatgtgtggtcaaaaagattgggaaatgtttggttaaacaattctgaacagattcttttgcaataagacttctcagaaccttaaataggctgatatgcctggtaaatcactaagaagggccacagaggtgatattttcttaaataaacaatttcttatttgcctaaaaaaccctccttttaaaccactagatctctggccaatcatttagggaactttttcccctaaactctgacagcagagaaaaaaggattgaattaaaaaaaaaaaaaaaaacctggccaatgggagatgggttaggaggctgtggtcatactgcaaaaggaaaatgatgaggacctggactaagagaatggtgttgggaatagagataaatcaacgtaattgagtacatctaaggagacagagtcaatagaatttgatgattaactagatatagggagggaaagaaaggaaggagaaaaggatgactcaagcttttgcttgggcgactaaatgggtgttggtactattcattgagatccagacagagaaagggagggcattctgagatttcagctttacatgtgttgtgtttaaagtgtttatgaaacacccccacggaggagcgtgggtctggagctcaggagggagaaagaatctagagacaagattcgggtgtcattatgcaatggatgccatgcaaatgggtaggcttacccacaaggaatgagtagaacagaagaaaaacagatccagcacgaggtcaggcgttcgagaccagcctggccaacatagtgaaaccccatctctaccaaaaaattagctgggtatggtggtgtgcacctgtaatcccagctactcaggaggctgaggcaagacaatcacttgaacctggaaggtggaggttgcagtgagccgagatcgtgccattgcactccagcccaggtgacagtgtgagactccatctcaaaaaacaaagagatccaagtgggaaacctggggaaatcgacttctaaaaggctgatacagaaagagcagccaatgaaggaaaaacaagaatcagtcaagagaaccaggagaacaagagcaagagaaccaggagaaccaggagaacagaatctgaggagcccaaggcagagggggctttaaggaaatagtggctggtagtgtcagatgctcagaaaggatcccagataaggttagaaataagtgcatggctttagcagcaggtgccaggaatcatctttgtttgggcaattttagtggcaagatgggggcagaacacattgtgcaatgaattatagtggagacagtgagtataagtaacatttaagagaggttttgaccaagaaggaaaagaaagaagggaaagctaaaggaacagtgttcactgcggagggaacagcatgtgtaaaagtcctgaagtgggaaggcacatagcgggtttgagactaagaattgctaaagtttggctatttaaaccatgttaaccattttggttttcattccatctcttatgggaagccactgatataatttaaaactatgagtgacatgagattgtgctttttaaagatcacttgggttacataatggaaaatgcattggaggaaggcaggaatggatgtggggaaatgttatgtggctattacattgaatcaaatgagagatgacagtagcttaaattaagattatagccatggggatagtgatggtgatggtgatgatgatggtgatgatgacagtagtggtgatggtagtgatgatgatggcagtagtggtgattgcagctagcactttggaaagcaataatatgcatcatcatattgacttctcaaaagaacccaataaagcacaaactattattatttccacttcatatataaggaaactaagcacagagaatttaagcaaattgccagtaaggggggaagcctatttttaaacctaggcaatgcccttccaaagcctgcactcttaaccaccgtgatcaatggagagaagtgattataatccatagaattgaggagatgaaaggcttttgtaatgacaggagattcacgaatgaggaagagggaggtgtgaagaatggcagccctggtctgggtggtcagggtcccattgcctaagatgagaaacactggaggagaaatccactgcagagtggggagttcacatgcccagttttggacctgtggagtacaattgagacacattaacatcttcacatggaaatgctgagtagatccttggatacataattctggaggagggagccaggttggtcgtagacacttgagtgaggtcagtccaaccatctggtggttgaagcatggctgtgaatgagatcatttgggaaagggttctgaattactccatcatccactccacaaatgtttgttggatccttccatgtgcctggcatcatggtagcatggcctagggtattagcatatcccaaaacacaggtgtactccctgctttcgtagggcttcctggccaagagtgagactgacatggactcacactaatgaatgaaccttctcaatctgaagcatatgctcctacaggaaaacataggtcttgtgagaacaggtcaccatcatcatctccatggctacaaccttcatttaagctactgtcatcactcatttgattcactgtaatagccacataacatcttcccacatccgttcttgcctttctccaaagtattttccattgtgtatcccaagttatctctaaaaagcacaaccttatgtcactcctaggttgtgagagcaagactgggtttacatgcagaggagcagctttgctgtgtagtgcctgtgtggggatgcagtgtccagttgggagtctaagcccaacttccttgtctgggaccctcttggagcagcccttcttctctctgcttcctgacttctttttgcagtctcctttcctagcttggctttatcctttgatggagttttctacttccatctttgtatcttcctttcctcattttcccagtactcagaatgctgccagccctttcaaatttgccaagcacatgtccttccccaagaacacttctgagatcctgacacccccacataggagtgtctgatcaaatggaagcagtcgcgaatcgccctgaacagtccacatggcaacacatttccaaaacatagttactccatgcatatttgctgatttcatgttttggtctttattctctgcttttttttctgcagacgtagtagcttcattgtgatttctccatgttgtaaaaagctttgtgaataagcgctggcccctgtgcctaggacctaaaagaaattaggcaggtgttgcagagaacaatgagaaattgattttgctcttctggattttctatttcctttttgtttgatattcataggaaattgtgtttgtttaggagctctgaatttctggggcaagcagaggctcatatcattatatttttctctacagtgctaatttgcttgtctgggaaaaggggtaagatgacactctgaaaacaactggcagagtggcacccagacgtgcccacacagggcggctctctttggctcttgctgctgctgctgctgctgctcctcctcctcctcctcttcttctttctttgttcttctttcttctgtcttctttcttttttcttctttcttctctcttctttcttttttcttcttctttctcccttctttcttccttttcttctcttcctcctcctcctcttctttctccttctccttctctgcctcctcttcctcctacttctcctcctcctctctctgtctatctctccttcctttccctctcctttctcttcttctcaagccatatgtcctgatttgtctcatccccagtttctatacattgcccagggatgactatccacagtgcccctgtcctgccagtctcaaatgtatcatgatatgggtgacaatgacacaataatgacatggtcaccttcgtctaaggccctgctctctcctctccctgcctggcacactgaccggctgactcatggtgttttctccctccagcttcctccagttgacccactcttttcatgtgctcatctctgcctatcacaagaccatcttttctcacccaggaagacattgagcagaagcagagatattcatctggggtatggtgttgttcagaggtgccgatggagtcctctctctcagccagtttctaccaagctggaaacctaggttcaagattcatccttgttttgtcctgaagcatcaccccactcagaattcacattcacatcctcaggaggggcagaggctgcagccatcctgtgccctccccacccagtctggatgcatccctcccacccgcagcagggactccaggttgcaggggtggccttgggcattgcttgcctggtgcatgaggaaggctgtccagttccaaatgcagcctggtccacacacacctgtcctcaccaccacccgtgtgcattcagtgatcatacaatcccttccagaaatccccagaggcagactgcagatgtcagaacccattgactttccccttcgctccttaaacccatcacacactcatcccagttagctttgagtttaatctattgttactcaaccagacacaaggtgcacagggtgttatggactggatatttatgtcccctcacccccaattccatatgctgatgccctaacacccagtgtaatggtgtttgaaggtaggggtattgaaaggtaattgggcttaggtgaggtcatgagagtgggggccctataatgggattagtgtccttataaaagaggaagaggctagattcctctccctctccccctccctcccttcctctctttctcttcctctctctctctctctctctctctctctctctcttagccatgtgaggacagaaggagaaggtgtacttctgtaaatgaggaagctcacaccaggagccaaatctgctgtaccttgatcttagactcccagctctagagctgtttagaaataaatgcttcttgtttaaggcgcccagtcagggtgatttgttagagcagctcaagatgaccgggacacaggccagcagttccctgtgcctggaagagcagtctcaggcacacaggccattggctcaggttctctgtatctggaacaatctctgtcaccctccttcagatgctgctagagtagggcccaaggtcacagtgcaagaggtagggaggaggaggttacttgtcctggtaagttgccatttttgaaagaaaagttaccctagagagaataaaatggaagcacacaaggctggtctcccatgcatgaaaatagtccctgaaaaagaggaaagggttcatccaggaaaccacaacccagtgccgcagtatttaaaaaggtatattcacaaggaccttctgcaccccctccctgtttcctgtgtgtgctctgcaggccagcccgcccccacacagacacctacagaggccagcacaaggtagacacgcaggttccgggcctttgtggatctccacgcccacattcattgcatccacaaattggcagtcaggtgcctgggctttcatttctatttttaatctggtagttgcattgctgaatgtccttgttagagacttttatcacgtcaaaatgaatgctttcagggtgttaagttatgctcacttgtattattttgttcttcaatcacttattttagaatgatcccttacatgtgttgcaaactcagaaggtatataaccagtgtatcagttttctatggctgccactgcaaattatcacaaacctggtggcttacaatagaaatgattctctcacatttctggaggccagaagtcctaaatcaaggtgtcagcagggactcagttctcctgaaggctctaggggaggatctctccttgcctgtcccagcttctggtagctctaggcattcgcagcttatggatacttcactccaacttctgcttccatcttcacgtggacttctcctctctctgtgtctcttttctgtatcttttacaaggatgcttatcattggatttggggccactcagtccagagtgatctcatcttgagatccttaacttaattacatttgcaaagccccccatttttttttccaaatgaggtcacattcacagattctggggttaggacatggacatatcttttgggggccaccattcaacccattatgaccttcaattcagatcatagtatctgtcactggtacctccattcaggcacacacagaccagtgtacccagatgtacagcagtgagtgggccttttgtccatttaaaagctttaattatgtcattttggggtatgtgcagaagaaaatagagactcaccgaatgtgtgagtcagctcttctccccaggagccgttccacacctcctggaagttggcagcgggaaatgtgtaggggccctttatagttggcacattgtcatggttctcacgatgattggggctggggcttggcatttggtgggtgggctgttgccatgggtgaacagtcccatacaacaaagaatcctcctgccccaagtgccagtggtaccctgttgagattcactgatgtgaattaggaagcattatggtaccatgaatgctctgaacccagtccccatgtgaaaaataaaactttacctgtcatgttgaagcgacacctgcccctcctgctctgaggcaggcactgcatgtcaccggaaagaatggtatagtaactgctttaaaagatattttagtagggggactttggggggaaaaatctgtgaaggccacctggtactctcccaactgatctttattgttcttcatccctcctcaatctcagcgtggcatcaagaacgcttcatacggtttatgggtaaatcagaatttttgacagaatggtctcatttttaacagaacatttttatttttcagagacacttatattctgctcaatatagtgagcggaaagaaagggccttctaaagaaaaggccttttgttaaccttttcagccttttttctgccttctcagaactctacttcccgtcttcacacacagcagaaggtgcaagggaagagcctgctatccaggccctgggaacataaaacccttcatgattctcttgctccaaacaggaggaagtcatttttctttgccctgggaacataaaacccttcatgattctcttgcttgaagcagaaggaagtcatttttctttgcattgttcatcccagtcactggcatggccggatcagccgtggtcatgacctgatcatcctatgaggctccttgactgcacttcacccacctgctgctggtgctggctccagctcacaaagggcctcagatccctttcttcagggattgcttccttcaaccacctgtacccctctatagggctcagcctttggaagaatttagagccactactggacaggtgctcccgggaggtgggtctccccaggtgccagttcccacccagtcaggggagtcagaggaacctctggcccaaggaccccgaactccatttccagctcacatcttcatgtcttaattctagacttcttgggttaatcaactcctcaggttgacttgacccttgagccatgttcatccttccccccttacccatcacaatgctagctaccattttttgagcacctgctctgcacctaccattgtgctaagctcttacgtgtctgtaacccacataaagccagtcagttgttctgaccttgaagccagtctcagtacagcatcacattccaacatatattagtctgccatctaaaaataactggaaatccatttaaatctttactgtaatctctttgagggagagaactgttggggctcagaaaacaatatccccaaatgaaggcctcagcagcagcctcagaagcaaaagtttttctctgactttctcctgccccctgtctctcagccccactctcccccgaggtgccatagaaactaggattgtcttccccaaggtgggtcatagaaaccagaacctcttttcccccacagaaatccggccataaaacctaaaagtattccatgtaaaaacaggccataaagaaattatctgacctacattgttggactataggtcataaggccttgattccagagagggcctgccctgcacccagcaggaaggaacactgctcagagaggcccagaagaatctagacagacaggcctgtctgggtttccccactcagcctgtcaacattagatcagacccttctcctccaatcatatttctacatgactgtccattgtttgctaaacctaagcataaaaatggacaatttctcctctatttttgggtcttcattctgaaggtacctgtgtatgcatattaagtaaatttgtatgccttttctcctttaatcaatctgcctcatttcagtgatttttttcagtgaacctttaggaagccaaaagccttggcccccacaggggatatcactgggggatcgctgtccagataggtagtaaaatttattaaaattctcataaccgtataccaattaaaagtaaaacaactgtctgtgtctgtctaacccaaggtcagacatggagcattgttttagctctaactggtcaatgtctgtattagtctcctaggtctgctttaacaaagcaccacaaacagagtgatgtgaaacaacagaaaggtattgtatcacagttctggaggctagaaattaaagatcaaggtgtcagcagggccctgctccctctgaagtccataggggaacccgtcctttcctctccctggctggtgattcgccaatggtctttgacactccttggcctgcagctgcatcactcaaatcttgcaccatctccccgtgtgcatgtctctctctgcattcacacttcccccttttttaaggacaccagtcattttagatgacagcccacccgaatgacctcattttaactcgattagtctgtaaacactctataaagtcctgcgctaaggcactagaggttaagatttcaacatatccttttggggaaccacaattcaacccatatggtatcttactagatagatgtataaagttttttggaatccaggggaagaaacaaaaaccttatcacagggagtcagggaaggcttcccaggggccctcatagtgctctctgggccttaaagcataacagggagctcaccaggaggaaaggacaagggggagaggggagccaggggtcccccaggcaggaagaattaaatgtgttcagcacagaggaaagcaagagcatgctgtgttgggggcgaagaaagagagcaactttggagaccaggcacagagcacattgtgggtacagaggggatgggactggaaagaacatgtgggaaaaaaacccaaagggagatttacgccttgtgttcattagtttgggtcttatctgattgtacagaaaatgaggaaccaatgagagattttccaccaaaatcacctgcattgattttgtcctcaacctcagagtgacaccttcttaaataaaatgtaagcaagacttatttttatttttgagacagttttactcttgtggcccaggctgaagtgcaatggtgcgatatcagctcactgcaacctctgcctccgggttcaagtgattggccttcctcagcctcccaagtagctgggttttataggcatgcaccaccatgccaggctaatttttgtatttttagtagaggcagggtttcaccatgttggccaggctagtctcgaactcctgacctcaggtgatcctcctgcctcggcctcccaaagggctgggattacaagtgtgagccaccatgcctggcctaagactttttttcaacaaaagcttaagtgtagtttatttattaaaatgttaagtatagtcatcttactaaaacaaacaaacaaaaaagaatactttgaaaagagtaaggagggtgaattgaattaagcctgggaagcagtttgcaagccactgtcccaggtggggttcctgggaagcagacctgggtgggaggcttgcattggaggaagcgtgttgatgggagctcccaaggcacacagctagtgggagggaagaaagcaggatggggcagaggaaaaagttgggctgcgatgcagccacagcaaaggcctcagcccattccactggagccttagagccagaagagctgtcccaaatcaggatgaaaggacataggtattatgtgtgttcaccagtcactcaatatggatggcccctaggaaaggtgtgaccttaggcaagggccactctttgagtgagagcaatcctggtggaggacagtgggggactcagctgtcatgttgttttcaaaaacccagccactaacatcaaacatgtttaataagcttattaagaaaaaagccaaaaagattaggtattttattagaaataggtgagcctgagaaaatagtgagacaatagagatcactgaagaaagttataaatggatgagcactgacaaaagagaaggaaagtgagctgagtaattaattcattcaaccaccttttcctttttggaagtagattatccagagcacagagacaagccatccggtcctgttgcttctttgtttctgacctataggaagaaaggccagagaatagggagagaggcaaaggtagtttgaagtctttacgctatttgataaagcaactaaatcagtgttagccaagcaggaggaaaagctatagacattttaatgtttgcaagaaagcattcaaaggttcttaataaccaggctgtgagccatgggcagtcggagagcctggaagccctcctgtgggaagaagcaaaggtcttcctgtagcaaaaaacagtcctgggcttacccaaatagcaactgataaaattaagacagtttttaaaaatcatggcacatatggcaatctagtgaatagataatcattatatactgtcattttttaaaagtgatttattaatagagaaagaaatattgactcagtggtagcggtcagggagctctgggtggagtgctgatcttgctgcccctactgtttgcttgagaagctgtttacatattagaatgataaagaagaggattcaggctgaggaaggcagggctcgtgcaagagccaatgcaggtgagagcatgtcaaatctcagcacttacctttctgttaccccaatctggccacccccctgaattcacaccatacctttcctcctacctatgaaatgtaaggagctccttgaggcaagggcctatgtgtgtgcacgagagcccctatctctgttttgcatagtgagtatgtcatagacagttgctgatggtttgaatgaagaagccattctgcagcttaacatgatgaggctggagggctgcagagaggggactgtggctcagggagcttgtcatcctattggaagtacatgtcaaaattgggttctcaccctcgtttgtatgactccaaagttagagctctatctgtgtcactcatggtcaaaaaccttgtttcccccaccttctgtgtgcctaaaggattggcacactttgcaaggcagtcctgtcacagtgcacttctagagttagctcagacttcacaggctgagggtgcatcctccacaagactccctccccttacaccccaattgcaagctccaggattcctaggccattcacacttctgaccaattggctacaagtttgggggtttctgctatcccagcaggttcaacagtttcctaaaacaactcacagaatgcaggaaagtgctatccttacagttttatcatataaatgagagccagccaaatgaagaaacatagaggacaggtctgagggaccccaaacaggaaggtttcatatcctcacaaggctttgccctccagacacaccaacaagatgtgcatcaccaaccaggaagttcacctgagctttggtgcccaggaatttattaggccttattatacaggcatcgttgattgattgattgattgatggaatcactggccacataattggactcaatctccagctccccttccctccctggaggtcaggctgataccatgtggctcaaagcttcaactctctgattacccggttggtctttccagcattgcagcccccatcctgaggctagcagggacccaccatgaatcacctcattagtatagattcaggtgtagtctgaggaacccacagtgaaggacaaaggccatcctaactcttgggaaattccaagggtttaaacaccccctctgcagaaccaaggacaaaaactcatcaaattctttatgatacaccatcagtaaccagcagtggtgacattggtggcaggtgctccctgtcccccaagaacttcaggtttgccccccaggaaagaatgcaccactggtaagaatctgcccagcaccaggcacctcccaaatagcacatttcatgcttagaaagctcccaaggtcttccttacctgaagctgaaatctatcttcctatgaagatatgttgggtgaagagtctcttaatgaatttcaaccccaaggacctcgagttaaattttcctccaccatgtctacaacagaaattggttgcttcttagaaggaaatctgaaaaaaaaattttgtgcaagcagagtcctggagagtttcaccaactagaatcattagctggatttagtctgacccctctcagagactatgggtaggggagaaggtgcacggccgtgtctggcctgatacaaatcttattcaaccccttgatatggtgcctttacttctcaagtggctgggaatctccctcaccagagtctcttctttttattttgaaattatttcatactttttaaaaagttggaaaaaaaaaaaacaaggctaaggactcccatatagctttctcccagatcctcaatggtttaaatttattgttttctgtattgccagctcagtctcttcataagcaggcatacatgcatacacatacacaaatatgcccattatcgttattcttttttctgaactatttgagagcaagttgtagtattgctgccccatcaccggaatgctccagggtttatctccccaaacagggacattctcctacagaagatgtgctgcatgcatctaaatcaggaagtcagcgttgctataacactaccttccacaccatagacgccatccagattttaccaactgtcccagcagtgtctgtttttcctgtctgatccaggagcacacattgcacttagctgtcatatccctttagtctcctccaatctgggagagttcctaaatccaaaagagtacaggccttttgttctataggtccctgaggaggctcttcatcctgggtctctggtctcatgactagatcaggccacagactcatggcaggaagatctcagcaaccttgctgctctcttcttggtgcatcgagacaggaagcccgctgtgcttacctgctgcaccactagggacgtaaaccatgatgatcggttgtttgtgtctgccagatttttttgtgcatttgtttagtacattctgaggctgaatgccctgagaccatgtcaatatcctattcatcatcaaacctccaccctctagcttcatcacccattgatgaatcctgcctgaatcaaccaacactgagtttgttgccaaatggtgactttctatttccatcctttcttctacatttatttcttggcattctacacaaggaagagtattttcttcttccccaattatttatctgtcttagattctattttatttggcaggatgtaactcattcctatcatatattttaatacttaagtaatcctagatgtggccgatgtgagttccttcaggctaatcctgatttgtggttatgtgtccccaatgttctctcaacactttgtttttatatggcacaaaataacgttccaggcacatcttgtacttttccccctagccctggaatcagccatttctgcaaggagctttggattctttaagtggagaaggatatttgaaaactgcaacttggtgctggggtgtgcaatcactatcggctgtcactgcttcttctttttttttttgagacagtctcactctgttgcccaggctggagttcagtggcgcaatctctgctcactgcaagctccacctcctgggttcacaccattctcctgcctcagcctcccaagtagctgggactacaggcatccaccaccacacccggctaatttttttgtattttttagtagagacggggtttcaccatgttaatcaggatggtcttgatcttctgacctcgtgatccgcccgcctcagcctcccaaagtgttgggattacaggcatgagccaccgcgcctggccgggctgtcactgcttctaagtcctttccataaatgaagctcagtttctctctctctctctctgtgtgtgtgtgtgtatctctttctatctataaaaccatgagtcacacctgcacttccaattccaatccttcacctccaaagatttcaaaaatgatgagataggttggctagactctctaggctccccatctccataagagtttcccattatcctcaatacatttacttctttgctcactcccccctttggttacttctttgctcactccccctgtttggttctttgctcactccctgtttggttacaatctcctaatcactccaaccatctctcttggcccaactcctttgacccctgaccttgccaccacctccaaaggaaggaaaaagaaaagaagatagaaaggtagagaaagagaaaaatagaatgaattttgctttgttttcccagtctggtttacagagcaccagtctgcgaaggagattgctgtgtcaaaataaggctaatattttgttgtttggggggctgtttttttgtttgtttgttttttagtatttaccttgggccaagcaccgttctatggagttttatctaatttaatcctcataaaagcattccaaattggtactattattttgtccatattctagatgagaaaaccaaatccagagaagtttagtatgtacccaagcatatccagctgggtggtggtggtgggtggatggggcactgctgcagcctggcaccagggcttgtactcctggctattgctagtctgcatttcagttatccatgacttaaaaggtattctctgctccccaaccctctcccatttgcagagaacacagatttgttaataaaatagcacaaatatttcaaaaatgatgggatagcttggctagactaatctttctccagataacaatgataaaatctggacaaaatataaaagggaactctctgcaagcactggtgagtgcccatagcaagcacaaactaaaaggaaacctgctcttgagagctaaactgtgatgaatgagatctgcaagtttgtggctttttgcctgagagaactttccagtctggaatgggctccaggggcaaaaatctgcagccttactagcttaaagtgtcagaggatacaatatgagattggcagagcagcaagaagattagcagaaaatcatggagagagtaagccccaaaataaaacattaatttttaaaaataatttatagaagcaaatttataaactacttagaaataaatttaacaaaagacctatacaatatatatgttgaaaatgataaaacattactaaaagaaaataaagaagacctaaataaatagagagatatgccatgttcatgtattacaggcatcaatgctgttaagatgccaattctggccaggtgcagtggttcatgcctataatcccaacactttgcaaagccaaggtaggaggatcacttgaggcccaagagttcaagtccagcctggtcaacatagcatgacccaaactctataaaaatttaaacattaaaaaaaaatgccagttctctccaattaagctatagatttaacacagtcccactcataatgcagcagactttttaaaaagaaagtggccagctgattctaacatttatgtggacatgcaaagacctagcccaataatctaggggatggggaacagcggaagacttaaccctatttgacttcaagatctcatgtaaagctacagtaatgcagacagtgtggttgacattggtacagtatagacaaagatcaatagaaaagaaatgagagttcagaaataaacctagatggccaaatgatttttgacaaagaaaagcaattcatttgggaagggaaagtcaacaaccaatgctgaacaaccgtagatctatatttttgaaaatgaataccatatacaaaaattaattcacaatagatcacaaaactaaaaattaaaactgtgaagtttataaaagaaaacatagaatatcttcatgacctggaggcaggcaaagatttcttaggatacagaaaacgctaaccatgaaagaaaatgttgacaagttagactctgtcagaagacattgattaggcaatgcagaatgggcacactacagacctggagaaaatattcataaaatacatcatacaaaatacttttacctagaatgtataaaagcctcctacaactctcctgcaaatgaaaacacaacagaaaaaatggggaaaagattcaaacaaccactttacagaggaaggtatatgaatggcctataaacacatgaaaacatgttcaatatcattagtcatcagagagatgcaaattacaagcacaatgagacactacgcacccactgagatggctaatattaaaaagactgacaacaccaaatgttagtgaagatgtggtgtaacaaaagtctcatgtcacaggagaaatataaaatggaataatcctgacagttgctcataaagtcagacatacatctatctttgatccagtaattcctcttctcagcatttatccacaggaaatcacaatgtatagtcacaaaaatacttgcacattgatgttcatagtagttcaattcacaatagccaaaaattagaaatagtccaggtgttcggaagcagaagaccaaatcaacatattgtgattcatttacaaagcagaacattaccgattgataagtaggaatgaatttctgatatatgcaacaacatgatggatctcagacattatgctgagtgaaaaaagacaccaaaaaagtgtatgctaaatgattccatttatacgaagttctagaacaggcaaaaccaattgaaagtggtgggggtagggtaaggttgactggagaggcgggaggtagtggggccatgagggtggactgagaagggatatgggggagttttctggggatctggaaagttctataccttaattggtatgtgggttacacagttgtattcatgtgtcaaaattgtatagcttcaatttatgcattttaatgtatagaaattttacatttaaagaagaactgtaaaaaaataatagttgagtcacagctggggagtgggtggtgatattgatgaagcaagaaggcagaaggttggtaattgttgaggctgggtgatgcgtacatgggggtttattatactcttctgtttactttgtatatgtttgagatttttgataatcaacagcacaggagttctagccctgaggaaattagatattagccaagtaggtttcagctggagcaggagaggactgtaagttcaaaagcaccagtggtgggggctccaggagggacttgggagtgacgtgggggctctgagtaatgcattattccggatgacagtggacagagcagggcagaaggtcagggacaggagaaatgggtagagaggatgacaaaatggttaacttcacgggcttgcactcctcccccaaccagatgtccctctcactgtaggagtgccactgatcccagtcttcatcccctccagggcctcagttctgattcctgcactggttgttacaactgctcacaagtgcattctgtgcctctgtttccccatctatctcacagagcagtcgtcaccctctgtgacgggcattttctttcctaatggggaagggatttttcaggctgagggtcttctagtttcacaactccctggagtccagaagggctagcaagaggcagttagcccgagacagatgggtgcccaggcaagcaaataactgggcattccttcaaaccaggattatctaaatattagcatgacattttcctagtggagagagaaagaaatttatttacttctgagaaaaataatatgcctccttcttttcattccaattaaggaactgattacagttgattgactaaattagaaactgtcttgggaggcatgttaagaaaatgtaaaatctaaataatcaaatgcccctcctctttttggtttgacagcaacctattatgcattatttggtctttaggctgatgtaggcttgatggcacgcacattgcagacatatccaacagagatacgtcggtgccttcgggtttttaaatttatatcccagaggacactctgctctgtcaggagtgagctcaattcaccaacaatatgtggaactacatgagaaacctaagttaaaatggcaccaaagtccgggcgcggtggctcacgcctgtaatcccagcactttgggaggccgaggcaggcagatcacttgaggtcaggagtttgagaccagcctggccaacatgataaaaccccatctctactaaaaatacaaaaattatccaggcgtggtggtgcctacctgtagtcccagctactcaggaggatgaggcaggagaatggcttgaacctgggaggcggaggttgcagtgagccgagatcacatcactgcactccagcctgggtgacagagcgagactccatctcaagaaaaaaaaaatggcaccaaagtgatttcagaactaggcagggccttacagatggacttctaggcagctgcccggttggcccacctgttaatccatctctggctctaggccaggaagctgtggcatcaggctgggagacaggcagtctattaacctccggttaacaagaaagcaggaacaagagggcacgtggtttcttgccagcactcatttcttgtgtccttgctcatgtggggattgtggcacttaatccttccaagtgaatcttgtccttatcttttccagccccaccactccatgaatcagcttggcctagtagaaatcctcagtctagtgtcccaagattccaaatcccagttccattccgtgggttgtgggacatatattagtttctccatcagccacacgggatggtaacacctgcttccctgtgttgtgtggattcaatgaaatcatgtctgcaaagggcctagcagtgcctggtgcaggagctcagtgatgctggctaaattgcaaaccactcagaaggtctgctgttcacatagtggatgttccgtaattattaattggttagattgtaatgaggtgcagaagcaaatttttgttattctctgcctctttgcattttctccttcacttctgctctctcagttcctctgtctctgcctcatttcacccatttgtcaatttatcagatagagcccattgtgtacaaatcttcccctaaatgctagagaatcagagacaaatcgaacatgaagacagaatcccaccctagagaatcccacttttcaggtctgtgtgagaattatgggagcccaaaggtgggcacccctgagtcatgcctctctcttctcctctgcaggagatcatcacctccatcctgctgagcgggcggatcgggcccaacatccggttggctgagtgctatgggctgaggctgaagcacatgaagtccgatgagatccactggctgcacccacagatgacggtgggtgaggtgcaggacaagtatgagtgtctgcacgtggaagccgagtggaggtaggagtggattcctgggctctggaagtgggaaggagaggaatttagggtggggaggccctgggagtttctcccttagagcactcccctgcctcagaaacttctagcaaacctgagtggcattctaggcttagtcttcctccagtatccaatgcatgtattttccaggacctaacctgggcttcatagactatccccatcccagagccaacacctaaaggtaaccctaaacgggatgctgacagtgctaggggaaaagagagacagaagggtggggaggatggaaagcccaggtccagggctagcctgtgaacctaagagaaacagctgccatgagggagaaaggtggagagtcagggatagctcagaccaccacctgccagccacctccctgttgatggtctccagcccaaccgcagaggagggaaagagaaaaaccagccctgaatgagtggccacgagactcatgggcagcccttccctttgcactaggggatgggcttgcttctgcccttggggtcctactcctttcttcaggcaccagcttctctgtgtcaaccagagcctgaatgtcttgttgcaggtatgaccttcaaatccgctacttgccagaagacttcatggagagcctgaaggaggacaggaccacgctgctctatttttaccaacaggtaaaaagtactttatcttcttgccccgaggctcccattacacctcaaatgccaagcatgaaccgttctctcctagggagatggaaagacaaagcccagattatggagggcccaggctaggaagcttctcttgaagaaggtccttggtctatggtccgcggctccaaccctgcttttctctcagtatttaagcactggctaaactgccccatgtgctcccagctcctcttggacttttctggtggcccaggagacctggctagtgaaacagcaagagcaggtccaagatgaatcctgcagtgcttactacacagctctgcagactgttgtccactaatctagctctgccattcactaatctgatagcctgggggacctcatttacttgcatgaagctgtttcctctgctgtaaaattattatgggaatcataataataatacctactttatagggttgttgtagggaccagatgatatcattggctgctaaattgactctccaaagaaaaattcccttacacgtagcacttacctatttatttatttatttatttatttatttatttatttatttatttcaatgggttttttgggggaacaggtggtgttggttacatgaataatttctttaatggtgatttctgagatgttggtgcacccatcacccaagcagtgtgcactgtacccaatgtgtagtcttttatcactcaccccttcccactctttccccagagtctccaaagtcattcttatgcctttgcatcatcatggttagctcccccttatgagtgagaacatacaatgttggttttccattctggagttaattcacttagaataatggtctccaactccatccaggttgctgtaaatgccattatttcattcatttttatggcccttgccaatttctatggtgtaaataccacccccctcctcagcctatttcaagctactaataggatacctacttggcttacaaaacttctgaaaacttaataaccagctctcagcagctattttgagcatctcaaacttcctggacagaatgcgtatggagtgccaagcccagcaccaggtgcagagcaaagcgcagcatcagcaggagtggccattgctgttttctgtctgatattagttccttccaagatctccctcctggtttgccagagactgagctagacttttcttggcctgtgaatgacatttatcactacttaccaacagagctttggataaattactgacttcttgcaaaatctcagttttcttctatccaaaatggggggcaggggaggggaatctgaacttcctgcctgtggagcagggagagaatgcctgtaaaagcacctcgaaaacctcacaggctcggcctgtggaggcacaagcaccctttcccctcgtgctctccatccctgctccatgcttgtttgtggtggggtgggtggctgtcactcagggaggcagaatgaggcccttaatcttctgaggcctctgtgcagggaagtgggaggtgagggtgcaagcctgatgcttgacctttctccccaccagctccggaacgactacatgcagcgctacgccagcaaggtcagcgagggcatggccctgcagctgggctgcctggagctcaggtatgtggccctgaggcctctgctgggagggcgctgtgctgagctctgggcaggcccgacctttccccatgtccaagatgggaagcaggaatgagtgtgtgggagccaggaaggggagaggtggtgaccggcagcaggtgaggctctgaggggctgggtgttgggtcttcaggatggcaggggtagatgggccagccccctccctagtctcactctcctggcttccattgctgccactgctcttgcctgcaggctgctggcttcttccatctgtcaaccacctttgctgctgttcaagcgattcatcagatgtttcttgagcaccagactagaatctgggggacattcgagcctagagatgtctatctgtgttgcccattgctgtatccccatctccagtaggcacttgatcaatatgtgtgatattagtacatcatccagagaggccctcacacttccatgttggggaggtgacagatgtgtatacaattaatcataatacgaggcagaatgaggatggcaccaacttccatgtaggagccattcatcctgcctgagagcatcagcaagagggtatctgaattgccactggaaggaggagaaagatttcaatcagcagagaacaggggtcaggggagatacactccaggctcagggatcagtggaaggaaaagcatagactggagaatcgtgagcttggagggataagttggggctgatggtggaagacaccattgagacaatggcagtccaatgatatcattagaatgacattgttagaatgacataattagaatgacagtctaaaaaaataggccttattcttagctgccagggggtcattgccattcaggactgaggagggtgatatggctgacctgtgttctagccctgtcttgaccagggcagcaccattgagtttcaccatcccctgccttttcaccctctccttcccttctctctaccccttctctgtcttagagcagtggttttaacatctgcttgcaaatcataatcacctgggagcttaataaactggagacgtcctggccctacccttgggagatttgatttggcaggcctgggtgggaccttatcctaggcgtttttgaccagccccccaggtgacttgaatgccattagatatatgggttgatgggatgactttcaggatgactgccaaggaaatcgttggccaaggattacttcctgttttctagaactgcatttccggagccttatctgtgacctcatggttaatagagagtagaactctgctgctgcttctacggagccagctgaggggcactggggaattctggccccattgtgattctcagtcagagagaatgctggggagtcctccggtggggccagtaggatgggaaagggagagtcccactttgatttcagcatctgaggcttttggtattagcgacagaataggtcaagggcagcttcgagggcttcacatttcgtgactttgtctcaagaagcaagggagcattcgagtcctctgtacagaggaggcctgtggtccctgcagctgcttagaaggcagcccagctcactgccattagtaataatcatgatagctcagtgctggcagaccaggggcagtctgcaaagtttattttattatctgtgcctttcatcccttctcagactgctcggctcctatgacttgcattacatcctgtactgtctcatcttcccctctaaaattagacaagtcgaaaaagcttatctttacctttttatttatggatctcatacctgggatgctagcatcactttgagacacctatcacttgtcacctgtcaagcagtcatcacttagttgtaaaacagcaccacaaagacccattaacattctattttattttattatatcctccaatcatccccaaactattactggtggtggcctaagctccaggcactgcactaatgtattggaggacagggcaaggcatccgacatgactcctgtaggtagtcttgtcaagagtgtaactgctgatatctgctataaccaatgcaggatgatattctaaaagccacacttgttttgtgcaagagatgtattgtttcacatctcctgagtgtgaggaacagagtcagagagatgttcctattcttactggttgaccactgaaatgccgggtgtatgatatcagggagaggatatggaaaacacctattttgtaaaccaaatagaagatttgcaggtctaataatttttaaagttgaatgcagttatttgttatgatgagccattttaaagtcaagttacaactatttctcacccaaagagaattggacacacttcggaaaattaggccataaggcagaattttctagggctgtggctcttgcctaaaaatgtcccagagtgtggggctacctacaaatcatgggcaataaccccttgtcctattaacatcattgattaggtcacctgcctatagatatacaacatctccaggaaaaaaaaaaattgtatcatttcctagcttaaaaaagaggtatgatgtatgcctgagatatgagattagtgaaatgaatcctccatggagtcatgtgtttcctgtgttactctgggcaagtcgattacccgctctctgcccagattccttcatctgtaaaataggaatgataatagtaacattatagtcacgttgtgttactataaaacacgttatgtttctatataacatttgttatactatataacatatatctgttagtatataacatatatatgctactatataacatatgctactatataacatatatatgctagtatataatatgtatgttatgttactattgtatagtattgcatagtatactatagtatactattgtatagtattatatggtattgcatgctatacaatagtaacgtaacaaaccttgcagggttgttacaaagaataaatgagttaatatatttaaagtacttagagcaacgacagggaccaaagtattcaataattatttattatattttacttacttttttctctttacccttcttttgtttgtttattttgaatagactttattttttagagaagttttagattctcagcaaaattgagcagaaggtacagagttcctatatacccccttccccacacatgcacagcctcccccactatcaacattctccaccagaattccccaccaaagtggtgcatttgttacaattgatgagcctacattgacacatcattattacctaaaacctgtagtttacattagggttcactcttggtattgtatgttctatgggtttggctaaatgaataatgacctatatctaccattatagcattacgcagagtagtttcactgccctaaaatttgtccatactccacctatccatccctccttccctctaaccctggcaaccattgatcactttattgttgccatagttttgccttttccagaatctcatatagttggaatgatacctagttaattttattcatttattggaggtgctttataaatgccaaatgtttgatctaaataatgcctctaaatgaaagtttgaaattcagggcctctatgctagaaatcagtacctgcccagtttgaggaaccaaataacttctcccccttgatctgagacacctaggaccattgtccacccccagcagagccctaaaacaacagcaacaacaactacaacaaaacagagaatacgtaaccccagattagctaagtaactgttaataaataaagattagagaaacgacacacagcttgctttgcttcaaaaggcatcttggtttgtagttaatttctattgatgtttagaagaaaaaagtaaccaactggatttggtttagttatttccttattttctgctgtccttacctgggtatcagtcataggcttgtatctgattatagactccaccgctgtccacctggtgttagctactcaaaattgcaggcttgagctggaaggaccagtcaggcactagagggcactccaggtaggcacagcctcactcagtgttggcggtccaggcatatttgggagacgtgggtgcccctggagagcagctgagatgggactcaacacagaaaattgggaagctaccttactggggagagcagcgtctcccttgagtgatggttactagttctcccagacattcccaagatgttcagttgctccaagacattcccaagatgttcagttgctccaaatgttagaaacacccagattgtggcacatctgagtgattggacagttttgtcaatggtgactatataaatgatcttcgatgcctgagagaagggccatttgggacacagggagtggcctaagcaagctggattcaggagattggggtgaccttgatgtgctagctgagcttcctttaccctaataaaacatttttccattcactaccaccttgatcatgctaaaatgctcttattttttatgtgacttaattgttcagtgttaatttcaaaatgtgtttaccctttcatttagctaaccctgttttaaaaaatttaatatttaaatatcccagtcttccaaattctttcttcacaagtctcgaagttcatttattcattcaacaacagatcataagcctggagtggctttaggagaccactctccgtcgtggctgggaagcagatctcaccccgtgggtgggtgatgcatcctcctgcttggcacagtcttctcatttcccttttcagcgtagtaaactcttctatcttctggcacctttagaaaacatactgagcccgtgttacctgcttgtcctctacatacataggaaacctcagcgtgagcctatgaggtgtcaattacaagcagtgtgaccatctgctcttcccatcaagccagcctaagggtctcttcatcttgaagccttttctgccccatcctgaatccctccagccccctttgcaaaaccactgtacttgcacacagctctgtgaggcaaggacatgtccccgtgcaccagattgtgaaaatctgtcaaatccttagagtcagaatgggtgctgcctttgcctggcacatcagagctcaatacacagttgaataaatggataactgaaagaactgaaatcttcttcctcagtggacctttgccaacatttattctgttagaattaaatagttgtgtacagcaagccaatgtgttcagttacctaggagtatattttatggctcactcaacccaggggaactgtagatgaccaagctgcctataatcacccagaggtgtcttattaatgtggaggctgagcaggtaacactggcttgacatgttttctgaagctgccgtggtcagtcgcatggaattttgggatcttaactgcaggcactcttcaggtgggaggaggaagaggaggaggagcttccatccaggggagaatcctgggtaggcttctcatgtcctatacctcagaggcccccaaccttttgggcaccagggaccagtttcgtggaagacaatttttccatgcaccctggttggggtgggggatggtttcaggatgattcaagcacattacatttattgtgtactttatttctattattattacattataatatataataaaataaatatacaactcaccataatgtagaatcagtggaagccctaagcttgttttcctgcaactagacagtccatctggatgtgataggagacagtgactgatcatcaagcattagattctcataaggagcgtgaaacctagatccctcacatacatggttcacactcctatgagaatctaatgtcaccactgatctgacaggagatggagctcaggcaatatagcaagtgatgggagacagctgtaaatacagatgaaacttcagtcactcacccactgctcacatcctgctctgtggccagcttcctaacaggccaggaccggtccatggtccaggggttggggacctttgctacacctgaatatcattcctatctgccagtcttctggtttccaataccgcacatctgcccttagcaagaacatcccatctcaggcaccattgcttacctccctctgtcagacactcagtacagagaagtaagggtagggaagaacccatcttcttagtgttctaagttctcttcttggatcaaattcccagggttttctagcctcactactgctgacatttggggctggatacttctttgttagggaggattgggggtggacttcctgtgcattgaaggatgtttagcagtatccctggtctctacccacttgatgctggtagcaccaccaaccccctactccaactagctgtgataaccaaaactatctccagacattgcccagtgtttcaggctggggcacagagtgcaaaattgggaccatatttcttaagaggtaattacttattttgcttgacagtatattcaaagataccatttattaaaaattattaaggatatagcgttttacattttatatttttattagatatttcctctatgatttcatgccttgagtgtcttctttttaattcttttgagacggagtttcactcttgtcacccatgctggagtgcaatggtgcaatctcggctcactgcaacctccgcctcctgggttcaagtgattctcctgcctcagcctcccgagtagtacgtgccaccatgcctggctaatttttgtgtttttagtagagacaaggtttcaccatgttggccaggatggtctcaatctcttgacgttgtgatttgcccacctcggcctccctaagtgctgggattacagtcatgagccaacacattcggcctaaccttcctattttctaaagacaatgaactgtctaaaagtcattgcttttgaatcataagttacttccctcactctgcttatattattagttgcacaaaacttttaccagatatttataaggatgcccgaattaaaggaacactgaatgactttaatataagatcaggagtaggataatgtctgcaacagtcaatgaaattactagtcacagtggcccagacagggaagggaggctggcacatgtgagaacattagctatttggtctcagcttaagccacaattgcataaaagtatttatcaaggcatacatttttaggggaaatgagacttaaataatatgagtaaaatattaatagctgcctcctctggtaagactatgaataattttattttcttctgtaagtcctaaagtttgtatatgtacagtggtacctttaacaagtgtctaaatgaacacacaaacatacacacatataatatctcagagatagcaaataagtgaaaaggaaatcacaagagccccccaggacctgcaggtgaaggtcagtgttcctaggctgatcattcaagcattggctgccttgggcctttgttcttagaggccacagatggagccaccatcttcctcctcagcccagtatctgcccattcctaaagtgagtttcctaggatgcaaggctggagtcttttcttggaatgacatttgtggggtttccttttcctcacaggtcaaaatactaaattttatgactctcctaacttcctttctcctgatgattcccacgtatggcaggggaagggggcttctggtggcatgaggtgccctgggtctgactgcctcattctccagccttcagcctccctctccaccacctatttctccaggcggttcttcaaggatatgccccacaatgcacttgacaagaagtccaacttcgagctcctagagtaagttctgggatcacccatctcccctcccttcctgtccttccatgtgtacttttcctcctcaccctctcctccacccctccccagaccagagccacatagggccgtctctaggtcccaaagccctctcacctcttcctgattggcccgcagtcctgtggtgggggtgagggggagtcacatgctgcctttttcttccttcttgcagaaaggaagtggggctggacttgtttttcccaaagcagatgcaggagaacttaaaggtgaggaaaccaatgggcgaggacctcttcgtgctgattcccgagactagagtgtaagggatgaggctggggctggggatactcagagaagccagggtatctgcgcggcctcgggcatttggacacaggaccactaaatgtacccaggggtcctctctggggctggggatccaactgttacatgcctgggctccggctccgtatcgaggccgtatcagctctgcggccccagtactgggaagctacccctcgccccctcaacctccttcgtagggttacggggagtctcccttgagacaatgggtatgggttttaggtcatagatcacagctgcttttggggcaaaggccctggggatcattttcgagcagtgggcagtctctcagcgagaccctaagggaaggagtgagacctgggaggagcaggcattgctcacacggcccatcccctcccccagcccaaacagttccggaagatgatccagcagaccttccagcagtacgcctcgctcagggaggaggagtgcgtcatgaagttcttcaacactctcgccggcttcgccaacatcgaccaggagacctaccgctgtgaactcattgtaatggcgggctctcttgatcctctccctgacctggattccaggcctctcggaaaagggggccaggagggggcagggagaggctgcaatcgctgcagattctcactcaggcagcaggacctcgctgacctgccgtcggtggaagtcaaaagcatccccttgcctgaagcaggcactgaaatgttggcctccagctctgggaggtgggcaggacaggcaaggtgtcaggaggggaagatccatatggccagggtttcggtgagaaggagctggagacccaggaaacagtggcttgtgtctagcttagggagcttttcttcaagtttctgaagaatggggaggacagctctggaacaacagtccactctccttttattccagcaaggatggaacattactgtggacctggtcattggccctaaagggatccgccagctgactagtcaggacgcaaaggtagagagacccggggcagccccacccagccccaggcggggaggtcgtcccctctctgctgcctcccgccctgtctgccccttcagttcttcttgcccctgttgctgaaagcagagttcttctaaggccatgccctggcgtgagcagcagtggagagcatttagagatggcagcatgggacagatggccctttacatccctgtgactgtcatctgcacagaggtggtgggagggggagacaaggcctcaatgattactcgcagagctcagcagtgttgctctttcagtgacaatataaggcatgattcccttggaagtcaggggacctgggtccagtcctggctccactgccagcttggcacatgatgttgagcaagtcctggctttctctagacctcattttctccttggcatagggaggggcttggtctagatcaagcctgtggtcccaggatggctttgaatgcagcccaccacaaattcgtaaactttcttaaaacatgttgagatttttttgtgcgatttttttttttaccttcatcaagtagtgttagtgtattttatgtgtggtccaagacaattcttcttccaatgtggcccagggaagccaaaagattggacacccctgaactagaggatccttctagccttaatagtgtttgattctctcttcatctcccagagaaactcccagttcctcctcaccccggctcccccatactgaccaatctgcatggcctagtcctggtagtgggatggtctgaagctcccccttcttttcccacagcccacctgcctggccgagttcaagcagatcaggtccatcaggtgcctcccgctggaggagggccaggcagtacttcagctgggcattgaaggtgccccccaggtgagtgtctctgggcactgggcacctggcagctctgcagggggtataatggcagattgggagctcttgctcagaccaaaagtctgtgacacacaggaagccaggagcttcctggctttggggatcgtgttaagaaaactgcaccaagttcttagacaaaaggtaccaggatgatgataaattgtaggaaaattcgggaaacaatttttttaatgtcaggagaagaaattgggaaggttttcaggtagtggaatgttcaaggtgaccagaaatcaggtataaatcacaggcctaagttataccaagagaacaaggatgcggacatcaagacctcaaaaacatgggtttttttgtttgtttgtttgtttgttttttacagtaaaacacccagagagacctcaggctgcatctctctctcctttcacccatctgtgccctgccccattgcctccccttcctctttctttctttctttcttttttttagacaaagtctcactctgtcacccaggctacagtgcagtggtgcaatctcagctcactgtaacctccacctccacagttcaagagattctcctgcctcagcctcctgagtagctgggactacaggtgcatgccacaaggcccaactaatttttgtacttttagtagacacagggtttcaccatgttggccaggctggtctcaaactcctgacctcaggtgatctgcctgcctcggcctcctaaagtgctgggattataggcatgagccactgtgcccagccccctcttccattttctcagtttctgcttctatttattgagcacctactaggtaccaggcatcgtgctatgtgctcagaggccaaaataagtgaggcctgggactggcctttggagagcatgggcgtacaggtgaaaggggtgacagagtgcagtctggactccagggcagggccccaggagaggtgcagacagcattggcatccaggcaagggttgtggcaggggtcctgccatctcttctccagccctgggggtggtctctagccaaggctctggggtctcacccttggctggtctctgctccgcaggccttgtccatcaaaacctcatccctagcagaggctgagaacatggctgacctcatagacggctactgccggctgcagggtgagcaccaaggctctctcatcatccatcctaggaaaggtgggttccatttaaaggtaaagtggctggaccacgggtggcagcacacccgagtccccagaggcggagtggcagaagctaagccactgatggataagtgaatgaggattcttcccccacagcccagcgggaagcttccagtgggcccatcttaggctttaagccctggccggtccacctacccacagccctgctaatcaaggtccacatagaggcagcttctggaggagaggcgttttagccccagcaagctcaaagccattgctagtagaaggctggtcccgcctgtgtgtgtctccatcttgggtcagattcaggaagcaggggtcacagctggagcacgtgaaatctggcctgaggcagcctccaaggaggattccacttctggcccaaggcctcactagctcccaggctaggagagaatggaattaggggctgggatgggaggagagtcccttgtaggaatagtgaggaggtcagtcacccatccaggtccctgtgtccccagctccaacctcctccttcctcctctcttcctagatggtgagaagcggaacagcctgccccagatccccatgctgtgagtacaatggggtgcagaggacagggccctgagctcagcctgtgctgctgagaggaataagaataaactgggagtccccacctccatagtttctggctttcaggcccaggagaaccctgaaaaaagatgatctttccctcccaataaatacctgcaggaatattcctatgccttcatgccacctggtgttatcctggggggttgctgctgtcccccaactccagcccccagcagcctgggctgtgctcccaggtcattgctaatttggacagactacttctccacagggggcaggaggagagggcgggccgaggctgcccaggggaacattaccggcctctgagctcacctggcttctgctctctcacctcctacagaaacctggaggcccggcggtcccacctctcagagagctgcagcataggtgagctgcccgctgcatcctccacctgctccagttgcctcccgtctgcttgctccccactgcttgctctcgtgacattgccgagggtttcctccaagtgacagaaaaatgatcctctcccataacttctcagtgatggctttaaaatatcgtgaattatggctgggtgcagtggctcatgcctgtaatcccagcactttgggaggccaaagtggatggatcatgaggtcaagaaatcaagaccatcctgaccaacatggtgacaccccatttctactaaaaatacaaaaattggatgggcatggtggcatgtgcctgtagtcccagctacttgggaggctgaggcaggaaaatagcttgaacctggaaggcggaggttgcagtgagctgagatggcaccactgcactccagcctgtcaacccagcaagactccatctcaaaaaaaaaaaatcatgagtagtaatcgctagtgtgtattgagtacttagtacatggcttaagcagcttgggctgccataacaaaatactatagactgggtggcttaaaaccagatactttattgctcacagttctagaggctggaagtccaagatcaaggtgctggctgagtctgcatctggtgagggctttcatcctcatttgcagatagctatcctttcactgtgggctcacgtgatgaacagagagttctggcctctcttcttctgtgtacatgagcacagatcccattatgggggctccacgctcaggactgcaccacctcccaaaggccccacctcctaatcccatcgcattgggaattagggcttcaacaaaggaatttgggaggtacacaaacatccagtccttaatggtattaaacatgcaacaggtattatttgattcaatctttatagcatcccccaatactcatttcataaaagggaaaactgagattaagggagattaaccaacttgccctaaataatgcaaatcgggaagcagagagcagggagttcagccaaggtgccctgggctctgtggccactctaaaacctgggctgggagcccgggacatgcctggcttctcctcctacccccttgggctccactggcctccagcagggagccccacacctgattcctggcggtgcccaccaagggcatcttgtccacggctgagcctcttcctgttgttccagagtcagacatctacgcagagattcccgacgaaaccctgcgaaggcccggaggtaggttctcgaccccgccacagcgaccgtagtcaaggccctgtgaaatgacatggcaaggactctggtgacaccacagggaacattcttttcctcctttatcctcccttcgtgctagacttagacagtggcaaacctgagatgccttggatttgaaagctgagatttttttttctctccctatactgattgaccttttgtgtgcccatggagctgtgcggggattctagtaacgtggacctgggacctagccttcagagggagcagggtgatggctcttccctgggtctgagacagtggaacattctagacccccatttccccagcccagtccctggatcttggctgaggtgttatagatctggtgacgcctggctttagagcctgcagacactcaggttccctaggggataccaccgatctctgtgatctgcgactgttttctctgtctgtgcaggtccacagtatggcattgcccgtgaagatgtggtcctgaatcgtattcttggggaaggcttttttggggaggtctatgaaggtgtctacacaaatcacgtgagttctaggatcttcccttacactcctcttccacatgtctgtagggtgagacagagctcgaatctgagcaggttggagttggcacagccttcatccacttggggccccttgtccctaagggcctcttgtccactgggcatggtggtatttattaaatactcaaagagtggtggagacaagagtcatttccaagaagggtagcaaaataccaggggtggagatataggcagaacctggagaagggtcagtattcttggtgggagaatacaaagggggaggcgggataaagacagttctgagaaaaggtgaggcaggatctggagttagtgtcaaggccagtgatggggcagggtaaggctgaccgctgtggtaacgcttctagcaggcccaggggaagaaagaaagaggcagtaagaatgaaaaatccaatgatagagaaaggcccagcccccaggcatgataatggcttgcaggtgcctctggctttgggcaggtcacacggcccctcagtctcagtgtcctcatctggatggccaggggcttgactcatttgaccactacagcccttttcagttctaacagaccctgatcaagaagaaggggagtggagaaggagaagagaggaagacaaaggggagaagaagagagacataggagaaagggccctttcctggcagcaaaatctgcaggaggccatggggaggccaggagggaacattctgctgagcactgggctggaccaaggggtcctgaacacactcttgttacagaaaggggagaaaatcaatgtagctgtcaagacctgcaagaaagactgcactctggacaacaaggagaagttcatgagcgaggcaggtagggacccctgagaccaaccaggcctccaagatgggaggggcttcagcctgggaagagaggggtgaacagtgcagggacccatgttggaggaggggttcccgtcctcccagctagaagagcaaaggccttttctgaattggacctttgagccgctccacctgtccctcttgccccaccacactgcagtgatcatgaagaacctcgaccacccgcacatcgtgaagctgatcggcatcattgaagaggagcccacctggatcatcatggaattgtatccctatggggaggtgagctggaggaccctgcgatgacaactgggctgcagcatggggggcattcagagcacagcccattcctcccagcttcctgacttctgtgttccactgaaataagccagaggccctgtttgtcaaggaaattgctggaacattttgccagctttgggtttgtctcccaccgcccccagggaagggtcaggggttgccagcaccctggtcccctggctccatactgggaccaaccaggggtcttgatggcacctccccattcctgcagctgggccactacctggagcggaacaagaactccctgaaggtgctcaccctcgtgctgtactcactgcagatatgcaaagccatggcctacctggagagcatcaactgcgtgcacaggtaggggtggagggagtggccagcggtatggaagccaggccttcaccagatcctcaaggcctctgggtagaagcagggcttgtgggtgacacagagcagtgttggaatcccagcaattggcccagcagctttgagcacttgagcaacctctctgaccctgtgtcctcatctgtaaagttgcaggcactgtatgtacctcatggggttgttacgagtaactctgaagtccgaggtgtctgtctatatatcaagaccttctagcccctcccctgtgagtgccaggaaatcgcccccaaccttgctcagagcttgctcacctccagctccctggcttggtggcacatggcccaggaagaagggactgggctggagcagggccaagaagatcctggggtcctagcccagacatcaccctggttgccgacacccctgggctgccaaatccaagtctccctgtggctgtggagttggcccctgctttacctggctttgttcccattccctgccatgagaacctgacccccaagggagtcagtggttgggcattacccaccattgacattggctctgtggccttgtgcctgattctatggaaagccacatcaggggataaaaccctgcattcattcattcattcattcatccaacaaataccatggaacacctctcagtgccaggcagtgacctaggctctgggacaaagtcgtgacgaaaacaagcaaaactccttttcctcgtgaagcttactttctagcatgagagtcaaactggagacatcaattgtcaggacaaaggtggtgggaggatagatttgtttcttttgtttgtttatttgaagtggccatgcttttaagtcatcatttcaactataaaaacaaacactagagagtggagcctgcctgtgagaagcaagcaggcaaactagtttggggttgggagtgatggcaagaacacagggtaaactgagtcagcggtgtgtctcctgggaggaatgagagctcagctctggagtagcctacctgtgcgacacccttttccactggtgagctgctgggcaagttccttcagctctctgggtccggtctcctcccctgcaccaggggggtctgagggtctctatgtcatgactcagggtgtgtgaagctctcgtgcgatcctggtatcctaagtgccccatcagagttagctgtgctgccgctgccactcctgctataccaaagacctaaccagtcctgtggaaatgcagatgagagagaatacctgtgttcagggaagtggttggagtttatccttgaagaatcaccaggtgacagcctccctggcatgggggacagtgtaggcaacagcacagaagtggagtgtagcagatgccaggaatctgagccaggcttcaagctggagatggatgaaggggtgatgggagacagagcccaacagcaagagggaaggagatggcaaagcacctgtgcatgttggggtgcagaggggccagctgggctcccacctgaggtgtgctgtggcaagaccactcgatgggggcagtgacccacagaagctgcccgattctgctctggagtccgagtccctggcttagattcttggtctctttttccatctgtctgtccatctctctgttcctgctcccatgggggtgggcagtgcctcatcctggtcttgatgcccttcttccagggacattgctgtccggaacatcctggtggcctcccctgagtgtgtgaagctgggggactttggtctttcccggtacattgaggacgaggactattacaaaggtgagggggcttcccagcctctgcattggccttggaggggtcgctgaagccaaaaattccagaagaaggaagtctacagttggacagcccaggctaagggtcttcagaaagtaggatgtatttctggataattctgatctttcttccctaaaaatcaacctctttgcccacccaaagcctctgtgactcgtctccccatcaaatggatgtccccagagtccattaacttccgacgcttcacgacagccagtgacgtctggatgttcggtgagtgctgatttgggagggcatgaaaaggtgttcagattctcacttctgaaccaggctaagggggtgggtgcagggagcaggggtctgacctccaccctccgttcccagggttctattttgctgtggccactgagaagtctcagaggtggggaggccagtaggggtaggaaggggagtgacccaggctaaggactggcctgggctgtgcaggctcatcttcctggaagaggctcttgtgacatgtgtgctccacctaccagccccagaaactaagacgaaactctgtgacttattctgagagaggtacaggaaggagagagagcaaaggcaggtgtagagagacagccccttacggaacacctcctgcaaaccatctcacttagtgctcccacagccaaccctgtagaacattattattactctcattttcctgttacgaaaactgaggctcagatgagtcaggagcctgcccgcaatcacacaggcaccaagtgttggtgcgaggcttccatttccagctttactaaggagtggctcccctccctcctaagagaagacacttgtggtcccaatagcatgccatgactgccacctcttgatcctgcagcaccctgacaggggtctagcgagcaaggccttaggtcacttactgcagaggtaggtcacttgtccctcgggcagaccaccatggtaggcaggaccccagggtgctggaggaggaggagggaccgcaggagctgctcctggtggagactgagtgctaatggcgatggtgcttctgggtgggagggactggtctcccccacccagggcctgacgctcccttacaccccagccgtgtgcatgtgggagatcctgagctttgggaagcagcccttcttctggctggagaacaaggatgtcatcggggtgctggagaaaggagaccggctgcccaagcctgatctctgtccaccggtcctttataccctcatgacccgctgctgggactacgaccccagtgaccggccccgcttcaccgagctggtgtgcagcctcaggtgagcatggagtgtgggctgtgggctgggggcccacccggctgcaccagggagcaagaccagcacacagagaggtttgcaccacatctccctaaagaagacgggccagggtcaaggacaggaggctgaagccaggttcactgtcagatatgagctcagagataaggcagccgtggggaagcctgactcatctgggcatctgtcaacacagagcacagagccttgttcaaaggatgtgctcagaaaatattttctaggttagactcaaaagcctgagccagactctcatcgaagtgcctgtgctctttgtgatgttgaggcatcctacctgctttcctctcgccttgtctctcgactttgatctttcctcccagatagcaaggaagggagtgatctttgacctgttttcaagactatgacccaggggccacctctcccttctgaatgggggataagggacctgagggcccgtcggtgcccaggagccatgattccctaggtctggggaggtcactggggaagaaggtcatctgtttcagaggttcagggtcccccagttttcttggtggcaagcctgccattagccctcctgtgggagatctgacttcttttggtttcctctggggtgggagtcagtaagcattttctataaagggccaaatagtaaatatttggggctttgctgtttatgcaagtctctgccaaaactgctaactctcttagctcaaaaacagccacagacaatacatcgatgaatgggtgtagctgggctccagtgaaacaccattttggatgctgaaatatgaatttcaaataagtttcatgtgtcatgaaatattttttgtcttttaatttttttcagtcattgaaacaatgtgaaaaccattcttcatttgggtccatacaaaaatagatgaaaggccagattttccctctgggcgcttatttgctgaaccctactttagggagtctggaacttaattgacttgaaaaatatttttaatactgtactttaatactgattttaaatactgtagtcaacatgttgccttgtttgattttagggcaagtaaacagtccctgaaaactgcctggtggggaggcaccccaggggatgccagcaatgcccaggccaggggcactgagggtgaccctgcatgttttctgtggggcagggccttcaacatcatctgtaaaacctctggcttaaaaggcatctctgttcctctctatcccttcagtgagcctcccagttaattctagactcctgtgttggtcccttgtatgggaggtttgagaagtcaaaaggctgcaggataaaagtatttgaaggatgtaatttgggaggttaaaagccctggggggatggagctgggagtcctgattcactctgaggccttgagagccacagggagctgtgcaggtgtctctcctgggctgagaggtgttcccatcatctcctgggctgagaggtgttcccatcagaggcatcgaccaggcctctgccacaagtggaggtgggagcaggtttctggtgtgatctggaaaacactgaaagactcagaagaccccaggttgcttcctcagaccaccacctgactcttcctccttagagttcagaagggatttgatcagtgtttcctaaccgttccagggaggaaaggcccttctaatgtcaaattttgagtgtctctgtgtaacaatagttatattttaaaaatcttttgctgaacaaaatgtagtgggctatataatgcatttttattatacataataaaatatatacacacttgaaaatatagtatcaagtgtcacatattcagtagtatataatacttgctacccatatgaacatgtggattcatgggcagtaataattccagagtcctctggggtctgtgattccaggttaggagcactggattgggtaagaaaggtgagaggcgcgcacatggctagcctgggagtgaacccacatgcctcattagcacataccggggatgcgttgggggatgtttcatgagaaataggagatgtagattctaggccagggccatgaagttggctgggactttggaaatctacataggggtttggtgccaatcacaagcccaggagggcaaaaggcctgaggagtggggctgcagtcaggctcctgctgcatgtttgggctgggactggctcaccaaggacgcttttccaccttggatccattcctgtgatcctcccaacctcagtgtggcctcagggcccatatccaagcctgtctcagggggctctccccaggacactctgcagtgaagatcgaaacggaaatgggacctagcaaccttgcccaggcctctctgggcctccacgaagtacaaagaggagccccaaggagcgtctcactttgacctagtttctctccttatctgacgtgactccctgcagtgacgtttatcagatggagaaggacattgccatggagcaagagaggaatgctcgctaccgaacccccaaaatcttggagcccacagccttccaggaacccccacccaaggtaagccaagccatggcctcataagtcctgtgagtcaaagcaaagccaggtccctgtctgatccatgtcccccttactgcacaggcaggatgccccctacagccctttctcagtccttcacccagcatccaccatcactgtcagcgtgtcacatcagtgccctggcaggtggacttggagatagcagccaccttgtgggatagctgggtcaagaatcattcctcaaaagtgtcccctgaggggctgggcttctcttctaggtgttttcttaggaacaaatgagatccccctgaggacacatgggtgggaagtatcctgggtcttttaggtccagtccctacatctataccccgcatggccaccctgagctcaggagccagggccctgctgccattaggtgggtgggtctgagaggccgtgcctgtcttagtcaactggagctgctgcaacaaaagaccacagaccaagtggcttaaacagcagatgtttatctctcacagttctggaggctgggaagtccaagatcaaggtgttggtgtcttgtgagggctctctgcctggcttacagacaaccaccttctcactgtgtttttacctggcagacacagagtggtctttctttctcttcttataagggctccatcctcataacctcatctaaccctaattacctccaaaaacctgcacttccttaatgctatcacattgggggttcaggcttcaacatgcaaattgaaaagggggacaaatattcagtccataacaatgtctgatcccatctaaggccttttctcacttgtccctcttgcctggcatgtcccacccctccccgcgggcctggctcagcgttcatctcctccatgcagcttctgtgaatgcccaagcccctggtgagctcctacctctgcatgcctgtggctctggagctctgacttggtgggtgctcccacgtatagggaagcaacacatgcaccaatcattaaccctccaattagccatagccccgggagggcagtgaggtggcttctttgtaccttccaccactcagtagataatcagtgctcaataaatggatgcaaaatgagtttcatgacagctttgtccctcaactttccttcctttggaacaagcctgaggtgtctttgacctgatgttccccttggtgagttgtgttcactcaaggagagggacagagactgacccatctgtgttctctctccagcccagccgacctaagtacagaccccctccgcaaaccaacctcctggctccaaagctgcagttccaggtaaagatagaaccagaggacgggaacttcaggtctacctctcatccaggtcctgaaactccattcttgtgccttagaggagcagcagtcacccacttgggtgatggagatggcctaggttgactcttctttggcacccagaacagaatgcagactcagatcacaagaattaaaatgcagttctcccaggctgtgctcagctaagacctgccttaagccccatccctctgtctacatcatctgctgctttgtgtgcctgcctgctgctctctccccacatctaaggcctccctggcctccttaccagaaggaatcccagggaatatttcccaacaaatggagtagctccatgggactccccaaagaggccccatccagaacctgggtggccattgaagagacagcagggttttacctgagctttctcccagctccattatccccaaccatgactctttcccaggctgtgcgtccctgaccctgaatgtctctgttctgtgtctctcttgcctctaggagagagggagtccagtctcctcttatttcttctcttgcatcccccagctcagagccactgctcaaaaattgatcccctcaaccaccagaaataatgtccatttagttggtgccctttatagaaaggtggtgtcccatggtcctatatttgttctcaaggaaatgcctgagtgccaaaacaagaccatctaaggactaatagataaatcctcttcacgtgaagagaaagcctgattcagaagatggaaaaatcgttctgaaaaaaaagagatatacccatgtgcaatatttaaaacagggagttaggtagggtggaacacacctgtagtcccagctactaaggagggtgagatgggaggattcattgagctcaggagtttgagaccagcctgggcaatatagtgagaccccatctctaaaaacaaatagtaatacaataaaattgtgatatacttattttttaattaaaaaaaattcaaggcaggcatggtggcatgcatccgtagtcccagctatgtgggaggctgaggcaagaggattacttgaggccaagagtttaaggctgcagtgagctgtgatcataccactgcatcccagcctgggcaacagagcaagagcctatctgaatttttaaaaaacaattcatacatatctgtataaattggtgtgttaaccacatcagtcagtctgtaatgcaactgaaacaactattttttgaagagtcctgaaggaagagccctggtctcagtgggtccgtaaccagcatggaccccactgtgtgcagagcatcttgggggaatgttggatgaatgagaggctgcactgctccaccatctctctcggagcaatggaaggcccacgttttgttctttattaactcctggagagcaagccccattccctgtggtgctcatgcatagtttctttgtgctcgtgtttgtagcagctaattgtctaccttctcgctttgtcccgtgccttgtgcttctttgcttttcctgaataggttcctgagggtctgtgtgccagctctcctacgctcaccagccctatggagtatccatctcccgttaactcactgcacaccccacctctccaccggcacaatgtcttcaaacgccacagcatgcgggtaagagggctctgcatgctggtccctgcccggactgaggaggctgctggagggaggtggccggggacactggaaaccccacgtcctcagctcaggagggcccttcctgttcccatgcaccagtcaggccactgaggtggcactctgtgacttccttccctttgcaaacacatcagaggctggcagccacaccaggccctgctctggaggacaccagctggacctaacctgcccttggccatgctggtgctatggctagagatgtacaaatctccccctctcctgagccccaggggtagggggatctgtggcagcttggaggctcctaggcagggcacagcacagcttagtggtgctggagagtatccttcctaaatgatggctttgggtgtgaaatctctcctcagtcaaaggaaaggctttcttgtggctgctcccctttctgcttttgttcaggctgctgctgggtgagaaggagtttagggctagtgggaatacagcctcattaactggctagagcagggacctaagccacttcccttgtcagctctttgtcacggggggttgttaactgctggtgaagcccggagtgcttcatggctggcttctgattgtcaggtcttgtgtgaaaaagacacttttgcttataaccagatgcccactggtcaccaaccaccttcttccatacaaatggcccctagtggtcagttgccacgaacacttgatctattttactaaaccaactaaaacacttattttagctctaactctgcatgcatgcacaatatttcaggctcactaaacatgactaaaatattttttgaaaaaaattagatgtttatcataatatatttggaagatgtaggcaagtatgctgatattactttcatgccattatgcttaatttagtagaattttgaaatgagcatgataacttagaattccagacactaagattttttgtgaaatcaattttcctctgacctacctcgtttttctcttttatattaatttaaccaatttctgtctttgcgtgtgcttaacaataataaactacatttttaggcatgtgctataatttaggctgtgttcggtttctccaccctcctgcctttgactctctattcataaatgattgttttagtaagttttgctttaaattgtgttattttagaaagaagctattttgcacatttgaggggtagcattgccttcgtccaatttcctgcttctccacaaggaccttgttcagttccataaagagattgtgcagtaggaaaaaagaccttttgtatcagggctttagaagtaattgacataaggaaaatctgcctaaaagaacataatgagcatgtctttaaataaacaaacccaaaaaagttaaaaatataagctccattttatgacacagatcagaaacactgagaaagtctcttccaggtagaatgctgagaaggtataataggctcctcacaaagcatttggaagcatttaacaaaaatacagaggtggtgttcccagaaaaacagtttttctactgagtggctctatagcctgactcatcagggagtctgtgggatgccataccagcattgggatggcagcagtctctctcctgaagacctcacaattgagctttaaaaataatacaattcaaggccaggcgtggtggctcacgcctgtaatcccagcattttgggaggccaaggtgggtggatcacttgatgtcaggagtctgagaccagcctggccatcatggcaaaaccccatctgtactaaaaatacaaaaaattagtcaggcatggtagtgtgcacctgtaatcccagctactcaggaggctgaggcaggagatcacttgaacctgggaggcagaggttgcagtgagctgagatcacgccactgcactccaacctgggcaacagagcaaaaccctgtctcaaaaataaaaataaataaaataaaaataatacaattcaataaacagtagggcttgctgtgattgctggacgctgtcctcggtgctgaaggggggaggcgctgctttcaaagcgcttacagtcgaccagaaggatcagaccaggtgcacacttacctgtaatgcaagccagaaggtcgtgggtaccacaaagtgggagttcagagaggaggacaaccctttccagcttctatttaaaagttgggccttgaaagatgggaaagatgtggacaggaggaaactgagattcagggaatggaagaggcaggggcttcagtaggaggcaagactgagtggtgggaaaccacaggacaagtgcaagaactgttggactacagcaggaagggtacttgtggatgtggaaataaagccaacagatgggtcatagccagattatggaaggtgtcacaacttacgagagtcattttaaaacaccatgagtacccaattccttttaagaatagaatgtaatgagcaatgtaagtatccattacctaataagaatattggaggcgcatttcagcaaaaccaacctcaaagagattccatttttttgagtgttcatttttctccttgagttttattatgaaattggaaggcatcaggatgtctcctaatctgtgtttgttagaatatgtggtacgatcaggcctgaggcatgctaggcattttagtggtggaatcttctgtcaacacttataaacttacaaatacttacaaatacttgtagaattttcttgattctagtagctcatccaactggtacttaccatactcttccttaacccatacatttttctcacatccagaaatccctaactctatatttagaacttttgacacttagttcctgtttgtcactatttgtcaacagcctggggcagccatgccattgtgtctgcaggtgttgacatttaactggggatttttatggccttaaaatgtcctcatttttgagtatcagcctctgatcaacaaaacctattttatttttatcaattccatgattataaaatactcttatatgctggaatttgttttcctaaaataaggtctagctcagtggttctcagctaagttattttccctctgagaggacatttgacaatgtctggcagcatttttgttacaactggggtggtgctataggcatatattgtggggaggccagagatgctgctaagcatcgtacaatgcacaggaaattgccctggaaataaggacttgtctggctccaaatgtcagtagtgctgaggttgaggagccttggtctgactagtatttacttaaccccacgagaataagaacatcgtatagtttaacatcactgtcctcccagcacccagccctgccacatagtagttgcttaataaataattgttgaatagattaatgaataaatatttcagcaagaaacctaactcatggggaaacgtgtgattagaaattgaggttagtaattgaagctcagtgtgcactaagtaaaacatcccaatataaccacttttagaccatattgtaatattcaagtgtgttttgtagggcttagtgaggaaactcttttaagaggcttggtaggaattattgcttgctaaaagtagatagagataattgttagcatcttctgcaagtgacctgtatgcaaatggccacttcaaaggcaaggaactgagggacctgccagcttagatgtcacagaagaatcctgccctagcaaaggcaactcctgggctttgtgcaatcaagaggatgccaataatattcctcctccatctgtccaggaggccagggtccccatgtgcagcacaacaagagcaaaatagtttagagacactgagcagatatttatacaaatgaaccgtgggggaagactgaatgaaaataggaagacatgcaatactttctgtttaggaactagcagctaaaattatgaataggtccaaagccccagaggtaagttaaagcaagagttagattactagatctagggagaggaagcatttatcttctctctatcaaactatatttctttgaattttgtttttcattttatctattagttcatgaatttcttctaatcattggttaaataactcaagctatgattgcatttatcttatctctatagagctgtatttcatgaaattttgttccttattttatctcttagctcatgcatttctcctaacatttagttaaataacccaagctattatcttaataaagaatgtgtcttaataggaaggcatggttggtgggtgcatgctgttgcttgttctctcaggctctgctcattcatggacacacgtgggactgcacaccgtgaggctagaggcagcacccctgtctctcgaagcttccagacctgccaccttggtccttaggtggagatagcatcagaagggtgtgatgctctccaactaagcaaagccagccccttggaaaccctttggatgcttttagtagattttaaaatagattttaatagactttaatagcttttctttttaaaatatattaaatgacaacaaccatcacaaacactgagataatagtagggcagtcacttggtaaaatatcatgagcagatcgtgtaatcatttgaatacagcgcacgttgagcagtgggttcttgggtttggtatcacattgcaacgcagatacatgctcggggctgatactggatagctgtctgcacatatagctctgggtttaagaacaaacttatgagaaaaaagcagctggccaggccaaggcttgcagctgccatgaggttcttcagaggactgtccctccctgagtctgagagcagggctcattgcatcctctcccttctctctgccgtcctcccaggaggaggacttcatccaacccagcagccgagaagaggcccagcagctgtgggaggctgaaaaggtcaaaatgcggcaaatcctggacaaacagcagaagcagatggtggaggactaccagtggctcaggcaggaggagaagtccctggtgagcaccccaggaaggatgtcggtgccctgcacccatctgtgtcctcttccacctccccaggtggctggggcaagggtcccctgcattcttggtgctttcagctccagaattcttagtccttcgctcttgtttcttcctctgcaggaccccatggtttatatgaatgataagtccccattggtgagttgccaggagaggccgcctcctccatgccaaggcctgggaaggcctcgcccaccataggaccccccgcccaacttgctcctacccccaggcctgcccagctcctcctcaatggctttccatgttgggagggtgtcttttccttttctgccaatccctacatggcccttttcctgaactctcctgtgatcgtgcccttagtgctgtctgtggccctccccagggcccctcggcctcccagaaaggtcacattgggtcacgagctgctcccagaagcacccccgaccccatggctgtaatctctaaacacacagtggagggactggggaatgggtaaccagggagggggttgtctccacagccgcatgagtgacgttcctgttctctttcctccttcctccagacgccagagaaggaggtcggctaccgtgagtgttcccgcccttcttcggggggtttcctcttggcaccttgtgcagagccaccatccttgcccaccgcccagggcagggagcagcggagtctgtctgcattccctgcagcatcggccatgatttaattcagagcatgtggggcaggccagcttcccctccgctccctccaccccattcctctccctgcctagcaccctgcccttctctctctcagtggccacatccttaggcccctcctcagatcatccccctcctgcattagtttggaggagctggaaattctctcttcctcatttcctgctctgttggaagctcccgtgggaaaagttaagcagtgccacctgcctgtcccagttcagattcatcttctgtaggcctgagggacagaggagagaaagtgagaggggcagctgagccctcaggctctctccagaagaccctgttgcaggcagggagggaagagccagcagtaagcccggggcctggaggggtggcattgaggaggaggatgatgacagccatcacagagaactggacacaagtcaggcatgggcctgggaccatttattatcttctgaggcacagggtgattaggtaacttgtccaaattcacacagctaataattggcaaagttcagatttgaacccaagccttctgactttagggtcccttctgagctcaccctcttatcttacaaatgaaaattaaggctcggaatgtgagctgcctagagtggtcacagagctctttggcggcagaggtgagaatagaaggccaggtgtggtggctcacacctgtaatcccagcactttgggaggctgaggtgggagggtcacttgatcccaggagtttgagactggcttgggcaacatagcaagaccccatctctacaaaagattaagaaaattaggcctggtgatgcatgcctgcaagcccagcggctcaggaggccgaggcaggaggattgcctgagcctagaaggtgaggctacagtgagctgtgatcacgccactgtgctccagcctcggtgcaagccctgcctcaaaaaaaaaaaaaaaaaagaacaaagtgtgctgagtggacttttatgtgtctttgctcttcaaagtgggagtgaatagcatgtttctgctgcaattttgcttccttcagccccaaacactctgggaaaaccattagagaatccacacaaatttaccccatgagctgctgtctccccaggtcaggggcaccacagacacctgctggcatcagagagagaggtttcttcctttcagatcacccagtactgttccttaggcctggtgtccatcaggcaggaagcccaagccagagctggggcaccactgcaatccccccatcttgctgggactttgcctttttcttcctataaaagggacaacagtgctgtccctgactactgcaaaaccagggagaccaggaggttccttcccctgcccgcttcctggattcagagttaatttccctgaagtctcctggtggtagaggggaaggggctcatttgatgtcagcaggtacgaagggaagggttggagtgctgagaactgccccccacttgctgttctttttattgcagtggagttcacagggcccccacagaagcccccgaggctgggcgcacaggtatgtgttggctctgctgaaactgataaatgagagtgggggttgcacaaaactgaagaccatggtctatgaaagattcacagttctcagatagaatccagttcagtgtcctcatgatacagatgaagcccggggttagggggcgggtggcggggtgccttgcctaaggccacacagctaattcatgaaaaagcaagaggaagaaccaatctcccactctccatccccctcccagacttggagtagagctccctggtccagcttcagggaaagtggtgtgggctgcttccctcttctgagcctcctcacttggtttccagcatccattgtccttacagccatctggggtggtgctggctttctttcctctggaacagtggttctcagccttggctgtccattaaaatcacccaaggagctttgaaactctctgcataggccaggtgccgtggctcacacctgtaatcccagcactctgggaggccacagcaggaggatcgcttgagcccaggaattcaagaccagcctgggcaatatagcaagaacccatctttactaaatttttttaaaaaagattagctggacttggtggcacgcctgctactcaggagactgaggcaggaggattgcttgagcccaggaggtcaaggcattagtgagctatgactgtgccattatactccagcctgggcaacagaatgagatcctgtctcttcaaagaaaaaaagcctgcctgcaccctatgtccaggtggtggttctaatagtctgttgtgaggctaccactagtattccgttaaggctccctggctggaaactgccccagaagtggacagaggcaatgcaccccgggacagggcacaattattctaaagaagagtcctttccaatcgggctggtggtggagttggccacagtggtgcctgcccaggaaagaatcattccgtgcccctggctctccccaactcactggccacctgcgtcttcccctcagtccatccagcccacagctaacctggaccggactgatgacctggtgtacctcaatgtcatggagctggtgcgggccgtgctggagctcaagaatgagctctgtcagctgccccccgagggctacgtggtggtggtgaaggtgagagcagggctgggttggggaggtggaggcggctcaagtccgccctggaaggaaaggggactgcgcttcctgttggctggcccagcagatcctcttagagcaagctgggccaggggaattgagtcccaggccactcgcgggggacaagcaccaccccaggagagctcttcccaggggaaacctggctctctccaatagctaggagtggcggccatcctgcccctttcttcccccagaatgtggggctgaccctgcggaagctcatcgggagcgtggatgatctcctgccttccttgccgtcatcttcacggacagaggtgagcgtcccattccagacagcaccataggctgttgctttgctcctgcttatgagcctcattagaggctcatgatggctgcctgggcaacctcatgtctgtccactgagtccccaccaggtgggttctatgtggcttatccatcagctaccaccagagggctgagagggcacccagggacctggccagaggctagcagggatttcctagttcaggtctccagatgacggcagtgaattctttctgagtttatgctaaaggggacacaccttcctttcccccctcctattattgtttatctggttgccttgccgtctgtgttaagattaacatggatgtgtcatagaaatatcacttaaggtttctttatttaatctgattttctttatttaaataagaaacaatcactgaaaatcaaaacaagagtcttggtgctccatgagatggttcctgtagtagggagagtaaaggcccccaaagatgtccacatcctaagccctggcacctgaaaacatgccaccttccatggcaaaagagactttgcaaatgtgataaagttaaggaccttgagattgggagattgttctcagttatcagactgagcccagtgttgtcacagggatcccaggatcaggggtcctgatcttacagggatctctgtgacaacactggctgggtgtggaaactcacatctataatgccaaccatttgggaggccaaggcaggtgaattgcttgagctcaggagtttgagaccagcctggtcaacatggcaaaaccatacaaaaattagctgggcgtggtggcctgtgcctatagtcccagctgctcagaaggctgaggtgagaggatagactgagcctgggaggtggaggctgcagtgagccatggtcataccactgcactccagcctgggtaacagcaacaccctatctcaaaataataaataaaacaagagggaggcagtgtgtgacaagagacacatggtcagggtgacagatgtgatggatgaaggaggccgcaggccaaggaaggcagcagcctgtcagagctggagaaggcaagtctcctctgtagcctccagggagaacaagccctgtggccaccttgactttagcccagttggacccacttcagacttttgcccttcagaactataagacaataaatctgtgttgttttgcgccactaaatttctggtaatttgttgccaaagccataggcacacaatacagtgccatgggacgtttgttggttctccgtctggagccctttgatccactgcctcccagcagccagccctgcggcacagatgactaccacatcccaccactgtccccactgtcagtggccacccaaggaaggagaaggcaggagagtttgggccaatttctggcctctctctcaggggcagtgacaacacatacaggagccctaggtggggctgtggggctgtcttgtctcatttaagagctccttacccttgggatgccaacccattcattcattcattcattcatctacttcatttgtaaatacctcttgagcaccagctatgaacaggcacacctcattttattgcactttgctttaattgcacttcccagatatttcattttttacaaattgaacatttgtggcaaccctacaatgagcaagcctattggtgccatttttctaacagcacgtgctcactttgtgtctctgtcacattttggtaattctcacaatatttcaaactttttcattatgattataactgctatggttggtgattggtgattggtgatcagcgatgttagtattgtaatcgttttgaggggccatcataaactgtgcccacataagacttatcaataaatgttgtgtgtgttctgactgctcctccgaccatgcatttccctatcctctccttgggcctcccttttccctgggacacaacaatattgaaattaggccaattaagaaccctacagcggtctctgcatgttcaagtaaaaggaagggtcacccacctctcactttaaatcaaaagctagaaatgattaagctgagtgaggaaggcatgttgaaaaccaagacaggccaaaagataggcctcttctgccagttagccacgttgtgaatgcaaaggaaaagttagctgctccagtgaacacatgaatgataagaaagtgaaacagccttattgctgatatggagaaagttggagtggtctggatagaagatcaagccagccacaacatccccttatgccaaagcctaatccagagcaaggccttcaattctatgaaggctgagagagattcaggaagttgcagaagaaaagttggaagctagcagaggttggttcatgaggctcaaggaaagaaatcacctctgtaacataaaactgaaggtgaaggagcaagtgctgatggagaagctgcagcaagttctctagaagacccagctaagatcattgatgaagatggctccactaaaccacagatttttcaatgtagatgaacaactttctattggaagcagatgccatctaggactttcatagctagaggagaagtcaatgcctgtcttcaaagcttcaaaggacaggctgactctcttgttaggggctaatgccagttgaagccagtgctgattggccattctgaaaattttagggcccttaggaattaggctaaatctactattgaggtttactactcagaaaaaaaagactatcttcaaatattactactcattgacagtgcatctactcaagagctcagatggagatatagaaggagattaatgttttcactgcatccattctgcagcccatggatcaaggagtaatttctactttcaacttctattatttaagaaatacatttctaaggccatagctgccatagataatgatttctcttatggatctggccaaagttcactgaaaatattttggaaaggatttaccattctagataatattaggaacatttgtgattcatgggaagaggtcaaaatatcattaaccatttggaagaagttgattccaaccctcatggatgattttgaggggttcaagccttcagtggatggctgggtgtggtggctcacgcctataatctcagcactatgggaggccaaggtcggaggatcacctgaggtcaggagttcaagaccagcctggccaacatggtgaaaccccatctctactaaaaatacaaaaattagccaggcgtaattgcaggtgcctgtaatcccagctactcgggaggctgaggcagaagaattgtttgaacccaggaggcgggcattgcagtgagttgaaattgcaccactgcactccatcctgggcaacaggaacaaaactcagtctcaaaaaaaaaaaaaaaaaaaaaaagatcagattcgcattttagaaagtatgaggtatgaggggatgtttccatgaagggacggtcaggctgggcttacacagggttggctgggttctgagatgtctgtgatgtcagtccttgcagacctgactcgaccctgcacggggtgttgcattcagccctctcctaggtctgatttgcttccagggaacttctgattgctttggccagcatgcaggtggacacctctgtggcttccctatcctccaagcacagactttgtggcctctcaacctgtcctgtgtgatcttcctacagatcgagggcacccagaaactgctcaacaaagacctggcagagctcatcaacaagatgcggctggcacagcagaacgccgtgacctccctaagtgaggagtgcaagaggcagatgctgacggcttcacacaccctggctgtggacgccaagaacctgctcgacgctgtggaccaggccaaggttctggccaatctggcccacccacctgcagagtgacggagggtgggggccacctgcctgcgtcttccgcccctgcctgccatgtacctcccctgccttgctgttggtcatgtgggtcttccagggggaaggccaaggggagtcaccttcccttgccactttgcacgacgccctctccccacccctacccctggctgtactgctcaggctgcagctggacagaggggactctgggctatggacacagggtgacggtgacaaagatggctcagagggggactgctgctgcctggccactgctccctaagccagcctggtccatgcagggggctcctgggggtggggaggtgtcacatggtgcccctagctttatatatggacatggcaggccgatttgggaaccaagctattcctttcccttcctcttcggccctcagatgtcccttgatgcacagagaagctggggaggagctttgttttgggggtcaggcagccagtgagatgagggatgggcctggcattcttgtacagtgtatattgaaatttatttaatgtgagtttggtctggactgacagcatgtgccctcctgagggaggacctggggcacagtccaggaacaagctaattgggagtccaggcacaggatgctgtgttgtcaacaaaccaagcatcagggggaagaagcagagagatgcggccaagataggaccttgggccaaatccgctctcttcctgcccctctttctctttcttcctttactttcccttgcttttccctcttttcttactcctcctctttctctccccaacccccattctcatctgcacccttcttttctcatgtgtttgcataaacattcttttaacttctttctatttgacttgtggttgaattaaaattgtcccatttgctttgcggtttgttttgtttgtttgacctgccctttgggggataatggggactgtgagccaagtcctggaagaaacctattgtgttcatgttggacagagatcaagggctatccagcgctggtcatcagccaaggaggtttgaatggtgatatccggcagtgggtcaggggtgtgcgctggcccttttgcccttgcagggacagtggggggcaactttccaggagggacccagagcagtcccctccatggccacatgaggaatgccatgtcatttctctcttagtgggcccccaaaccacccaggctctggaggggcttgggtgacactggcgatgttgaagtgcagctggcaaggagggggtcgcacagttgagtcagcagtaggtgcagctttatttaatctctttattcacatgcaagatggatgggagacatggataacagaagtgaacatcactgtctcaggagagtgggtctgggagcctggacccgagagctctgaggcctccggagagcaagtgggaggagagggggcgctgggggctgcatgcacacgagtagacaggagccagagaccagatgtgccatgagcaggggggttgtgggagagaagtgaggcatggcagggcctgggccagggcgtcacagccaggctggtttcccctgagagtgtcagggagagacattttggggtttggaaggaggggacccctaggaccaaaaggaaactggaagctcgccctgctcggcttcctgcctggagcctccatgctgtcccgagaacccgatgcccacatctgttagctgccaatgtcccaccctccagtctggacagagttggggggaggtctgttgcccgatcccaggagcagcagctcggcctgggatcctgggtgcagcctcagactgtggggtggtgcattgcattccaaggtgcacacacaggctgctctgaagggttcagagcaggtcaacacacctcggggctctgggagagacgaggcaggctgataagggacgggaccacagctttgccatctacacaacagtcctggggcccaaacaatccagcttgctcccctcaaccactcagaacaaacgccctaagtgctgaccccactcacccggcgctgtgctaggtgctgggggtgggaaaaataacaggcagagtacctgcctttgagaagttcagaatcaaaggaactaaaggcaaagatcttcaactcccaagtgaggcctcctcctgatggagccaggcacagggaacagggttcctggggagggaaggaggggtgaagggagggaggacaggccaaatgagatgagtttgaggtgggtcaggagcagctcaggatggtctttcttgtttgcctgctgcacgcgtagggacatatggagcccctgcaggccatggctctcagctctgccagacctcctgggggccggctggtgcagagccattttgcagcaaggaaggagaggaatgacgtcaaggagaagcctggaggctcaaatgtgcttccagatggatggaatagcccagccacctgtatccaaccatccatccctccccggtagggaagatctgccctgtacctccacatcaggtgcaggccctgcctcccgcttcctccccttccagaagagcccttattactcccctgctggaccatacagctcagcaccctgcaaactcggacagactccaaacttcaaccccagcctgacttacagagacctcacctggctctccaacctcccacctcacctggctgttctccctggcactttgggctcatctccaaatctaaacattgttcaaagcccttccacatccaagaaccctcccctttgcccccacggcccctcctttgaggtctgcattcccttcctcgtcaccctggccccactgtccccctggttgacccttctgtcacttagggtctgcactgctcctccaggagaatcttactctgccccacttggtcaccacactattgcgaccttctgcagagcttccccagctcctccgtatccaaaacagggctttgcacccagcaggctgtcagccctggtacaataacgttaagctggatggaagcctgcaatccctgggtcagtgtccagactccgcggagaggcacctgctcatcccaaaggggacaccagaggcagctgtagcagagacggtcaaaagatggtcagcgggggtgccctgggagccagctcgagggaggtgcagtcagatcattccagctaggaacggaggcagaaagaggccgatggtccccaggaagcagacgatgataaacagccagaggaagatcctgtcgatgaccatggcaacatacttccagtcctccttcacctgtggggaagacagcacacagtgacaggggccaggcctgggaaagggatgtgttccccccattcacagcccctgcacaggcggccactgggggcagcagcaactgccccacagagaccttggggagcaaaggtcagcacagggagcggggtgagtggaagggagggacgggctgtttcaaggctccagtaagctccactgatgattcccctcccatcccagcccctccacatgcccagacctgtccatattatgctcctagactataggtaaaggaggctagagggacgcaaggaggcggcacgaccacccaggggcatgggcccttctagggggcctgcagtgacttcaatgcaacaccagactttgctgctcacaggttgcctcctcacccacctgctggagctggggagagggaaacaggcgaaggtggttgggaccccaggcaggctgggggtggggcgggggctttgtagaacttgggctcacagcccagacaagggagcctggattctccactgctcctggatgacatcatgattaattttcttgtctgttcatcaaggccactcagtaataacctcccggcctttcatccttccctaggcttagtagaattttgtgctagagtagcggcctgctcaatggcagacaggagctggggcaggggtcagggtggggccaatgccatggcaggggcgggggagcggagtccacctggcacaaccaagaatctgcagggtttatggttgaagagtgaagtttgcaagatcctcaggagcccatgaacaaggaggcggaggaagagaccatccaagacaaaagacaaaggctgacactgcagcagctgactttctgggtctctcctgaaatgctccccctgcctgccgccacctccaaggcaatggtgggagctggcggcgtgagggaggcacggggttcagcatctgggatcctccctctccggctctcaggatccctgttaggctgagctgctcatgcctgactccgtggtgtgtaacatgccacgtgccaataaacgtcctcaaagcggccagctacatgtgctctcttgctatttattccatctaaggaccatgactgaggaaagtgggccttcacgagaggggcctgggctgcccaagctcacactctgcggtaaggtggttccccgctaagttggtggggccacccaggctggcgcctctcccaaccccaacgcaccgaagagtcagcatcctcagaccgcaggtggtcggcaatgtagtgcacaccttccagtgccttctgcatgtggggtgatagcagcagctcaccctcctgcagcagagcctcagccttgggacctgaggccccagagtgcaggtggccgtggctgcagagggtgcccacagagggggccacatgacctgcacatgcccatctgtcctcctcctccaccaccacctccctctcctcggcatccacgttgctctccagccagtgataagaggggctgagcttcaggcgtagggggtggcagagctccacgggtggtgggggccggttcatcagaagccaccggggcacacagcccagaagggccccccgcacccagtggggcatggtgtgggtgctgggggagcggtggtgcacattgagcacgaagacggtgatgacgatggacagggtgacgaagatcatggtgaacagcaggtactcgccgatgagcgggatgaccagcgaggtggacgggatgatctcagtgatgagcagcaggaagacggtgagtgacagcagcaccgaaatgcacagcgtgatcttctcgccgcagtcggagggcaggtagaagaccagcacagtgaggcaggagatgagcaggcaggggatgatgaggttgatggtgtagaagagcggcagccgccggatgacgaaggcgtaggtgacgtcggggtagatctcggcgcagcagtcgtacttcttgctgttgtaggtgcccgtggcattgacgatggcccactcgccgctctcccagtagtccttcaggtccacagtctgctccatctgctccaggtcgatcttggccttgtcataagtccaggagccaaacttcatcttgcagttctgctggtcgaaggggaagaaggtgacgtcgatgctgcaggagctcttgtagatggccgggggcacccagtgcacagtgcccgtggagaagaggtgggccttggtcatgtgggtcactgcaaactccccatctgcactgagaagaggagaggagctggggagacccctgcacacccacctgcctgagccaggctactcagagagctggcagcaggggaacccgaagaaccaagtcagacccggccacactggcggggtttatttatgcaagtgtgtaagtctcccccggcatgcacatttatagccactgagctgtcttgtcaattactacctttttaaatacaaaaggaggaattgtgaggaatagaaggaagtaccaagaattctaaaaacaaccactaataacattttgatgatatatatgtatatatataaaatgtaaaacgattatatatacataatctatcagtatatgacaatcatatatttgtgatcatggggtatatgttgcttgattgcctatttttattcatttaatattttattttatttgcagtaaggaaagagttgaatagacacaaggccagccacgccacgggggagaaggagatagcattcaaagcatctcttccaaagttcgtgcgtgttaggggtttttcaaaggcagttttggggaaggggtgggtgtggccaggtgcttgctgctgattggctgggtggggatgacatcacagggggtcaaagctgtcctcctgcgagctgatcatttaatatattagagtgatatctatgagtctgtttttcttccctagcagatgatgagtcggtcccttaggagggcgatccctttccacctgggatcatccttgctcagaagagacctaacacctttgcgggtgaagatactaccttgaatgtatccatttaacatgcgtttttgagcccctcatccgctagggcctgtaccagagctgtgcagaagaggaatatgagaaaagtccctgcctttaaggagccatgaggagatgagacgtctccaggaaccactgcaacatcaggcaggcagttggcaacactaagagggcagtctgggtgctccccagaccctttgggggaaaactcccttctgggaggtgagcagggtcatcgataagcctgccgtttgcaaaaggccttgactgatggtaggatttggctgagaaatgggcagagagccttccagtagagggtcacacagggacagagagtgtgaatcaggggtatcgtgggactaggcattcaaggacccacaaggagtctggggacactggaatagtggtgaccagtcaggtagcacttcctggaagcctcagcccctgattccaccaggaggtggctcggtgggctcctgctctagtctttaaccatcctccctccccttctaattcccacagtcaatcctaaaatccaagaaatcagaagagtacttgggaacagggggcttttttcccccatggagtagttccatggtagagatatgggcaggctggaaataggaactttgaaagggagtaacaaatacattgagacaaaagttaaaaaaaatttttttttgaggcggaatctcactctgttatcgggctggagtgcaggggtgtgatctcggctcactacaacctctgcctcccaggttcaagcaattctcctgcctcagcctcccaagtagctgggactacaggtgccaccaccacacccggctaatttttgtatttttagtagagacagggtttcaccatgttggccaggatggtctcaatctcttgacctcgtgatccgccggcctcggcctcccagagtactgggattacaggtgtgagccaccgcgcccaggcaaaaacaaaaaatttttaagcattttgtttatcacaaacaatgaccactagatggcaacatgtgctcacttgggggaaggaaccttgcaaactctaagatgccttcctcttaaccttgagtggggtatctgggtggaggggatccatctctaaatgtaagcaagacttcggcttggaattttgtcccccaccaacatttcttgtaataaatcaggtaacaccggctgaagtcttattggataattgtcaaactcgaagtcatatttgatgtaggactttgctcctgacctctgccacatgtacaggaagtggaaactagaaggaccctgggtgccagctatggggcacagagatacgacagggtggggagttcatgagtcctgcagcagctgcaaacactaggcacctgctgtgtgagagcggccagtgtaagaacccaggatgaacacgtgttccccaaaatggcttaggtgcaagggcgtagttctgaccagaactggacggtgtaaaaaaaaaaatctgacccatctgaagacacaaaatccagaaatgggttgtttttccttttatttctttctttaaagatagcatttccaaagtaggatcaaatgaattgggaaatgctgggctaggtgggtgtctttgctgcagaacttcaaataacattttttaaaatgctattgtgctctgccattttccaaaggacttgggtggggatgggggtgggtgttgtgacatacaatgttatccaaaattacttgaccacagaaccctttttcatacctatttataactcaaagaagccatgctccttacagccccaccttagaaaacctttttagatgaacataacaccaaatatcttttcattttaacttctttacttctaagggaagaattgtctgataccaaacacagaaatgaaattatagatgtctatttattccatcaaaatattttttattgatttatttttgtcccctggggctctctttagactcctctgccttctattaacttcttgtcattgtggtcaaagattactcctttttagtcttgaagacaactacaaaacaacatgattgggaaaaaggaaactgcataccaagtgagcacatgccctttgaaggtgctggcccgatgctgcctgcctgtctgaacaacactgccacccctcacaacttcaaccccaaggtattgttttttgagcctgcaccaaatttttcaaagaatactcagtatggacaaatctctgtccctctagcacagtgccaggcactgatacctaaaaggtgctcagctgccattcattttggtgtagagtgagaacaaaaggaaagaaatgaaggaatagagagagaggtaggggaggcatgctcagcacagcagtcgagaaggaggcgaggaagctgacaccaggggggcccctcccaaggccatggacccggcccctgcaagttggcctcccctcatccccccaggaccccaatggcttcctacttgttgtagagaacaatgtcggggatccagatcatctcagaagggaccctgagagatgtgatgttgccaaaatcagcggggttccagcgcagtttgtagtcgctccactcctgtgtgtggggaaggagttgtgtcaacctcgcttccagggagcagcctagggcaaagctagcacaccccggggatgcccagaattgggccaagcagcccccttggagcagccagggctccccacccagcccagaatagtggagggagctgcggtgctgggaacgggctctgagcaagtaaccaaccttctcgctttgcctggactttagtagtcaaggtcccgggcacatgaagttcacccttgtcctgcctctagtcctcgctctgccaatccctggctggacgaccttggtgggccacctcactcatctctagtgaaatctctcatttttagggcatcacagtttatggtttgttttatgctctccatctaggaaaagcctccacgggagagccaagcggggaatgcagagcaggtgaaagtatctccccatttagcagatgagcaaactgaggacccagagacaggaaaatcaaccagccagaggcatacagtgaggcaggggtgttacccggggaccttcaaactgcactctcaagtgccccacaggagtcccaccagagacgggatgtctggcccccacccctgcctccaccgacgcaggtccaaatcagtccccctgcctccatcaggttcgtattatctccgtagtccatctgtcaagttttcaggtccaaccaacattttgaggcacccacaccaaattgtggtacattaatcctcccaggcatgtggcagtaggttgtgttatcctcattttgcaaatgaggaaactgaggctctgagaggttacgtagctcatccagtatcacaagctaatcagaggcattgctgactggcctcaaactccagtactccttccttgccctgccaccccaaccctgaagcccaggtgaccagcccatggggacaactgtggcagcccaggttctaggcctgcctccctgcacacatacaccgcatgactgggtagcttccaagttcctgcttccctctggccctcagctgtcacatctgtaaagatgagatgagtgaccccctgatagctcctgggttacagcatcagagggagggaagcctccaacctaagcgggatctgtgcgccctttcctgagtctaactgggctctatgactgtctggaccagtagtatacaacaagatcaatgctggcccagtttcttttactccctgtctcttgggactctcactctggaatccctgaaccaccaggcaggatgtctgactcccctgctggagagactctgagggtgcctgaagggggcgaagggcccatctgagtccagccttccagaaccttccagcaccttccagagccttccagacatccctgctaagggacagatgtgtgaattaagctgtctcagaccctccagaccagatgaaccctcactcaaatatcacaaagtaaccctagtggtcaccatgt

SEQ ID NO: 509 - DNA, 3386 bp, Homo sapiens
agccgttgcacacctacctgcccggccgacttacctgtacgactgcaatgtgccgatcttagctgctgcctgagaggatgtctggggtgtccgagcccctgagtcgagtaaagttgggcacgttacgccggcctgaaggccctgcagagcccatggtggtggtaccagtagatgtggaaaaggaggacgtgcgtatcctcaaggtctgcttctatagcaacagcttcaatcctgggaaaaacttcaaactggtcaaatgcactgtccagacggagatccgggagatcatcacctccatcctgctgagcgggcggatcgggcccaacatccggttggctgagtgctatgggctgaggctgaagcacatgaagtccgatgagatccactggctgcacccacagatgacggtgggtgaggtgcaggacaagtatgagtgtctgcacgtggaagccgagtggaggtatgaccttcaaatccgctacttgccagaagacttcatggagagcctgaaggaggacaggaccacgctgctctatttttaccaacagctccggaacgactacatgcagcgctacgccagcaaggtcagcgagggcatggccctgcagctgggctgcctggagctcaggcggttcttcaaggatatgccccacaatgcacttgacaagaagtccaacttcgagctcctagaaaaggaagtggggctggacttgtttttcccaaagcagatgcaggagaacttaaagcccaaacagttccggaagatgatccagcagaccttccagcagtacgcctcgctcagggaggaggagtgcgtcatgaagttcttcaacactctcgccggcttcgccaacatcgaccaggagacctaccgctgtgaactcattcaaggatggaacattactgtggacctggtcattggccctaaagggatccgccagctgactagtcaggacgcaaagcccacctgcctggccgagttcaagcagatcaggtccatcaggtgcctcccgctggaggagggccaggcagtacttcagctgggcattgaaggtgccccccaggccttgtccatcaaaacctcatccctagcagaggctgagaacatggctgacctcatagacggctactgccggctgcagggtgagcaccaaggctctctcatcatccatcctaggaaagatggtgagaagcggaacagcctgccccagatccccatgctaaacctggaggcccggcggtcccacctctcagagagctgcagcatagagtcagacatctacgcagagattcccgacgaaaccctgcgaaggcccggaggtccacagtatggcattgcccgtgaagatgtggtcctgaatcgtattcttggggaaggcttttttggggaggtctatgaaggtgtctacacaaatcacaaaggggagaaaatcaatgtagctgtcaagacctgcaagaaagactgcactctggacaacaaggagaagttcatgagcgaggcagtgatcatgaagaacctcgaccacccgcacatcgtgaagctgatcggcatcattgaagaggagcccacctggatcatcatggaattgtatccctatggggagctgggccactacctggagcggaacaagaactccctgaaggtgctcaccctcgtgctgtactcactgcagatatgcaaagccatggcctacctggagagcatcaactgcgtgcacagggacattgctgtccggaacatcctggtggcctcccctgagtgtgtgaagctgggggactttggtctttcccggtacattgaggacgaggactattacaaagcctctgtgactcgtctccccatcaaatggatgtccccagagtccattaacttccgacgcttcacgacagccagtgacgtctggatgttcgccgtgtgcatgtgggagatcctgagctttgggaagcagcccttcttctggctggagaacaaggatgtcatcggggtgctggagaaaggagaccggctgcccaagcctgatctctgtccaccggtcctttataccctcatgacccgctgctgggactacgaccccagtgaccggccccgcttcaccgagctggtgtgcagcctcagtgacgtttatcagatggagaaggacattgccatggagcaagagaggaatgctcgctaccgaacccccaaaatcttggagcccacagccttccaggaacccccacccaagcccagccgacctaagtacagaccccctccgcaaaccaacctcctggctccaaagctgcagttccaggttcctgagggtctgtgtgccagctctcctacgctcaccagccctatggagtatccatctcccgttaactcactgcacaccccacctctccaccggcacaatgtcttcaaacgccacagcatgcgggaggaggacttcatccaacccagcagccgagaagaggcccagcagctgtgggaggctgaaaaggtcaaaatgcggcaaatcctggacaaacagcagaagcagatggtggaggactaccagtggctcaggcaggaggagaagtccctggaccccatggtttatatgaatgataagtccccattgacgccagagaaggaggtcggctacctggagttcacagggcccccacagaagcccccgaggctgggcgcacagtccatccagcccacagctaacctggaccggactgatgacctggtgtacctcaatgtcatggagctggtgcgggccgtgctggagctcaagaatgagctctgtcagctgccccccgagggctacgtggtggtggtgaagaatgtggggctgaccctgcggaagctcatcgggagcgtggatgatctcctgccttccttgccgtcatcttcacggacagagatcgagggcacccagaaactgctcaacaaagacctggcagagctcatcaacaagatgcggctggcacagcagaacgccgtgacctccctaagtgaggagtgcaagaggcagatgctgacggcttcacacaccctggctgtggacgccaagaacctgctcgacgctgtggaccaggccaaggttctggccaatctggcccacccacctgcagagtgacggagggtgggggccacctgcctgcgtcttccgcccctgcctgccatgtacctcccctgccttgctgttggtcatgtgggtcttccagggggaaggccaaggggagtcaccttcccttgccactttgcacgacgccctctccccacccctacccctggctgtactgctcaggctgcagctggacagaggggactctgggctatggacacagggtgacggtgacaaagatggctcagagggggactgctgctgcctggccactgctccctaagccagcct

SEQ ID NO: 510 - protein, 1001 aa, Homo sapiens
MSGVSEPLSRVKLGTLRRPEGPAEPMVVVPVDVEKEDVRILKVCFYSNSFNPGKNFKLVKCTVQTEIREIITSILLSGRIGPNIRLAECYGLRLKHMKSDEIHWLHPQMTVGEVQDKYECLHVEAEWRYDLQIRYLPEDFMESLKEDRTTLLYFYQQLRNDYMQRYASKVSEGMALQLGCLELRRFFKDMPHNALDKKSNFELLEKEVGLDLFFPKQMQENLKPKQFRKMIQQTFQQYASLREEECVMKFFNTLAGFANIDQEYCELIQGWNITVDLVIGPKGIRQLTSQDAKPTCLAEFKQIRSIRCLPLEEGQAVLQLGIEGAPQALSIKTSSLAEAENMADLIDGYCRLQGEHQGSLIIHPRKDGEKRNSLPQIPMLNLEARRSHLSESCSIESDIYAEIPDETLRRPGGPQYGIAREDVVLNRILGEGFFGEVYEGVYTNHKGEKINVAVKTCKKDCTLDNKEKFMSEAVIMKNLDHPHIVKLIGIIEEEPTWIIMELYPYGELGHYLERNKNSLKVLTLVKLQICKAMAYLESINCVHRDIAVRNILVDECVKLGDFGLSRYIEDEDYYKASVTRLPIKWMSPESINFRRFTTASDVWMFAVCMWEILSFGKQPFFWLENKDVIGVLEKGDRLPKPDLCPPVLYTLMTRCWDYDPSDRPRFTELVCSLSDVYQMEKDIAMEQERNARYRTPKIPTAFQEPPPKPSRPKYRPPPQTNLLAPKLQFQVPEGLCASSPTLTSPMEYPSPVNSLHTPPLHRHNVFKRHSMREEDFIQPSSREEAQQLWEAEKVKMRQILDKQQKQMVEDYQWLRQEEKSLDPMVYMNDKSPLTPEKEVGYLEFTGPPQKPPRLGAQSIQPTANLDRTDDLVYLNVMELVRAVLELKNELCQLPPEGYVVVVKNVGLTLRKLIGSVDDLLPSLPSSSRTEIEGTQKLLNKDLAELINKMRLAQQNAVTSLSEECKRQMLTASHTLAVDAKNLLDAVDQAKVLANLAHPPAE
